United States Patent Application Publication US 2006/0134663 A1 - sequence listing, part 127

SEQ ID NO: 423603 - DNA, 442 bp, Homo Sapiens
cactggttatccacgcatgcctgtggtcggagctcagtgatgggagcaggtgatgtctccactccacatccagaaccaagtccccggaaggaatcgagtcttattcctgggtggcacagtagggcacccactcgtgggacaaagccctcagaattaagacccatggggacagagccccagccctgccactgacttgccagggatccctggaagggtccctacccaactgcacctgtggccacctggggtctctacaaacagaccagttgcttgctgcccccaccctgcctgagacgccagcattgagaagcgagacccagggtggagggcccttgcttccaggtacctgcctgagacgccagcattgagaagcgagacccaggtggagggcccttgcttccaggtacctgcctgtgacgccagcattgagaagcgagaccca

SEQ ID NO: 423604 - DNA, 185 bp, Homo Sapiens
  misc_feature (174)..(174): n is a, c, g, or t
cggggaagcctggtccatgacctccaaatgtttagatagcctttcgttgttccactgaaatcccgtgtggagaaccttggtctcagttctgtgtgctctttagacgtaggttgcgccatgtcgcttcgctattctccttgcaaggttatttctatttgattcattatgccgaangtccaggtatg

SEQ ID NO: 423605 - DNA, 187 bp, Homo Sapiens
tggtctcccattaatatatgcaaatgggtgatagtctctaaaactgttaatatcactgcttcctcccatggtgggaatacgagttccaatcttccaacattgacccagtagggtgactgtggcaagtcgcttaatgcctctaagcctgcttccacatccccaaagtaggaacagaaggtccagtatg

SEQ ID NO: 423606 - DNA, 417 bp, Homo Sapiens
atactggacttctactagggcatctgtctgcaaatgcaccttaacctgaccgcttgggctgtgggggagcctgtttcagggaaagtgagggacgcgccagtttcctcctttggacttgatgaggcacgaacgcatctctaataaagccaggtctccccgccgtggctccctgggcgggtgcctgtggctcgggccatgagtcacgctgggtaaccccactacggggaagagggcaggaagctgggagccaccgcctctgtgcccggttgtcatctcggcacgagggcgaccgtcggcttcgtcctgccctcatggctgagggcttttgggatgtggcgggagacgggggagtccacttctcaaacccggtgcatcctgcagggccgctgcactcacaaaaaggctgactccacacag

SEQ ID NO: 423607 - DNA, 399 bp, Homo Sapiens
tactggacttgctcatcccctatatctaggctatataaataaatcaaatcctacttccaaaaaatattctttaaatatctgaaaataactatatcgcaagtctcttttaacccagctaaatactaatcttccctttactgttcttcatgatttccagaccattctcccttctagtaaactcccctcaaaaatgaagctccaccactctgaacatctattaagtattctattaagtggggaagaacatgacacctcaagagttcacaccaatcatctaaaacacaggattgtttttatgaactctaattaaccaatctaacaaaccctggaattgaggttggtaagcaaagtacagaacttcctatttatctttatttaacttttacagtttaagtttct

SEQ ID NO: 423608 - DNA, 110 bp, Homo Sapiens
ggcatctgacttctgcatacctgaccttctggcatcctgaccttctggcatacctagagcttctggcatacctggaacttctggcatacctggagcttctgtgcatacct

SEQ ID NO: 423609 - DNA, 146 bp, Homo Sapiens
actttagtcctctcaaatgtgtattatctcccagatcacaagacttcttggggatatgaaatcattctacatttcctcctgctttatgtactttatattttcatattccgattgcatgaatcttcagaattgctttttccccttct

SEQ ID NO: 423610 - DNA, 209 bp, Homo Sapiens
tcgatcgagccggccggcatactggacttctattgagcctaaaatgggctctcttaagctctgctctccaatcatagtattccctcatgtagccacacaaagccattctgctgccttctgcattgtgctgtgtgttttcatgctgattgtctaattcaaccttcctaacttccattctaagtaagcacaatgcagaaggtccaggtatg

SEQ ID NO: 423611 - DNA, 185 bp, Homo Sapiens
ggtacttctcctgaactctagagccctggctgggcagatctcctgctgaaacctggcgcagctgtcatggggaccgcccacgtttcctttgtccatgtctatctatactgatgtctttcctctctttgagagctgtgcctaacttacccatatctccgccatcctccacctagccacacatccat

SEQ ID NO: 423612 - DNA, 467 bp, Homo Sapiens
tctggctactggacttctcctggtcttctttaagaagaacgggacaaaactgctactcttaagacaaatattccttggttcaaatgcaataccaacagttcccatcctgtggaccaaggagaccaggaatccatttgtgcatcaagctctgcctgtagaatgaataatgtctctaaatatatcaaccatttactactactaaattgacaagtactaaattcgtaactgtttttaattacatactttccaattcagataataaaagtgcagaaatatggtatatgtactaatagcaggcgggggaaagggacttacataatggaacatttttttatactgtcatgtttaatatttgtgaagcattactaaacactgtacaagaattatatttatattgaagtcaattcctcaaaattgtagctacactacaaatttccccaaccacctactaaacaatcatagagaac

SEQ ID NO: 423613 - DNA, 229 bp, Homo Sapiens
catcgagccggcccctaccttgatcaagtggactcacttttcagtgaccatgaaatgaccctactctgagatgtgtgagttcttttctccattaaatatctttgtaacggcacctactctcaagctgcattagccaagacaccatggaaaagtctctgaacttttctgagactcaattttcttatctgacaaatgggagagtaaatccagcccagaaggtccaggtatg

SEQ ID NO: 423614 - DNA, 212 bp, Homo Sapiens
ctggacttctcagggcactggtggcagagccatcctggcagctggagcaagtaggaaccagcctttgacatcattccattacaggacacactcgcacatacacccctgcactcatcagattgagaccatttagacaggccaacgaacctagtatgcccatctttgggatgtggaaggaaaccatattaataataacagaaggtccaggtatg

SEQ ID NO: 423615 - DNA, 250 bp, Homo Sapiens
  misc_feature (84)..(164): n is a, c, g, or t
taccgaccggatactggacttctctaatactcagtattagagaaggtattaataatgtgtgccacaagatgttcattgcagtgnnnnnnnnnnnnnnnnnnnnnnnnnnnnnnnnnnnnnnnnnnnnnnnnnnnnnnnnnnnnnnnnnnnnnnnnnnnnnnnnnggtatatgtttgatattggtgaaaaactgaaaaatgaaaatgaccaacaaaaagaaggtccaggtatgccatcttttccattctta

SEQ ID NO: 423616 - DNA, 383 bp, Homo Sapiens
ccggcaccggcatactggacttctgcctcgaggcttgtcttgtctcttcccctacactggttgcagatttcatggccctgatcatatccttctctttccatggctcctacagatgagagcccagcccctcacgaggttgatgtatcgggtgtttaaaggaatataacgcatagcccagtacaagggcagacatcggtgctggtgaggaggtgtcaggaaggcatttctggttgggcagctcctcgcacatctgagcagctgccgagcacccctgcacatgcctgacttggctcccctcaggccagtgtttcttagacctggatgcccaaggagctgcccaaggagcaagccctgggctctccccggagattctggtttgggaa

SEQ ID NO: 423617 - DNA, 189 bp, Homo Sapiens
atggaccttctacacatttcggtaattaatgatggttgaacaaagttcaaaatttttgactgttttcaatctcttatttttaaaactgcagactgtcaacacataaaaaaactgatgttgacagtttctgggttacaaaaaacttatttttcccaaacagaacaagacataatgataactcagtaacaa

SEQ ID NO: 423618 - DNA, 333 bp, Homo Sapiens
gcattgcattcgccctggaggactggccaatacaagttttcatgttgaaaagctgagtaaaaatgactctgggtgtaggccaatatagtatcactcgggaaaatagaaaagcacaatatgcctctccctgggaagcagtttggccaggccaaagctcccagtaaatggaaatttaagcttgttgatttgggaaactcttggtatttgcccctcagcctttgtgaaatggatcttctttttaaaggggggaggggtaggatagaagagacttaaaggctttaaataatgtcccctctgaaccatctaatcacctccttagaaggtccaggtatg

SEQ ID NO: 423619 - DNA, 271 bp, Homo Sapiens
aaaggcaaaaatgcttcagcgttccttcctatttgactgggcactcaacgtgtgctagaaatagactaaaacattcttacagcatgttagtgtgtttgcgtgtttgctgaagatcacttcggtataaaccagtttgttaggctctctgggttagggactctgcattttcttcctctcctaccgagatggtgtccactggtccagccccggcgggagcagcaggcagggcacagctttactggctgtttgctgctttgctttagtgcaatgt

SEQ ID NO: 423620 - DNA, 285 bp, Homo Sapiens
atatatggttattcagaaaatagaatgagctacggaagagtagtacattctctaccaatagctacgttaatgtggcaattgtaaaagccaaatgtcaagcgttggttaagggttaagtttctgttttaggtggctaaccaggaagaaaaaagcctttaagattcctctcttttctaagattcaacgaattatacatatgctcacatatttgtcataaaccatgccaacctcctaagcagatatgtatacaacaaattcagctgaaaaagaaaatgtacatactgt

SEQ ID NO: 423621 - DNA, 107 bp, Homo Sapiens
  misc_feature (47)..(47): n is a, c, g, or t
tatacttagagttgttctgcaatgacaaaaaatatgtgggataaccntgttaataccagttctttggttgcatgtcaggatcatcttgtatagcttttagaaatgca

SEQ ID NO: 423622 - DNA, 166 bp, Homo Sapiens
  misc_feature (78)..(122): n is a, c, g, or t
ttctctgatgtctcctatgtaacagacggacagatgggaattcatgagaatcaaattagaaagcctaaagtgcactcnnnnnnnnnnnnnnnnnnnnnnnnnnnnnnnnnnnnnnnnnnnnnccatattcctgctcaaacaatgtccaaactcttaacccgagcgc

SEQ ID NO: 423623 - DNA, 235 bp, Homo Sapiens
  misc_feature (12)..(12): n is a, c, g, or t
  misc_feature (224)..(224): n is a, c, g, or t
ctttgtggggancgggcagcagcgaatagtttggcagccttctttagatttccttatggtttgagtcatgttaaattcttcaacagaagaatttagctctgccttatgttgtcttgaataccttacttgggatttgggagaactgctttcccagttcctgagagaacctagggcaagttagaagaaaacttaactcctatgctgctgaaagaaaaccataagtntcaagagatcc

SEQ ID NO: 423624 - DNA, 133 bp, Homo Sapiens
  misc_feature (89)..(89): n is a, c, g, or t
  misc_feature (108)..(108): n is a, c, g, or t
cagtgcagaggtatcactgttgccagcacttgatctagaatcctagattctaggtctggttagtagcagatttactaggtggtagatcntgaggctacctatagaacnttcccttggcagtcataattagctc

SEQ ID NO: 423625 - DNA, 144 bp, Homo Sapiens
gaagatagggataaaatggaatttatacacataatacaagaaagtttttttctgggaagagtattgatcactgacagtgtttagaattcccggtgctcagttataataacagagcaccctgactttcagtcggcttgatcagtc

SEQ ID NO: 423626 - DNA, 382 bp, Homo Sapiens
ctggcaatccacgcatggatggcaatcatggctggggttcatgggtagaagaagtcaggtgtctagaactttggataggaaaaaaagttttatcttttctctgtctggtagctgaaatatagcatttcctttcatcatgaatgtgaagcaggaaaatagggtctggaggcagggaacataaggctgattcacactaaagctatgacaggaaatatcctctccacagggcgtaggcccaagtaaatgacttgtaacttcacgtcatcctttccatttacacagggtataccccaaagtaaccaactggaatactctaggggatatttaaactcccaaaaattctctaacaggatgtatagagctcccatgcgtgaattgccag

SEQ ID NO: 423627 - DNA, 381 bp, Homo Sapiens
ctggcaatccacgcatggtaacaggagagagagagtgaagagggaagtgctgtacacttttaaacaaccagatctcatgagaacttactatcataagaacagcaaggggtaaatctgcccccatgatccagtcacctcctaccaggttcctcccccgacattgggaattacagtttgacatgagatttgggtggggacacagagccaaactatatcattctacccccggcccctcccatatctcatcacctcacatttcaaaacacaatcatgccttcccaacagtcctccaaagtcttaactcattcctgcattaactcaaaagtccaagtccaaagtctaatctgagacaaagcaagtcccttccgcctatgagcctgt

SEQ ID NO: 423628 - DNA, 166 bp, Homo Sapiens
ctgagatgacagtcggccggccggggacccgggctttgtgtttgggaaatgggagcagcacttattagaaatggggaaggacagccgtgtggcgggaggagcaagcccgttttctgtctgttcacaggagatgcaggggcgcctgtaagagaggctgcagccccaa

SEQ ID NO: 423629 - DNA, 386 bp, Homo Sapiens
  misc_feature (359)..(359): n is a, c, g, or t
ctgagatgacagtcggcgctgagatgacggccattaagagggctgagcagaggcgacgtggtcgggggatgatgcaggcgctcagcttcctcagaggaagagcaactgctgtcggagtttgcagagatgggagagctggaagagctaggagagcttgcagacactgtaaccaaggggctgcatcccagaggctcctggctcctgcctttcccttggaatgacggccattaagagggctgagcagaggcgacgtggtcgggggatgatgcagtcgctcagcttcctcagaggaagagcaactgctgtcggagcttgcagagatgggagagctggaagagctaggagagcttgcagacagngcagaatgtcagcagctgccatctcgt

SEQ ID NO: 423630 - DNA, 223 bp, Homo Sapiens
ccgcacccgctgagatgacagccggccaccatttttcagtcatgccttgaagttcgttcttctagcccattgcctagaatgtaaccccctccgtccttttcacgttctttgtgcttgtccttcaaggccccagttaaatgtctgctacaagttggccccttcttttctgtgctcctgtaactctcctgtagcgcttttcaggtccggccgactgtcatctcag

SEQ ID NO: 423631 - DNA, 326 bp, Homo Sapiens
gagacagctacaaacaagagagaccgatcaccccaccgctactctcagacggtggctcacacgagggagaccgaggaccccacgggctactctccgacggcggctcacacgagggagaccgaggaccccaccgctactctccgacgtcggctcacacgagggagaccgaggaccccaccgctactctccgacgtcggctcacacgagggagaccgaggaccccaccgctactctccgaggtcggctcacacgagggagaccgaggaccccaccgctactctccgatgttggctcacacgagggagaccgaggaccccaccgctact

SEQ ID NO: 423632 - DNA, 367 bp, Homo Sapiens
taatctgtactcattgcgaatgaagtcctgagagaagaacttttccctgtattcaccttagggttgtatgtgccgtagggcattcagatgaggactgagaaaaagccattggattggccattaggaggtctttggtgacttttgctgacaatcagggggaaaggatggggtgggagccctggtgtcctataaactgagcagagagttaatcaggtttgcaggcacattgagaaatgggtagtgatgggcagagtgaggttgggcttggaaagctttttgtgagaaaagtcagtttcaacacttcgataggggcagacctggggggatcattgacaaagtgacagttacattggatgggtaccgagct

SEQ ID NO: 423633 - DNA, 135 bp, Homo Sapiens
gattgtccagaagccttccataggaggaatgcatggtcattaggtatgccacagctccaaacaccagcaacaccactcaatgactattgaggtaatgacagtgacattgcagctccacatggctgtggagctgta

SEQ ID NO: 423634 - DNA, 485 bp, Homo Sapiens
taatctgtactcattgcgagagtactgagcactcagagggtggtgaggatggaccaaacaccaagcactcagagggtagtgaggatggaccaagtaccgagcactcagagggcagtgagatggaccaagtacctagcactcagagggcagtgagaacagatggagcactcagtactgagcactcagagggcagtgaggacagatggaacactgagtagtgagcacgcatagggcagtgaggatggactgagcaccaatcactcagaggacagtgaggacagactgagcattgagcactcatatggcagtgaggatggaccaagcaccaagtactgaccacttagagggtagtgaggatagactgagcacccagcactcagaggtgagggtgaatggagtaagttgcgagcagacagaggtgagtgcgaatgagcgtatcgcgatcaattacagagtcatgatcatagctgtagctgtgttactgc

SEQ ID NO: 423635 - DNA, 466 bp, Homo Sapiens
taatctgtactcattggatcaaatcaaggaaaatcacataagcaaattcagaaaaatctgcttcctcagtgtagctctcttgtattttacaatgtagctctcttgtattttattttcatggaaaatcaccgggggctgggaggggtggcaggaggaagctctccctcttcccagttgttcttctttccatctaatcccacactttcccttctgacacctgcttcccgattctactcccttactgccaccttctcacatccttaccaacatctactgacacctcccccatcaacccagcctcctccactgctcaggtgaacaaagctgtcatggccagaatggagcatgaaggcccggtcaccgagtcatatcaaaggccagaaaacaagggagacggaggggagggagctcaagggccagaggaaagctcccgcaatgagtaccgattagggttacgagctcgaat

SEQ ID NO: 423636 - DNA, 126 bp, Homo Sapiens
taatctgtactcaattggctttctaaatcacctgcgctttcacttccactgtcactccccactctactgcagctctctgatgggccaggagcttctctggtgctatcaattctgattctttggcct

SEQ ID NO: 423637 - DNA, 492 bp, Homo Sapiens
taatctgtactcattgcgtaggtatagtcattttcaattcatttttgtgtttccagtatttgcacagggcctaacccaaggtagggattcagtgcccaggtgcctcaatcatgcctgaaccatgtcccaaggtacaggaaaggatgaaggacccacattcttctactgtgacccttgcaccttgggaatttgcctgcaagtttttgcttgttttatctgaataggtagggtcagcttgatcttgatctgtggacagaggagcatccacatacttggtttcatctgctctccaaggcttgaaatcccttcaatagctttaaaatgtagtttctaccttcttaagggaggccaagccaactgtgtctaaagagtcagaggctgtgcttacctccctcaccctgaccaggctggaacttttgagaggaagcaatcacaagaaagggagcctgaaatgcatttctgccgcacatccctgcgttcagcatttccagc

SEQ ID NO: 423638 - DNA, 438 bp, Homo Sapiens
taatctgatcattgcgacacatatgtaccaaagaccaacagttcgtcatgtccacctgacatttcgcactcgtatggatcaagagtccaatcccagatgattccacatgtcacctttgccctggcagtatttgccctaacagataggtgctatgtcagagccaccctttgactgactacaagtcgaccaaggatcttcctgttcataaatcttggtaagatcacagttatcgccctgtaattagattccatggagtgtctctcagcatgtgggttggaactaaagcagaattggaacgtaagctctttttctcaacagattcagagtccttgaaacttgcctgaatggccagggcacatcttgaagacgcatgacaaagaacattcatataaatatctgttgtctgcgcgatgagtacagattagggtaccgagctcg

SEQ ID NO: 423639 - DNA, 170 bp, Homo Sapiens
taatctactcattgcgcaggatgaaatcaatgagctccagttctctctcgcagaggagctggtatcgagtcgtgaggcggaccggcggagcaggggattagcaggtccagctcactgtcttagccgagcgaatgtcatcatcatgatgcagaagcctcgggtatcagggc

SEQ ID NO: 423640 - DNA, 106 bp, Homo Sapiens
ttagggtgagggaccaacagtaacaccccacccagcaagtcacaactaaaatcctagagagttctttactcctttccttccatgtctctctgcactacctgcagtg

SEQ ID NO: 423641 - DNA, 506 bp, Homo Sapiens
taatctccattgcgtaataaatttatgaagcattgtcacttgggacacaagcaaggacactgtcaacatcaaaaactaaacgtgtaacagctcaagtcccatagcagtgtaatgggtgaataggggcatccacagccttagacagtactctgtgtgcaacaaactgaggcaagaaatcacaaaaaaagaggagagtcaagatggtcaaccagacacagtcaggacgatcttttgcccacaaagcagaccatcaagtagaacagaacactataaacagatctttggaaagcaggcactgacagtggaccgagaaaggatgcaggctgaaacgggagaaaggtgggaagcccacccaggattgctgaggaccaggactcatttctggccctgggtggttcccagggaaggggtgagtaagataggcatggagaggtccactgttgccatggtcctccaggatcctagctgcgggagatcctacagacccccgcaatgagtacagatta

SEQ ID NO: 423642 - DNA, 431 bp, Homo Sapiens
tagtctactcattgcggatactacggaccttaagacaaagacggctccactccagcagtggggaaaggcagcaagtgccgctggaatccgtggggatcacactcaactgagccctgctgctggggaccgggtaacgtccgcaggctgaacttcatctcaagaagagagttttaggttttcatgctgcagagaaatcctttaaaaaggcaccaaagggcatggaactatcttctaccaaggacctttctcctccattctcctatttcgcagttaactcaagaggcgggagattttctccggggaacaagacattctaagcacctccctaggtcgaagttaggttttaaggtgtggaatagggtgggccccgaggttccgtggggttcgcgcttccatataacccctaggacttgcgcaatgagtacagatta

SEQ ID NO: 423643 - DNA, 141 bp, Homo Sapiens
ctcagggttccctttgtagatggcctgcccctttctctctggctgcctttaacattctttccctcattttgaccttggaaaacctgatgtttatgtgtcttgaggatggtcttgtgtagaatccgcaatgagtacagatta

SEQ ID NO: 423644 - DNA, 251 bp, Homo Sapiens
actagtggctgaattactggaggagagtaaacaagggaaagtaatatgacagtaaggccagagagatagccaggagccagatcatgttgggcctaattgcactgggcaggcagccatgaagaactttaagcaaaagagggacgtgatctgattagaaaaagctaactcagcatgctgtgtgaagggggagaaaggtctgttgggagccgtggcaaaagtagagatagggagacaagtcacaagcagcaatg

SEQ ID NO: 423645 - DNA, 182 bp, Homo Sapiens
gtggactgaccaggcgcacttctgggaacagatgtgtgtgatcccacccgactgctgactccatcgagcttaggatggtcgtgtagtcgggacccatgtcaggagcatggctcagccccagcttgtgtgcctcagtcaggcaggcctcacctcgggcccatctcctgcgtgactccatcaag

SEQ ID NO: 423646 - DNA, 159 bp, Homo Sapiens
gcggacacagctagcggcatttgttcctgttgacatgccacctttcaagacctctttcatcgacctatttctgcaacctccctcccttctgacctccaggttgctacatagaagtgtccatttgacatttccatggcattccagacgtgcgcctgggtg

SEQ ID NO: 423647 - DNA, 116 bp, Homo Sapiens
  misc_feature (63)..(63): n is a, c, g, or t
tgccgcaccaggcgcacttcttggaactttcagtcttcctttctgtaacaggctacttaactnttttacaaaattgtttctatcatgcatagctagagacccacctcctgttagaa

SEQ ID NO: 423648 - DNA, 222 bp, Homo Sapiens
tcgaccaggcgcacttcttatatttcaacagcttccaaaatgccacccttcatactgctatcagattcaactttgtaaaacacaaatgactgtttacctttcttaaaagactcagtagtgctccagaaacccagactaatgattctcaccttttctaccagaacctatctaagtaagtgaaggttcagagtacaactcaaggagcaggctggagaaggtgag

SEQ ID NO: 423649 - DNA, 155 bp, Homo Sapiens
ttcacttgacggtgggatggaatctgtgccccctgtgctgtcgcaccctgggcttggcccatgcctttgcctgagctgtgtctctgcctaaaatagcacccatttgctcctctaaggctcgcctcagtgatttccgaaacccatttcctccatga

SEQ ID NO: 423650 - DNA, 303 bp, Homo Sapiens
tgaagtgagtttgggtgtctttatttctccatcaaaataaaagaaaatcctttcatcaaacagctcttgagaatgtactatgacaactcatgctcttattctcaagaaatcaacagtttacatagtatgctattaaagaaatggactaaaggaggaaagatgattatttctttaacttggcttttaggttattagcttcataagaacttaacaggcaatgaaaccttaatatttaataaaacaaacaagttttcagaaatagcgctaatgaatcttgataaaaatccaaaggtcatttacaat

SEQ ID NO: 423651 - DNA, 550 bp, Homo Sapiens
acgtagccgagagcagctcagtactctaggatcctcagtttctttgtagcatctttatgtccatgagtacccaatgtttaactcccactaataagtgagaacatgcggtatttggttttctgttcctgcactatattgcttgggataatggcctctagctgcaaccatgctgctgcaaaggacatgatttcattctttttatggctgtgtagtattccagggtgtatgtgtaccacattttctttatccagtcctccattgatgggcacctaggttgattccgtttctttgctattgtgaatagcactgtgatgaatatacgagtgcatatgtcttttgggtagaacgattcattttcttttaaaatccaaactccttaatacagcctagatatcctatatgatccagctctgctgtcgtctctcctcccatgtaactatacttgctttctctcctttctataaacacacaaattcctgttcctgcctctgggactctacccctgggaattcccactagcatccccaaggatggtagtgaggttccatcg

SEQ ID NO: 423652 - DNA, 246 bp, Homo Sapiens
gcagaagcaaacgggcacggatgtgattgtagttgctaacaattctccttactgtgcccagctgtatttctctcagtaccaggagccagctgacatgtctaagctgcttacacatctctgctgagcaagccactcaaatacaccatacccagtgaagccccactatacatccccagtacgggacaatgtgtctgaagccccactacacatccccaataagggataatgtgtagtgaggttccatcg

SEQ ID NO: 423653 - DNA, 485 bp, Homo Sapiens
gatcatgaaagtgaagatagaagagtcagaaatatggctactaattataattagtatagaaatagtggaatcatgatcaaggtgattttgagcccaagaacaaaacaaaaacaggtaattacacttcatactgagtgaagaattaatgctattaagaagtaagtagctacaggaaaatctgaatgttaataaaaaatgccctaaagggaataggttcattccttctcaatgatttttactgctgagtatccctttacaaatatcttcatttccccctttcttcctccaggttctaaaagagttttctaaagaacaaaaaagttatataatacacctcttagacaaaaatgggttgtacttgccataagcagatcccaagtggtcatgggaaccactaaaataactcctaccatttctagaatagaattctcaaaagaagcacctctagggaattctattctagaaatggtagtgaggttccatcg

SEQ ID NO: 423654 - DNA, 337 bp, Homo Sapiens
tatgggtgccagaccaagactgtcaggatccggggagacatacagcgcttgaaggaaatggacaagagcccttccattacggcacccattactcttcggccatgatcgtgtcgtcgtacctgattcgactgccgccattcgttcagtcatatctcctgctgcaaggtgatagctttgaccatgccgatcgtttgttccagtctattcctgacgcctggaagtctgcgtcctctcgcaacaagacggatgttcgagagctgatccctgagtttttctgcgtgcccgaatttttgacgaacatgaacggctacgactttggccgcagacagagcaatgg

SEQ ID NO: 423655 - DNA, 158 bp, Homo Sapiens
cattcactgcatggagcctccttactcatattagtatgtacagattgactatgtcttcttcatgatacagtcttggtaagctgtatatgtctagaaattcatccatttttttctagattatccaatttgttgatgtatagctgttcatagtagtgagg

SEQ ID NO: 423656 - DNA, 206 bp, Homo Sapiens
cgggtctagcaacagcacagcagtatatagcccttccttttcatggtaggatatatcttaatgcctaaatcgtccatttcagggatggggcgagtctgtgaaacttccagttattactaacttccaatctacacaggatccttctatcacgaattatatcaacttgaaactcagtgactgcttcagttatcacgtgaacttaattt

SEQ ID NO: 423657 - DNA, 451 bp, Homo Sapiens
aggttcgacggagagtctctaaccccgttgtgagtcgaacagctggatcgagaggctctcccacttcctcctacatctgtctctgcttctccagtcaattccaggagccctttcctcagcttctctacgataccaagcctgcatctactttcagcaggatgccattgacacagaggtaaatactagccgaattcgtgacttcaacagaatttgagctgcaagtaagtatttgcagcacagtataacaaactcaatataatgcatgccacaaaagaggtgtggtcgtagtgccaaggaagcagaatgaaagcaactgcattttcaggtagcaacaagcactaagaaagttactgaaaaaagtgcacaatttacgctgattttaatcacttggtataattctagtgggcagagaaacacataggcagttgaaactgagagtctccgtcgaact

SEQ ID NO: 423658 - DNA, 498 bp, Homo Sapiens
  misc_feature (467)..(467): n is a, c, g, or t
  misc_feature (474)..(474): n is a, c, g, or t
gtgaggggaatgaccaggaactcggcgttccagcaaccaaatgcatgagcttgacaccagattctccagtgccagtcaagccgtggaatgaccatatccttggccttcaactgggctgaagcctcatgggggaccctgcgccagagatacccagtgccacacctgaattcctaagccatagaaatgtgagacagatttttgtagtttaaagctgctaagtgttagaagactgtgttagcttatgtgcaaattatccccatgtcctgagatccagtcagttcagatcagaagatcggaagacatgaaaaagatccctgcatctctgacgcctccatctcttcggctcccttggccgatgcactcagaccttctttgtgaccaagaagtcaaagggtaagaagggttgctgtcttcccactgtctactgaaatcacaggtctccatgtctcagagagcaccctggatgngcactgncttcccttcctcagagatcagaag

SEQ ID NO: 423659 - DNA, 416 bp, Homo Sapiens
tgaagggatcttcgaattagtaatttcccacctttcaccattatttacattatttcattatttccaagatagcctccatgttttgaaagttgttttatctacttaattctatttactaaaacataattgatcgattttcctatttctattcattaaaaacagaggcacactgaggcaacagtataaaccagtgtcacctgactgagcagcctgaattctacctgaaagcaaacctgactttcagtaagcctatgtagtctttcatccagtaaaggtacaactgccttctggcttttggaaatactaaaaatagcttctgcatccccatttttacctccaaaaaatcctttagggactctctggcctaatgacctaatttctttttcactgaacggccagagagtctccgtcgaact

SEQ ID NO: 423660 - DNA, 413 bp, Homo Sapiens
  misc_feature (237)..(310): n is a, c, g, or t
gagacgagcggtccagtcgacggagatctctaacatggaaggcatttatcaaattctatgcatttttcaagaccagctcaaatgcgccttctctaggacagatttcctcatctcctcacaaagaatgcattcctttccctcaccacatatagttctttatatgattaccgtatttttcattatgattcaacttattatcttccccactcaaccaagactatcttcagaaaaaagaannnnnnnnnnnnnnnnnnnnnnnnnnnnnnnnnnnnnnnnnnnnnnnnnnnnnnnnnnnnnnnnnnnnnnnnnntacaaaacaaaattaactcacacatatatggtctctcaattatgcatatgataacactatagtgtatatataaatatgcataattgagagtctccgtcgaact

SEQ ID NO: 423661 - DNA, 191 bp, Homo Sapiens
cagcgtcatttgtaagaatagcctaggagggtcacatctgcaatccagaaaaagtaataaggttgtgactgaaagatcaagtagaggttaaccaaagcttgcatcattgcttccaggacttttctactggctgaggaactcatatattcttggagggaggaagagctacactgtatgactgacttagcctc

SEQ ID NO: 423662 - DNA, 519 bp, Homo Sapiens
cgatcgatgcgagagagttcatactaacctaacagcattaccagtgcagttgctgtcaactagatctttcaggaaaatatacagccctataaagtacagaagactatttattttgaggaaacacattataagtactaaagcgcgttgtagtacctttacgtgtatcacaggttttattgtacacattttgtactacaggaaaaccctgcggtagtggttccaacttagctcaacatccgggcatttctattgcagaataaccctgcaaatttaatgaatttggaaaccacattttttcaaaaactacagattatagaacacgcaaagtgaatactagaatctatgtttgcagatgaagtaactcattatgccctttcaatacaaaattaagtaaatatcagagaattcacagtagaactatctgtctcaaacttcggacattacacttaaatcagatagctgagtataggaaacaatccaaacctacaagtaggtaaccaacacatatttgtctgtaac

SEQ ID NO: 423663 - DNA, 489 bp, Homo Sapiens
gcttagatccaatctcagctggagagagacacctaataccagaacagaaaactacagtttcaaacccaactctgaccgtgacccaattcaatttctaattagatcaaagcaatcagcccctcaccacagttaagacaaaagaaaagagaaagcactcatgggtacgggaaaggatactatctacttcagtctctacttttcctttacatagaatctccagtgtacaataaaaatttacaaaaccagataggaggactcaatattgtcaagaggtcagttcttcctgatttaatctacagattcaatgcaatcctaataaggatctcagcaagctatgtggtagatattgacaaactagttatagaagttggtattgagagggaaaagacttagaatagccaagacaaaatggaagaacaacaaagttggaggactgacaataaccaatttcaaaacttactataaggctagtgatcaagacagtgtggg

SEQ ID NO: 423664 - DNA, 133 bp, Homo Sapiens
tcgagccggtcctgaagctctttgaccctctcaggactagttctaagtagtgcaagggctgattagagcaaagggcagcagcagtaattaagaattgccttacttcctgcgtgatgggcctgaaatataggaa

SEQ ID NO: 423665 - DNA, 453 bp, Homo Sapiens
cgaagagaggtaacggatcagagtgatcagatacaaagcaaaagcaaattatcttaattactatattagttactatatgtagcaagaattgatataatctttaaaacaaaattaggaacgcctcagtgctcaagatatggggatatcaggacacgcccaagtcggggttggtttagtaaatgtattaatttgtgcccttaaccgtgaacatctagaggctagaaataccgaacttgctggaaatgcagtcgagaaagtcccagcctcatgttcctagacctcactcaagatggagtggcgctgatgcaaatgcctctgacacttccatttccccgcatctaacaccatagtctacccagtggtctgaaatggccttcgctcctttacccagcaacctctcaggcattcttcagcactcagtcctagcatctttccctcaagaatgcatcgctg

SEQ ID NO: 423666 - DNA, 230 bp, Homo Sapiens
cgggcggaaactaagaagcaactgggtgaacatacaaaaagtgataccttccctttttctcctgacaaactttaacagggctgcccttcctacagtgaatctaacctgatgatcaccatattacttctaaaagcagatttgggacctctactacaccaacttctctctgactccttggtccactgacacggactccgacgacgacacttggtacgggcacgtctccgtcg

SEQ ID NO: 423667 - DNA, 109 bp, Homo Sapiens
gagtgcatccacgccgtctgactgcatacaacgccgcctgactgcatacaacgccgcctgaatagcatacaacgccagctgattagcatccaatgccgctaactagcat

SEQ ID NO: 423668 - DNA, 108 bp, Homo Sapiens
gactgcatccacgccggctgactgcatccaacgcctgcctgactgcatccaccgccgcctgactgcatccaacgccgcctgactgcgtccaatagccgctagactgca

SEQ ID NO: 423669 - DNA, 227 bp, Homo Sapiens
acattcgcgcgcagccatccatcctcccggcaattcttagcgtcgccttattggctaaattggaacatccactgagactgcaggccatgggggaagaatcccacacctttgctgcagtattaacagagctctctggagactctggtcggagacaggaggtatggataattgttttcttgtgctttcactaaacgtacacgcattagggagctaaagcagtgatttat

SEQ ID NO: 423670 - DNA, 587 bp, Homo Sapiens
caggtgaagacgcgcgtaaggacagaccctcgcccttgctgagctacaattgtggtggccatttgaagattgtcacatcagtcactgctcaagcagtcacacaaacgccaaacagaactatgatctagggtctgactctctatgtagacggaagaattgtgtaaactataattcccttcatccacgagtgtgctcacacgacagtcacacatgagccaagagctcaaactaagcaagtagttatgtctttttctggcgtcaaacccattacctggcatgctaagttatctgaagttccaatatatgagttagtttcccacagttccttttactgaagggtgtcactgaatcatttgtatctggacagctcctgccacctccccattctctgtaggcttctagccacttgaaagcctggtgaggcataggggctggacaatccaataagcaacaggctgagtttttgctgagtgtgcaccctctgtggcatgtgtgcaggacacagagacatgtcctgccactctctaccaggtagctgaggtcccaatgccaggaactgcagagatagcttgctagcatattaaata

SEQ ID NO: 423671 - DNA, 545 bp, Homo Sapiens
  misc_feature (23)..(23): n is a, c, g, or t
ttaatcaataattgtactgctgntatgtagtctataactgaaatggatactgtgaaagaaaggaataatgtactgtgcgagaataaggcaaggaccctgatgggctgggaagacattattgaggaaatgctatttgaactgttggtcaactagttgaaagaggttgaaggggccacagcggaaggtgttagagagagagagattattcccgacagagtagacattactgtgtaaagtccccatgacagaagggattatggaatgtgtaaggaactaaaagaaaggcagtgtggcctaagcactgaaagcagtggtataaaacataactggagaggtatccagaggccagaccaagcagagccttataagccatgttacagattttagtttttatcccaagaatgataggatactgcttaagggttttaagctggaagggaaatctgattgcagggtgaacttactagataaggacaaagtagatgcacggagatccgttaggagattgttgtagtgggttacgcgataattgatgatagctcaga

SEQ ID NO: 423672 - DNA, 180 bp, Homo Sapiens
cagtataaccatggatggtgagtatgcaccagggccaacatacctgtgaaattatctgggcattcttaaatgtgctatacaacctctaggatatgcccatgtgttacacaacactctgcacaggcacctcataaaaccaccctcatccctccagtgtgcacgtgttgcttgagctcccgg

SEQ ID NO: 423673 - DNA, 245 bp, Homo Sapiens
attcactgcctccgggcagcactgtgtggtattaggcatatcagtatccattgggtactggatacgtgcttagtagcactgcggtgagtaataatcaggtcctgtgttctctgagggttgacacatcaggtctattgatcttgaccttgaactctcctagccatgcctgcctgaagcccaaccgtggagcccaggctgaggctgaaacctgaagaactgtcttaaagtgagtctctccttagggc

SEQ ID NO: 423674 - DNA, 430 bp, Homo Sapiens
ggggctgggatgagcagctcgagctgtattctgtaggtagaaccatggagggcttaagaactaaagagaccttgtgatttttgcttaaaacgacaaggctgcattgcaggtaaggtctagagtgggagcagtgaagaggctggtgtagatgccccggtgagagatgaagctacagtctgggaattaagggtcagttcttggcaggggtcagagcgaagcagagttttagtggggaacagcctggaagcatcacctgcaagactttccagaggtggaccagggaacattcttggacaagtcaaaccaagaatggtgttgggacaagaggcaggagggatatttttgccccctgtggcttccgttgaagttctaagctctacctctcccagatgagcctttccccagggaaaggaagacaaactgtgtctcc

SEQ ID NO: 423675 - DNA, 287 bp, Homo Sapiens
cgactatgccgacaggataggcttaggtgcagagctggctcagctgtgcgattgaacccctccctctgagcctccatgtcctggtctgggaagtgttgtgaggtatgtaaaatgtgaggtgtggatgtggcccaggctagccggggaagaagtggggatgggacgtcctgacctagacgtggaggcggaactcagtcgccagagggatgtttcctgtatgccgtgaacaccatggggatggagtcgtccctaaggtggatatccccccttgtcgggctagtacgggg

SEQ ID NO: 423676 - DNA, 214 bp, Homo Sapiens
  misc_feature (132)..(132): n is a, c, g, or t
  misc_feature (136)..(136): n is a, c, g, or t
  misc_feature (166)..(166): n is a, c, g, or t
  misc_feature (172)..(172): n is a, c, g, or t
gctgcatagttgcgacctctggttaaggaattgtcattgggcgctcgcctggcagatgtgtaggtcctgagtggcgactagatcgagcgtgtctcagtgaggaaactgctggcgtctcccaggaccaggatnagtnaactgattgtgtctcaacatagggaagtgngttctnttggcatattcacccccgaatattgctgtcgggctagtcggg

SEQ ID NO: 423677 - DNA, 288 bp, Homo Sapiens
ggatcttattcgatagccgacagtggcgggggttatgttgacttgggaagggcaggatcgcgatcaatggtgagttgggggttggaggaatgggaaggcctagttcagggagagtaattggaaaaccactcgctcgggtttggacattctttaaaaagccgaggatgacttggggagggggggtggtcttttgtggaggggaggttacatcggttcgcatcgcaggcggatttcaggtcggaaagtcttggtcaaggagcccgatgctgcctgtcgggctagtcgggg

SEQ ID NO: 423678 - DNA, 362 bp, Homo Sapiens
  misc_feature (85)..(85): n is a, c, g, or t
gcttaggacggaagcaagtgtgattaccagtctgtatcacagacacaaagacgccagtctagggaaactggactttgtcctctanggtcagggtaagcgctagagggactcagataaaggaatacctcaggaaggccagcctgttagtcacacagaagcaggcagagcagcaggcagagctgtgagacagagcagaacaggagacaggctctcctgaccaccgcttcagtgcgggcggagttgagcacattacagcaacagtgagccattgtgtgcaagccctggtgagggtgaggaaggtggtggaccaggagagaccagtgtactggcctctcgtgtcggggctagtggggggggacccc

SEQ ID NO: 423679 - DNA, 140 bp, Homo Sapiens
gctgtgattacaggatctttaccgactagcccgacaggcctctttttcctctctggttgtctgtctgcttctctggctgtttgcccaccactctctctctagccatctgtctccccgcctgcctgtcgggctagtcgggg

SEQ ID NO: 423680 - DNA, 277 bp, Homo Sapiens
gtacagctgtttctctgggaggaaatttgagggctggcaacttgactttgctgaggcagacacagctgatctgaatgatagcaccaggaccctggaggaggtcctggaggcttgtcactgctccccacactttcccacgggattcctgtccctccttcctgcagagggcagctgcaatgggatatttttggcagtctccctttgaaagcatcccctaaacgcgaatgtcaacagcagtgcttgcagggagcagctgtagctgtcgggctagtcgggg

SEQ ID NO: 423681 - DNA, 160 bp, Homo Sapiens
ccctccgactagccgacagcaagcccttttggctctgcgctggggtagcctgctgtgtactgctgctggagggagctcacggcgcgttgccagcttaccaccagcctctactttgcctgttgtcattggcccgcctccaacatcctgtcggctagtcggg

SEQ ID NO: 423682 - DNA, 157 bp, Homo Sapiens
ccttcctcggaatgtgcgtatgctcggttcagaacatatcctctctactggcgctgcaggtgtggcaagtcatcctagctgaacgggagctcagctgcatgcttcgtgtcgcactgccacgtgtcagtgttggactgacctgtcgggctagtcgggg

SEQ ID NO: 423683 - DNA, 267 bp, Homo Sapiens
ccccgactagcccgacagccagaattccaggctctgattcaactctctcctggagtggaaaccgaatggcagggaagccactaacttcatcctgaacaacgggtaccttccgactaggcatttctcactgatgctgcctggctcagtcaagcccccactcagaacctgtgggcgacactgagtcactttggctgttgatgactgtgatgatatgactactgcccgcatcccagccaggaaagagaagccctgtcgggctagtcgggg

SEQ ID NO: 423684 - DNA, 138 bp, Homo Sapiens
  misc_feature (24)..(24): n is a, c, g, or t
ttgatacggggcagagctcacagntaatgctctgtgcagtggggctggagctcacacatgtaatgctctggcagggtggctggagctcacacatgtaattgcttgtctgggcttgcgtgggcttgtcggggcttagtc

SEQ ID NO: 423685 - DNA, 374 bp, Homo Sapiens
tagcccgacaggctcaccaaggtaacagtctgtggtaagagctggagggaaaggagaccccggctttgtgagggaatcagcagaggcctgtcaggtgggagcagtagttctcagtgccatcagactcagcaccccttagtcatcatagacattttacattgtcaccattcctctccttaaatgcaattggtgggctgtgtaacctacctacacatagcattccaaagatactcagatgctttcactgcatggaggagacataaaagggagagaatacaagtgtatgtatcaatgttataaacgtctgggcacgcctgcccgctcaccccagaagacatgaagttgccaggtgtttgctgtcgggctagtcgggg

SEQ ID NO: 423686 - DNA, 321 bp, Homo Sapiens
ttcaggatcttccgactagcccgacaggtgaaggggtgagtaggcaaggagacaggtgaaggggtgaacaggcaaggagacaggtgaagggatggactggtgaagagatggccagatgagaagatgaacaagtgaggaggtggacagataaggagacaggtgaagggatggccaagtgagatgaacaggtgaggggtggacaggtgaagagacagtgaggggatgaacaggtgaggggtggacaggtgaagagacagtgaggggatggacaggtgaggggtggacagatgaggggacaaacagctgtcgggctagtcgggg

SEQ ID NO: 423687 - DNA, 425 bp, Homo Sapiens
ttaccgactagcccgacagttcccagcagtttttcttagtagaaggaggctttgggttggctagattacaagagcccttcaggcttagactgctgcagtcccttcggacctggctgtgatcacttgcatccacctatagatggaagtgtgcaaagacccttctagtttaggctgctattctcagctggctccctgagttttcctgtgaggtgcctgttgacagtgtcagggttcttctgctcccatccatcagacaccctgttgctatcctctgcttcctctgcacagatcctcatccacctggtcctgcagcttttgcccatttatcatccctttccagtcacttagttttctcctggctattatctcaagatttgagggattgggcaatttctgcacctcctctgctgtcgggctagtcgggg

SEQ ID NO: 423688 - DNA, 305 bp, Homo Sapiens
gctaccactagccgacagcagcctccttcagtatggatgtcagggcaaggagtatgggggagggtctcgcaaggggggttcccacgtcctggcctccacgtcgctccccatggagatccttccaaagcacagatctgactatggcatctctgctccaacacccctcattagttcaccgctggcttcagaataaagtccgcattccttgcttggcattcaaggtctgcttcccaagcaagacgtccagccctttcaggacagggcctgtgttttccccagtccctgtcctgtcgggctagtcgggg

SEQ ID NO: 423689 - DNA, 286 bp, Homo Sapiens
tctatcttaagcgttcgggctggaggttcagagcacgtgcgggaggaaggagggagcaaggcctgtactcagcctgggaggtaccccagctgggagcctggacttgaccctggggccagtaatgtgacttagagatctggtcacctgaaggcagggagctgggctgtcttccagttttggctgaaagggacatgattcagtcaccgtggttttccaagggcacacgccctggtgtggagcccaggggactccccgacattgtcagccaagcgagtgtggcaccttt

SEQ ID NO: 423690 - DNA, 143 bp, Homo Sapiens
taggtgacttgaggatcttcccgactagccgacagtacagaaggaagtcatggttcagctcagcctggagctgttcaaggaagggtaagccagaggtctagaaccaagactgcacagagcaggcgctgggagcctgccctcgg

SEQ ID NO: 423691 - DNA, 343 bp, Homo Sapiens
  misc_feature (311)..(311): n is a, c, g, or t
cccgactagcccgacagggctggatatgaattttggagacactcttcagcctaagtgatggagccccgagcacaggcccacgctggcagcacctggttccacacaggaaagccaagtccctgtcctggaggactcaggactccattcggggtttcaggctggccactcacaaccacacccaccgtgggtcagggggttcagacaagtgacctggctcttgcaagacgggatggagaaggagcctcgctccagtggagaggtgccttccaggaagggctgaaacggggttgagcgtccgttccaaaagtctnctagttgaccttggcagggaacccctggcttt

SEQ ID NO: 423692 - DNA, 128 bp, Homo Sapiens
tgaactacagggggtcccatctatatacacaggattcctgccacactggatgcagagcatcgacggcttcatcgcagtgtctagtctgcttcagctgtggtaccttcggctagtggggggtcgagctc

SEQ ID NO: 423693 - DNA, 161 bp, Homo Sapiens
accccttccgactagcaaacacagaaatgtgattctttctggatcagaggaagatggagtgacctctggtggcctaagaaaagccaccaccatgcccataccatgtggagagctaggaagggaggtctctactgtcttgtccgtgtcgggctatgtcgggg

SEQ ID NO: 423694 - DNA, 523 bp, Homo Sapiens
tgactctagaggatttaccccgactagccgacaggaatctgatgtccacagaggccctgaggtactgaccagcgtcaccccatttctgcatggagcaatttgcataaacatctggcaaatggagtgggagagagatgacacccaacaagtatataatctgtgccaagtcctttgtcatgtacttagcctgtgacactctatttaccctccatatcaacgccagaaagtagactttgctcccattctataggcaaggccacagaggctgagcgatgtgcctgatgtcaccggcttgtcaagaggcatgcagaaatgtgaactctgaactctgaagctcaagctcatttaaaggtgccctggggagtgcttgcactaccaaaaccaaggactcccaaagccccatctgggccagcaatgctccgtcttatcctcactgtcctgcttcccatcctcagcctctcggagctgctcccaaacaaacgactgaagaggagaatgggagggttcccatgttctcctgccc

SEQ ID NO: 423695 - DNA, 518 bp, Homo Sapiens
cgttaaaaccacaggcggcagagaacaagtggaggcggagagaagggaagaaaaccaaagctctggtaagaacgaagcccttgatatctgcaaaagtcgggagcatacggtttccatttattacttggacaaagagacactcccaccatcctgaattgagacattctcccactcagttccatgtggcaggaaccaaagcagcttcaatcttgaaggatgtctctgatcactctcagggcccactcataatccatattcatagtccagggtcacccaaggggatcagggcagagaaagcactgcaatgaaggaggagattcaagcccaactctgcctctgctcccctgtgtggattccttatcctaaagaggctccagcatttgaattccaccattagttctggccctccctggccaacatcccagggtctggtccaagacagaggcagagcgtccatatctcaacctagtttaagtgagaaggctatggaggcctctcaacatcaccctttctgtcgg

SEQ ID NO: 423696 - DNA, 167 bp, Homo Sapiens
tccgttacgagccaggtgagaatggagtgctcacagtgcgctgggaagggaggacgtgacggcagtgtggatagggactctcttcggtcagagcaggtgtcgaaacaacacctttccttattcgcccggatcaaagtctgtcgggctagtcgggggggacgagctcg

SEQ ID NO: 423697 - DNA, 206 bp, Homo Sapiens
gtcagcaatggaagcacgaagttaaagaagcttcctcctgttctacggctgttcgtagggagagaagattctcaagggacagtgtgaatgacggaaatgttaaattgaggaggaggcggagcttgggtgtggaggcatttattgttgggtctgtccagtaatcccttcttctgggaccttcctctcccctgtagggctagtcgggg

SEQ ID NO: 423698 - DNA, 222 bp, Homo Sapiens
  misc_feature (79)..(79): n is a, c, g, or t
aggatagtctgagcagcggtgtccgacactgcactgactcagggcacaggtgaaaacttccttgccaacgagtcccacnacatcaggtgcctgatctgccactctctgcattgacagcttgcacctgctcccgctacagcacagtacaccatacctcttcttctgtatcctggttcctctcacccacagagtgagaggtggtggacccattggctgtcctcg

SEQ ID NO: 423699 - DNA, 284 bp, Homo Sapiens
cttacctaaatgaacacttaaatttttggttgatacgatgaaaggattttgacacagtcgaaacaaaacagacgtgtcgtgagttttattctacctcccctgacattgcacagtttcctcttctgcactcgggagataataacgtgcacctgccttgcccataaattcatttatttaaaatacccaaagtcaagcctgaaattgtaggcactcaggaaaggccggtcatgatattactcctgagtttaaaaacattgataaaactgtcgggctagtcgggagga

SEQ ID NO: 423700 - DNA, 280 bp, Homo Sapiens
gtgttatggaatccaggaaacactgtcgacagagaccaagaaaagctaaattccccaatgtaaatggggaaggctgtggtatggatttggggagtttctatgtttaaacaaattacccaccccccaatctgtagatgcagtaaatcttaagcaaaatcccaacagggtttttaaaatgaacttgacaagcactgtcattttatatggaaggcagaggggcaggaacacattcaagtttcttgtacatggaacactggattgccatgcacccagtggctca

SEQ ID NO: 423701 - DNA, 219 bp, Homo Sapiens
cgcacagcctgtacccactcacgtggcttctcagcgggctgcatggaatgtactaggtagctcaccacacttctaggctaccatattgtacttcactacattttcagggtaggggaagtggtgctggacaaccacaggagagagcgtagagtacccagtatatataacctaggctgccctatggctaaaggtcacagcccctgtacgggctaaaagagg

SEQ ID NO: 423702 - DNA, 150 bp, Homo Sapiens
cttatctctgacatcatctactaccactttctccccgactcactctgctccacccaaagtggacttcttgatgttgcccaagccaggaatgctcccagctcggcatctctgcgctggatgctccctttgcctagactgtctgtgttcccc

SEQ ID NO: 423703 - DNA, 260 bp, Homo Sapiens
ctagcccgacagacacaaggggatatgacatgcagatacacatgagcagaggccaaaggcaggaatagcacagcacactcaggggctatagagagctccaaatgctggaatatgcagcataggagaagtaaggaaatgcagtgatggaagggtcagcaggggcccaacccagagagaccctggatgcccactaaggggacagcactgctgggcagacaagatgcacaaggaatgcagttatgaaactctaggacagggca

SEQ ID NO: 423704 - DNA, 578 bp, Homo Sapiens
gagtaaactacattaacatgcagatgcccgagatcgagcctggagctaaggagtcagttccctctgctgtggggcccaggtatgggtaggagtctgctcatgactcaaatcatagcctggctgacccagtggactagtttctaaaaacatccactccttcctgtttcaacaatcatacaccagagcctgctaccacgtttgaatttatttcaatgatatgcaggtcagaattttatctgtttatatttcaatgccaaaatattttaaaaatgactttttaatgatgtgtaaaattgttccaactttataaataacctccatttgtttgctttcagattttgtacatttgttttttatcttaataaaccaaatctattcacagaactaggaagatgcttattaataccagattgcatggtccatatatcaagtttagcaaataagcattatccacttatttgctaaaagcaatctttttccctccaggtaatctaggatgattctcaaagatgacatatcatgttgcaagcatactcgcccagcaacgcaaagactttggtttcccggaaagctgccgg

SEQ ID NO: 423705 - DNA, 196 bp, Homo Sapiens
gtaagttatacccaagtataatcatatcagcataagcactataagtttagtcaccaccataagcactatagaatttccatatccttagatcataataagttattaaatccttaggtccaagtttcagccctagacctcaggccacagacccctcagaaccacctcagctccaccaagctagtagcacctcttccac

SEQ ID NO: 423706 - DNA, 151 bp, Homo Sapiens
gattctggcggtattgactcttccgattccgagtcttgttttcttgtgggcattctggacaacttggaccccggccatgttcttcaaattgcctttcccagaggcttgcaagcttgaggaacttccagaggtctaaccagaaggaaccagt

SEQ ID NO: 423707 - DNA, 632 bp, Homo Sapiens
ctgactacggcggaagccataaaggctgagctgttgaagtttccagagagactgaggaagtaacctgggtcttcttgtgtggaggtcacacttcgcccaagatagcagaaggcgtttaaactgagatggatatatttaccctttgtttgatgccaggagtatgtgatcatgaattgttatgtggctgtgtgtactacataccggtgtgttcacaagggtagggttataactgagctggtgtggcataagtgaacgagtggcctttggggtttagtgtagaagcatctgaatgggtttggtgaacggggatgtgcacgtatgcatctttaaaccatttaacccaatcaagccctctcatttaaagtttaagaacaggtttaccggaacaagaattccacttaggttgagacgtatctagcagaacaggcctaacagccccaacaccaagaaaacactgcgaattcctcaaactcgccccaactccctgatcccttcatcatcccattgaatcccatgctgaccactcccaaccatcagcccccatcaactctccctgtgctgctgctcagccttcaatggcctcccccaaaacccttctgactaactgcagcataagtgacgacgtacctgca

SEQ ID NO: 423708 - DNA, 118 bp, Homo Sapiens
taagtaaataagtaaattcacccttctaaagtatacgtatcaatggtaataagtatactcacagcatgatacagccgacaccgaaatcaatataataacactacataatcacccgaag

SEQ ID NO: 423709 - DNA, 132 bp, Homo Sapiens
ccgacataaaaacctcattcaacacgaagtgtcgaacgaaaggtgactgtccccttcgtggagttggcattggtatttgttaatcctgtttccatatgcagacagatactgatacatatgatccattgacaa

SEQ ID NO: 423710 - DNA, 452 bp, Homo Sapiens
  misc_feature (155)..(155): n is a, c, g, or t
cgatcccgtgtcatcccccttcgtgacaggctggcataagcacagtggaggggcccctgaaccagctcgtggggtgtcaggaaggctcctggagcaggtgacattttgactcgggtcttctaagaccaaaaggtgttggtcaagtggagaagcangggcaggattcttctggtggaaggtgaggcaaagtggtgcagcccacatgcagctgacagagaaggaagggttccactcagggaactgatggcagctttgtcttgggtggatcctctgaggaagtctcttctggctcgaggtgacagacaccctgaatagctcttagggaaagtctggaaactaatacaatgtaaatgaagactttccagtaggctcagaatttcagctgaggccccaaaggcagaaacaaggccagagttgctgatcctaaagtgaagctggaccacccacctagg

SEQ ID NO: 423711 - DNA, 214 bp, Homo Sapiens
actgtacaatctggggcagtggggcatccccggctggacagcccttcagacccagctcagaccacagctcccatgggcttccccttcctcaccagctccgtctccaccctagtctctgtggggcagtctttcctcatagcagcggcttctccatccctctctgcttggatcattccagaaggctctggatatctctttcccatgcctttccctt

SEQ ID NO: 423712 - DNA, 347 bp, Homo Sapiens
tacaggatccttagtcatcccccttcgtctcttccacgtgtagaaactccctcatggtcaaacgcaaaccagtgaaaagtcagagatcaaccattttactttgggcctggtggtttatgcggaagagctaacctccttcctttttcccatccacctgagaactacaacctcccttctggagccctgaagccgcgtgataatgtagcctttctctacctcagtggctgtaatgcacacctcggaaatcactgggatttacccaggcagactgaagttgtctttggttgccgtttatttatatggactgtgatctcttaattggagatggtgcctctcccagggttcgc

SEQ ID NO: 423713 - DNA, 214 bp, Homo Sapiens
cacagagcagtcagtctgacaccagattctcatagacacagctgtctctgacgctgtcactgagatagctagtccaggtccactcaggcacagtcacagtagtaggtggtagccatactcttcttacttattattctagcttagcctaactctgaggttcaagattttagtcagtaatttgtgttgaagatatcattagacatctgatgaaaca

SEQ ID NO: 423714 - DNA, 206 bp, Homo Sapiens
tatcccaggataatgtatcatcccccttcgtccgcactgtatcggatagacacacgaagggggatagacacacgaagggaggatagacacacgaagggggatagacacacgaagggggataagacacacgaagggggatagacacacgaaagggggataggacaccacgaagggggatagaccacacgaaagggggactcgacaca

SEQ ID NO: 423715 - DNA, 123 bp, Homo Sapiens
gcatatttagtgttgtctctcttaaggaaaagcgtatttttaatctaatcattttataatgcacactgaatgactaggaaacctaaacaaattagatgatgtaattctatattaagggaccgg

SEQ ID NO: 423716 - DNA, 138 bp, Homo Sapiens
ccacctcatccttggagtagctgggactacaggtgggtgccaccatgtctggctagtttttgtattttttgtagagacagtgtttcgcgttgttgaccaggctgctctcaaaactcctggcctcaagtgaaccacccg

SEQ ID NO: 423717 - DNA, 356 bp, Homo Sapiens
  misc_feature (91)..(91): n is a, c, g, or t
gacaaggaccgtgtcatccccttcgtcaggtcagatcagtttatccccagctcaggcaccgtcctcgtttctccttcttctgcaaccccangctgtgtcctgacacccccaaccaacttaaaattaacgcactcccacccgcttccagatctctaaccaacgttacagcataccccgccaagaatttggcccagcccaggactctcaaatatgatctggggagaactcacagcccctgcaaaattccctagaagccgttttgagtgtgtaatggggggggtgttcctgagagaagtggggaacacagttttggcccttggaatacccggcggctgctgatggggggggatggacac

SEQ ID NO: 423718 - DNA, 393 bp, Homo Sapiens
ccatcccccttcgcggcagaggccccaagggtggggaggaagaagctgcctcctggagaattaaccaaagaccccacacagagacgtgaggccatcctggccccttgtctgttgtccagagcagctatggcattgtggggcttggggaagacagcagagaagtagcagcaggttgggtaccagccagggggtggacctatgagttccagcttgctgtgatcaatgctctagaggtctgtgactttaagagtcttggaaaagaatgagacatgaaggattaggaacaaagtgtccttaaagagaacatgatgggccagcagggttaccatggccaaggatggaggggcaggttttgaacaggggagggaggttctggggattctggatgagaac

SEQ ID NO: 423719 - DNA, 409 bp, Homo Sapiens
gtgcagcgagaacagaagaaggctagcatggctaaaccagagtgtgggaggagaggaaatgtaaaaggagaggagggcggagggagccaggggcctttcaggcttttggaacactttgctttcctctcagtgaaatgagaagccagtggtgggctttgagaagaggagggattggatctgacatatatttatgttgtgttgaaaatagactctagggaggaaaggcaggtgccggagacaaataaggaagctactgcaatcatctaggcatgagtttgtggtggctgggaccagggagagagcagtgcaaaggggggcaaagtggcgagattcaagatctagttcaaaggtagagccagcagaactgacgtggtggttgttgtggtgaggagaaaaagggagaagtcta

SEQ ID NO: 423720 - DNA, 525 bp, Homo Sapiens
  misc_feature (396)..(396): n is a, c, g, or t
gaccatcccccttcgtgtttgtaatgttacattacttaagagtcttcttaaagaaagactcctgccagagtatatcagcttcgggcttcccaaaatcaggatccacctgatcttgggcagagacagaatggcctcccctcgccactcagacttgctcagcaccctcctgtttcttacttgccagagagggtgaggtatccttcctcacccagctttcgagcacccagccttgaagcaccccgcatctcctataatctccataacctctccaactgcagttattttatggggaaaagccctcatccctccccatcctctgacctggccgtttcctgtttgtccttgaagacttagctccaacatcttcaggaagttcttcctgatcagctgcagggngagtcatgggctttttctctgtgttccttggctttctgtaattcctgtacattagcacttttcagagtaaattataatcaatgagtcattcccagggctctagagctgcgtcttttctattttagaccc

SEQ ID NO: 423721 - DNA, 204 bp, Homo Sapiens
ggatgggcttgtagtaaggttgttccagacagtggggaggtctgatcaggctggataaataatacttgtgtcaaatacacttggtgaaaatacctacctgggaggtttacacacacatttaaacagcagatgaaaaaaagtcaaatgagtcattctatccacctagctccatgcctagaacatttatttatctcactttttcta

SEQ ID NO: 423722 - DNA, 553 bp, Homo Sapiens
atctaggcactgcttcggatgcaactgggctgttattcataaaagcaataaaatgttgcttattgactgaacagatgaactagctgaggggagatactttggagtgttcttattggaaatgctttgaagaaatgtaatgatagtggagagacagagtcttattagctgtggtaaatatattttcctacagaaggattaggagattttgaaataactggaaaataaccctcaaatgtttagttatagtgacatttggatcaagcatgtgcaacttttaaccttggaaatttatatattccttgatatgcacaatttgaaatccagagataaatttctgatgtcatgggaaaaatctagcactgggagttaggaccactgggcttgagcctcagttcagtcactaactctacctcttcaccctgtaaaggtcaggaaataatcaatgctctgcattaggtacatgctggagagatcgaatgcgccctcacagtctcgtctctcgaggggcatggaggctggtgcagtgtggtgaaatgccccaaagagctccaac

SEQ ID NO: 423723 - DNA, 344 bp, Homo Sapiens
agagggttaatgcaggacaagaatgggttttaaaaagatgagagacactacacatttttaagctgaaacccatgctctggtagagagggaaacgcactgatgcagaaggcagagaagagaaatgctggagccagccagtgcagcagatgagaggagatgagagctggtatacaaatggacagaggggctgaaagagggcagggatagtgtaccctccatcaaaggagagggtgcagagtctgagacagtcatgggggtctggtagacagactggagggagtatggtccagacattctgattgcttctatttctaactgctatttagggtttctaccatcccttt

SEQ ID NO: 423724 - DNA, 300 bp, Homo Sapiens
gtagcactgctcggatggagacgggaggtatagtcttcactatagacaaatgtcagtttagaagatctatgctgtttggtttgggaaatgaaaggtttgggctacatttactgtttgaatttggagggacagagagattactagggactagagtggtttgagcaggatttatggaacaagtgtgacttcacattgttacaaattataggtgaagaatgaaggaacattccaggatcaagtttcctaaaatttggaaataaactgtggaaattctcctaaggtttgtatctttcttgtctg

SEQ ID NO: 423725 - DNA, 147 bp, Homo Sapiens
tgctgggccaaggtcatgcattcatgacatcagtgaggactgcgggcacaggctggctggccgtgcagtgaccccagttttaatcctgatccagccaagcatcatccctgggctttgggcagaactccaggctccacctgtttgtgg

SEQ ID NO: 423726 - DNA, 207 bp, Homo Sapiens
ggagaagggatgcagaggcagcggcaccaggcatggcagggagagtccaccctacgtggaaggcacacagcgactggggccaggcagccaaggaggaaggtgggctgggcagggtacacaagaggaagccatagtgcgtacaggcctctacaccaagatcactcaacacatggcaaaacaacccaagcaaccaccaacagatagatg

SEQ ID NO: 423727 - DNA, 102 bp, Homo Sapiens
  misc_feature (68)..(68): n is a, c, g, or t
agtgacttagaggatctttaaaggcgagtcgggtagcaggatgggccggctttagggagctgggtggnctggatgaaaaagacagaaaaacgtggtttgcaa

SEQ ID NO: 423728 - DNA, 129 bp, Homo Sapiens
gcatgacctgtcccgaaccccatttatgcctcatctagcagtgcagccccaccctcaagggtctgtgtgtataaggcgcacgccctgcactgtccagctggtctcaaccctgaacatctggctggcctg

SEQ ID NO: 423729 - DNA, 234 bp, Homo Sapiens
gtacagaaggctccaagctcagacattctcataacttatcaccccggattggagcgggaggtacagctgctcctggaaacaggctggatccagaggacactccaggtcgtctctagtctccagcactgagagcaggcagtgtggagaatacgcaatgactaactcagataactcacctcccgggaccaaaacaggggcctggctagaaatttcggtcacaccagaaatgtaggc

SEQ ID NO: 423730 - DNA, 457 bp, Homo Sapiens
ctagcaggatctttaaaggcgagccgggtaagtgactaccccattggtggggaccacggaagacagaagccagcaggggatctgcacgggggaagggaatctcagataccctgtacctgagagggagaggaggtctcactctgggatgaagccaatgtgaggagaagccaccaggtcctctaacaggcaggaacaacgaaaggtcccaagaaacgcaggcactgagggtcagacaaactaggtctgtccagtccccggccatgcttctggggggttcctctctgatttggggagcaggcagggactctgggaggcagtgggtagaacagaaaggaaacccttgctaaggactgtcatggaaacaatgctcctgtcccacaatcaggccatgtcactccctatttaatcaagacaaagggattggcctgaagtatccagacggtcccaccaatgttcc

SEQ ID NO: 423731 - DNA, 385 bp, Homo Sapiens
ccgatcgcttaacggcgacgtctgggtataaaataactaccattagggttgggacagagtagcacagagtcaatcagacttccttcctccgtacgggaggcctgaccgtgtggggtactgtgcaggtgcccgaggtgagtaaaatcctgccccctaccttcggggagcacacagtctagtaaaagcgataagacccacatgcaactacctttagcttaactcaggatgggcagcctgtgacccgaatagtccaggcgtcgtgagatctggtcacactaaggcgagaaggaaaacacactccctctgcttcgcttgaggatcttcacacatgccgttccttctcttcaggacgctccttccatccctcgtcaggctgcctacttct

SEQ ID NO: 423732 - DNA, 391 bp, Homo Sapiens
cggggaccttaaccctgctgggggctgttggtcagtgaggcccccagaggtgggttaggggtgggcactacaagggccagttgaggggagaggtgcagggattgctgaggagactttgtgagaatgatgtcaggcccgggaagctggtgtggaagaactgagctgtcagaaggcgataccaatatcccctttgcagggtggtgatgggcatcaaacatgacgtggaacatgtccccttcatggagggtttccatctaaatgcatctgtgtgccttagggatcagtagttcaggggtggtggacttttttgagtgtctcctaatttctctgaggtgtctttggctctgtgtcaccaaatgtgcctgacctctgcatcccagtggttgctgaa

SEQ ID NO: 423733 - DNA, 401 bp, Homo Sapiens
  misc_feature (109)..(109): n is a, c, g, or t
actctgaggatcccccgggagccttaaccctgatgctcatggctttcgacctgagcatctggagaggtggagttgccattaagtgactgtgggaggagcaggttcaggnaggaaaatcatttcagtgtggacgtgaagtctgagatccaggtagcatccaagtggagatgtgaggaaagcagttggacgtaacactgtagagttggtgggaggaaataggagagagatgagatcgtcaagatgaggtccaaggtttgacctctggttttctctaggtgtgtagaagtttagaggatgagcagaagccggcaaagacagctgagaggcgtggcgagagaagcaggagagaggccaaagagaaggggtaactgactgacagaggaaagacccttaggcaattc

SEQ ID NO: 423734 - DNA, 584 bp, Homo Sapiens
cgggagccttaaccctaccagtggggagatttgcccaagtgtcctcagcagcagagttatagccagacccggtgtctgcaggatttaagtagctcagagacagtcacgaagtgctcatgctagtccttagctgtggctcagtggagggctggaaatgagctcagtggggcagttgctgggggtggtcagcaccatcctgagatggtgaggtgaacacagtccctggccacacctgtacagggagaagcacctgcatagggagaagctttccatggccaaccctccttaactgagagaggactcgtcatcaactaggcaccgtgctgaaatgtacatcaacttgggagacactggcaacaaccctatggggtacagcttctacatttaataaatgaaagcctgaggctcagaggcaggagctcacctgaggtcacagagattgatgaacagcagaacagttcaccaagacaaggactctgccattgcacatgcagggactttgtgagtgatgctgaacctcagagtggctcatgctccatcatctgtaaggaaagatggtgacagctcagattgcggaaggatgt

SEQ ID NO: 423735 - DNA, 307 bp, Homo Sapiens
ttaacctggcactgtaccttatcttatatgcccttaactcactcccactcaggccccagccctaatgtcgccttttcagaggggtctgactgcccaaaataaagtaacgtctccttgctcttcatcacatttctggaaaattctaggagtgggtgggaaagtcataaatgtcctgtctcagagtctgaccctctgaagtgcctcagataggcccccagctccttccagactccagcaaggtccccgggaagctgacatgtgtaaagtgccaggtccctctgtcatctgtagggtaaagggctcccgg

SEQ ID NO: 423736 - DNA, 155 bp, Homo Sapiens
gtacaggcacatggacccgggcattgagcctgtgggctctacgcagacagagacaggaggtcctggaagctatgaggcttctgggctgttatcttgaggctggatggaggagatagagaatggagaccagtctgtggctgctgaggacctgctga

SEQ ID NO: 423737 - DNA, 464 bp, Homo Sapiens
  misc_feature (195)..(195): n is a, c, g, or t
tggattgtgttgcatccttcaagataagaaatacaagcacgaaagcaggctataggagaagatagtgagttcatgacagatgtgtgaattgtaggcattttaatttttgaagtaggtaaggataaggacatgcttaagaatttatgtcatacaattttataatgttaagtcattaaattttcttcttcctgctgnatatctctaaatgggagggccttgtcagttcctcatcttctctccaaagccagatttttcttctgtgtacccagttttagttattggcatcaaccaatagtcaggaacttaggacagcaatcttgaagtcattttcaatgttctgtttccctcaccttatgtgtccggtcagttgccaagtgccatcaattctaagtctgcaatatctcttttacctctgctcatttctcttgtcgttgtgtctgctctatatcatgctctcatcattt

SEQ ID NO: 423738 - DNA, 122 bp, Homo Sapiens
ccttacccttatcctgaagtacttgatctggcttgctgactcccttacctacattgtccacatgcctgatggtgttcccttggtgacctgctgcggatatgggtacggccctgggcgagatt

SEQ ID NO: 423739 - DNA, 491 bp, Homo Sapiens
agtgcttgaggatcccttggggccttaaccctgaataaaataacagatgttaatctctaatcttatgcagcatctgttattttattcaggtgtacaagtgctttgtgtgtgctgcggtgagccctggccttcttgaaagctctgtgcttctgaggggctgagggggatttgggggtcccttttcatagtgtgggctgtctttcccaagatgcagtgatgacccgtcagaggcagggttggtattgtccgtggggtccagtccctctatcttccaggggcttttctggtcacaagagaccatggccagaagtgggtatcgttgcttgtgtctggggcctggggagggaaggaaaacaaataccaccccctgcagaagagatcgttaatggattctttgaataaccagccagatagcttgtatgtgtgcgaggttgggacattttccgtaaagagcagactaaatataggctcgagggttcatgggctcccgg

SEQ ID NO: 423740 - DNA, 492 bp, Homo Sapiens
agtgccttaccctgactggacttcttagaagctatgccagtgacccccgtgagagaatgacaggactctgaaacaggctccagcagtgggtgctggagaacatgaaatggaagcacccaatgacacatgcgacagtggaatcagtgcgctggtgggaggcgaggaaggagttcgagcagcgggaaggatggaagtgctttggaccaagatgggcgctgggtggaggaaggaataatgtgttccctttgtgacctgcttgctgtgaggggctaaggagacctccaggtggagatgctaaggaggcagtgggaaatgcttttaaaactcaggagagcagctggcgacgggtacagatgctggggtcttctggataggggtgtaagctgcctcagtggggctgaatgagagtccttaagcggagagagtggtgaatgtgcttggaagccaagaggctctcactcgtagggttaaggggccccgggggtaccggag

SEQ ID NO: 423741 - DNA, 292 bp, Homo Sapiens
acgatcccttatgatgcagatgagtattaggactatgagcaaaatgaatgggagcagtaacaaaagtccaaaagtcaggaaaaatgaaaatccacgaacttgtggatgctccagagaggaaaccaagcaagtgttgacgctaaaactggcagaaacatcaatacttcctggctcccccactgggtgcatcaatttaccaccggcaggctgctcttctgcttcaagtgacaaacagtaagtgctttcaatgacagtatgaaaaggaatgacccacggggttatgggctcccgg

SEQ ID NO: 423742 - DNA, 373 bp, Homo Sapiens
gatcccttggagccttatccctgtaagatggaagcttacatcactgtaatgttcaaggggcacagacattaggatgggcggtgtgatctgaacacaggataatgctgctagtgtcagcaagaggtcccaacacccgccctgcagctgccaaacaatcactgacagactagaaggctttccagacccctgcagtgtaacaccattgtatggcagccttgatcttcgtggggccttgtgggactccagaatgatgctaggggaaccagggctcagtgccctggtccactcctttcctgtgatctcaccatttccatagctgtaagtatgtatgcagtacacacaggtatgaatttcacatttatatttctagcct

SEQ ID NO: 423743 - DNA, 513 bp, Homo Sapiens
tcgggggccttaaccctcacagaatcacatctggatcctcaagactaaccaaccagagcctacagtgctcacacaagatcacatctggatcctgattgactaaccaaccagagcttacactgctcacagaatcacatctggatcctcaagactaaccaaccagagcctacgctgctccaagaatcacatctggatcctcaagactaaccaaccagagcctacactgctcacacaggatcacatctgatgtcctcaaggcctactgttagccaggctgcgacgtggacactgtagcaaccagactggaggattctacagggaacagagtcctcactccacgaatgatcagtgcagcatcataaagattcaaaatacgtctacagaagccccagaaagacatgtctcaagttagtccacaaggttttagaacacagggaagcgactgctatcttccatacattcacaacacttcaagtgtcaatcaccagggttacgggctcccggggggtaccg

SEQ ID NO: 423744 - DNA, 181 bp, Homo Sapiens
actgaaggactgtatctctcatctctcacctattgatgagatccatccagaccaggctgaaccctcttgtgatcagtgcatgtaagcattccctcctggtcctctacctctaaagcctggaagagatctacacatacaaatagtggtccagatacccattttctctgtatggccttgatta

SEQ ID NO: 423745 - DNA, 408 bp, Homo Sapiens
  misc_feature (150)..(291): n is a, c, g, or t
ttaccctagaggcatacgcagttaattagggctttgaaatctgggctaaaatcccagctagttctattgttagctgaatgcatggccttaggtaaattactattctttctttgggtcacattttttgacaactgaaaaagtgttaccaannnnnnnnnnnnnnnnnnnnnnnnnnnnnnnnnnnnnnnnnnnnnnnnnnnnnnnnnnnnnnnnnnnnnnnnnnnnnnnnnnnnnnnnnnnnnnnnnnnnnnnnnnnnnnnnnnnnnnnnnnnnnnnnnnnnnnnnnnnnnntttccagctgacttgaacttcggggtatatataagctagagaggttgatagtaaccgcgtgcacatggcaaacagacaattgagagaagaggtgaaaaagtcatcatgaatggatga

SEQ ID NO: 423746 - DNA, 387 bp, Homo Sapiens
  misc_feature (90)..(160): n is a, c, g, or t
cttacggatcctttggagccttaaccctagtggcttgttctttggcctatgctcttgaacatcataccagaccacctgaaagactcacannnnnnnnnnnnnnnnnnnnnnnnnnnnnnnnnnnnnnnnnnnnnnnnnnnnnnnnnnnnnnnnnnnnnnnacagccaaccgccattcacatcattctgaattctggcgctgaccctcactggttgtgtggtctgcacaggctccatggtacctgcctgccagtggccaccaatgatggatgccagcagttttcctctcctgctcagtgcatggttgtgctcagccaagcagtgttcttgccattagctctgctcctctgcccagcccggatggttgcctcttacccaggatgaaaac

SEQ ID NO: 423747 - DNA, 486 bp, Homo Sapiens
  misc_feature (296)..(336): n is a, c, g, or t
ctagcaggaccctcgggagccttaccctcacttgccaagttcccagagctgacaggtggctgagcaggatttggatgttagtctatcttgcatcaaagtccacactccttcccgtagtaatctgggcagcttctccactctccacccacattccctccccacgtatgtaggcatcttggccttaaaaaatattcaaggctgaagctgccttacatagagtattataattaagagactgggctctggtgtcagacatttccaggcttaaatcccagctctaccacctgccaactgannnnnnnnnnnnnnnnnnnnnnnnnnnnnnnnnnnnnnnnnattttgatttcggggcctcctatggggatttggtgagggaatatgcacttagtacatgagtccccacatggtagccagagtctgatgtcattgctggacagtgtcctccaaaccaagaaagctaatgaacactgggtcatgcctattgcc

SEQ ID NO: 423748 - DNA, 292 bp, Homo Sapiens
taccttaacctcatgtttgagatccagaacagaaaatgggttgtggaggtgttgcgggggaggtatcgaggataggagagtatatgggtttggcaccatgggggtggataggcaaaacaattttggtttgataagtgtgcaggatcctggaacttaacctgttaagacttgtctctgttttttgggacagtgtaaaaatggggggaattgtaaagtgagatgtttatatgtgctttaaaatgtgccatgcttgtaacatggcaatgttgataacatgtgctttatttccctt

SEQ ID NO: 423749 - DNA, 156 bp, Homo Sapiens
agccttaccctgcctcaaaagagcttcttggctattcattcctaggcccaccaccaaaatcagatttgattatatttctcttatggtgtccaccaattccaatctattttacactgtttacatccagccctacctcatcttaaaaccctcaatgcc

SEQ ID NO: 423750 - DNA, 124 bp, Homo Sapiens
aacatccgggagcctaaccctccgggagccttaaccctccgggagccttaaccctccgggacccttaaccctccgggagccttaaccctccgggagccttaaccctccgggagcacttaaacct

SEQ ID NO: 423751 - DNA, 183 bp, Homo Sapiens
  misc_feature (117)..(117): n is a, c, g, or t
tactcagtatgacagaaatctgtcaaatttctattcctcaaaagagactgaaccctacttaagtgataaatacccttatatgcaatataattttacttgtgtaaaacattatcatanattattttaggatgttttaaactcatgggtgttttcaaagatgaggataatttctattgtgtttta

SEQ ID NO: 423752 - DNA, 267 bp, Homo Sapiens
ggtgactctgcggatccttcgggagccttaccctccagcacacgttatgctgttacaactatattactctccatgcacagtgtgttttacagtaagtacatgcccaaaccgtggccagatgttaccaacatcagaaataagagaaccataataaagtaattagaatggcatcagtccagtcaacatttacaaatgaatattagcctcccagggagacagtagactccatggtttatattcctaattaagcctctaaggccatctttc

SEQ ID NO: 423753 - DNA, 416 bp, Homo Sapiens
  misc_feature (231)..(231): n is a, c, g, or t
tgggagccttacccttcttttcctattataattcattcagatatatgctgctggataaacctaagcacaaatctgctcatctcttcatgctcaaaatgatctccatttccttccaaatgaagcactaagtcctcaaactagtatttaaaaatcattcctactacacctgaaggatgcttttataatcatatcacacctactcattaagtttcacccaagcatgacaatttngtgaattccctattccaggccttcgcattcctgctagtttcatgccctccacctgaaacactccattctagttcacccctttgaaaaccttaatcatcctttaagacctagcccaaaggagccttcattcataaatgtgtcctttccctccttgcaagaggccatttgatgaccctcttacaagg

SEQ ID NO: 423754 - DNA, 180 bp, Homo Sapiens
tggtaggactgcacctgttgcacatccatgcctgggtgacaaacgactctgactcacaaaaaagagaaagtctctttgattggggaggccctgtgagactggcagcaatgactaatgggctattcctactcagacagcagataagattcccccttaatcttcaaatcattgaagtcatga

SEQ ID NO: 423755 - DNA, 334 bp, Homo Sapiens
tgggcgatactttctttgaaccaaagacctgaccagattggccacaaccacactcacgcgcatatccaaggcttcagtgccagcatcctcgcaaacagcttctgaatgccatatcacccaatgtggtcctagggcagcgccctcttgacctaatcgcctcccaggctccttgcagcctgatagcaaaaggaacagtgctcctgccatcatggcgtccatgcctttgggttgcttgctggtggattctcatcaggtgagcctgaatggggccatatccagaaccttgctgacctcttaattgagcgtaagggtggggaggccagggtgactaaac

SEQ ID NO: 423756 - DNA, 458 bp, Homo Sapiens
tagcaggaccctgggggcccttaccctaaatggaagcagcacatattctactaaaagcacaaccccattgctggggggctctaagaagtgtttcagttatcatgtacttatgggaactgtagaagttggcgagacatttggctgagaccagttctgaaaaaaccaggccttcggacacgctgtcccaacactgccagtatcatttcaggggacttgcagctccatggaagctaacccccaggagaccagccagctggatttgactacctatagtcaccatccaggttgtcagatgccaattttttttcaggagaaccgctgaggctagccagaatatggctgggcagcaccctctaggctctcactggatagaacaggatacagagaaaggcctccctagccaccaagacctcttccttatagctgagaaacttccaaggatatgttaactatgaaca

SEQ ID NO: 423757 - DNA, 385 bp, Homo Sapiens
  misc_feature (299)..(337): n is a, c, g, or t
tacccttaccctacccttctggatatgactgatggggatcaaaggtgcagataataagcacaggcaaatcaggaatgggaagagcaggttagggaggtggctttccagcagtagtgcagaagcaggactggaggcccctcccagtgaagcaggttctcctgaggccatggcaagcccttgcctaccacactgcggtccatgacaccagtctggtagccaaatgctgtcatagtgccttccttcaatgccactatttctgtacctatggcattcattattgtcatccatctttccatgcnnnnnnnnnnnnnnnnnnnnnnnnnnnnnnnnnnnnnnnaatctgaggaaaactctccccctctctactcagatggcaccttctcca

SEQ ID NO: 423758 - DNA, 329 bp, Homo Sapiens
agatgcactgtccatcgaaatcttatatagatccatatagggactatacaaatattttcatcaaagcattgtaagtgggggtgagaacaatagaggcaatcaggatattcgtcactgggagacaggacaggtaaaaacatggaggatatacagggtgtgaagcactatgctctaggtagcaacactctagagataggtggataaatactatcaaaattttactgagtacactcagggacaaccacaaaatgacatctgtagcaccaatactatataatgtaactataaaaaatacaaggtactcgccggttgtgcagcactcacacctg

SEQ ID NO: 423759 - DNA, 213 bp, Homo Sapiens
tagagtgaaaagttaaatggtaggtactgggatagagatgaataggatatcgtgagcatagtgcaggtgcaacaggtggtgagctatgcagaatataatgagaacgatgggttaactgctggtgagggagaggaagtaggcctgtgctggggctgaggatgatggagatgtctcgggctgagccggaaattgctagccactcggagacacagc

SEQ ID NO: 423760 - DNA, 133 bp, Homo Sapiens
caggatagcagtggtaactgagtgtgtagtgttaggaaatgttggtctgtcagtgtgactggagaatgtaggggtactgaatgagcccagaaagacaggcctggggaatgggagactgtgaacgggagactcc

SEQ ID NO: 423761 - DNA, 112 bp, Homo Sapiens
gacttcgagctctgtactgtcgcgcgcagtacgcgtatgtgcgcagtgaggcggcgcatatgcatctaggccataatattcggagatacgtagcggtaagtaacaacggtac

SEQ ID NO: 423762 - DNA, 381 bp, Homo Sapiens
ggatcccgtcagctctctctgatggacgtcttcacagaattgtcttctggtcctccagagagcttgtgggtggaaagtggcattttcctccttacaggaagagaaattgagagaagggggatatttcacttgatgagatcacactttggtgctcagcctgcactgagcctaggagtgtgaattcctaagttcacataggcattctagagagaccacagcatcacatagtcattctagctagcgaccgcagcatcacacagacactctagagagaccacagcatcacaagacacgctagagagaccacagtgtcacacaggcattctagagagaccacagcgtcacacaggcattctagagagaccacagtgtcacaccaga

SEQ ID NO: 423763 - DNA, 207 bp, Homo Sapiens
  misc_feature (137)..(137): n is a, c, g, or t
  misc_feature (175)..(175): n is a, c, g, or t
caacaacctcctcctttcaccttgccttgaaaatgccatgcaatttccaccacaaccccctctttgacatcttgagcagaggaacgtgtcacgtcctttgggggctcctgtgccgagttcctttggtgcttagcagnaagcttgtgggtctcgctacacacccacagatatcacntgtgctgatggttcacagcgcagctcacgtat

SEQ ID NO: 423764 - DNA, 354 bp, Homo Sapiens
ttcaggacctttaaaggcgagccgggtatgttaacgggcattaaagagctgatgggcagtttaggcagcgtgtacggcagaaaacaatgtaagtagtccgcaactctgtggcctctatgcagaattcaggctactataactgacatttactaaggctcagctaaccctctccctcagctactctcctatgtccaaaccaaatgagaccctacggcatccagccttcaccgtagtctgacttacattccaacctgccaagctaattcacagagagaggctgctccccgcccacggtatcagaaatgctctcgctgtaaatgagcaccactgcctcattcttacctaagtcccaca

SEQ ID NO: 423765 - DNA, 394 bp, Homo Sapiens
cgggtacacagtttgaaggttgggagtggtcctggctaggcatatacattcaggcatcctcagtgcttacacatagtacttaaacccataagatagacatcacaaacagaagtacagacagaaaagataggaggtcagcgcacgaagctctgggctgctccacaccctctactgtggcccctcctgcagatcaagtgaaaatccaagattgggccaggctttcctagcttgcctcaagggtgagggctgtgtggtgggggtgagcaatctgcacagcccctgcagccccgacacagtctcactgctgctctggccgggacaaccttggtggtgtctcctctgcagctctgcttctggcacaagaaaggcagccagctctctcatctacccggac

SEQ ID NO: 423766 - DNA, 202 bp, Homo Sapiens
cccaggcatactccgagagtctgcacacggtaaagggcacaggacaattcccaagagtctctcctgtgacaagctggccgttacccaccccatatagcgactggggttgcctctggtcacaggcatcactgctactcctcatactccctgtggggtgcgagctagtgaaacagggtgagagtgcccgtaaggaaagcatgag

SEQ ID NO: 423767 - DNA, 158 bp, Homo Sapiens
ggacgaagtgttttgtgaatgtgagggagggatactggccacgccgtgtttccctgtgtctgtctgacagtgtaaggaggggctgtgtggccacacattgggccttggatcagagatcctagattcccctaatgctaaaattaacttggatattttat

SEQ ID NO: 423768 - DNA, 453 bp, Homo Sapiens
ccgagtccgggtacggaacggctagaatattggcaccgaaggctggtacattggcacggaaggctgggtacatgggcacggaaggctaggcacatgggcatggaaggctgcgcacatggacacagaaggctcatacatgggcacggaaggctgcgtaaatggacacagaaggctgagcacatgggcacggaaggctgatacatggaaacggaaggctgagcacatggccatggaaggctggtacatggacacggaaggctggtacatgggcatggaaggctgggcatgggcacaaaaggctgggaatgggcacaaaaggctgaaacattgggcacggagggcttgcaacatgcgcatagaaaagtaggatacatgggcacggaaggctcatacacggccaaagaaggctaagtcacatgggcacggaaggttgctacccgggactcgccttaa

SEQ ID NO: 423769 - DNA, 170 bp, Homo Sapiens
gatcgttaagggagttcgggtatggggagaaatgggacaggaacaagggcaggaattgagccggagttaaggtggagtgggtcgaaggctaagtggtggcctgggaaatcggttcctgggaggactggaggcggggtggtgtggttggttgcttgggaattttgattggg

SEQ ID NO: 423770 - DNA, 471 bp, Homo Sapiens
taaggtgactctagcaggatgctttaaggcgagccgggtagtggggaaagagaacagaaaggaagggccagatggcccaagcactgagtaacagccacccacgtccacaactgccaacacgcagagggagaagctgagagcctggaactggtgacgaaagcggggaccccactcccggagcttcatagccacactggcaatgcaaactggattagaaactcattccaccactaaggaaggctggcaccaataaaaccacaccaccagggtgatatgcgagatttgagaccagccgtaagaaacaagaggaactggggccagagtctgaagactgcccagtaaaacagatacattgaaaagctgatgaaaactcaggggagaaagccacaggcaggagccttccagaaccagcatctatttctctcacacctgctaatcacaggcacaggacacacttcaccaggatgtttg

SEQ ID NO: 423771 - DNA, 421 bp, Homo Sapiens
caggagctctgcagctctctctgatgcaaaagtcactgactcaagtcacaccagagcaaaaagagcaggtaagtaatttcaatgcagagtggctctgaaactttctactccctaaaaagttctaccttgctactttcctagttttatcaaacaaacatgtagctctagggctgctacactcttgcaaaatacctagaataaagatgagacgatgtcgctccatggaattttggtgccaactgcttagctatctgtgactgcaaaactgggactaattccaagagcgcgcagggtgatgatgctattagggtctaagtaataacactcagaccaagtgacaaagagaggagcagaatcaggacacaaaaccttctctcttccttgcctaaagttttgcccctatggcacacatcagagagag

SEQ ID NO: 423772 - DNA, 312 bp, Homo Sapiens
agtgactctgcaggatcttatcagctctctctgatgactgggtaagattgagaagctaattcctgccagattggctctcaaaatgctaggtatgtgaggagtgtcatccttggggaggctgacagcaaagtctggcttcactcactcagcccaagaatgatctgctgtcccaaaccttcaagaaacgacagggtctcagttgtgtctgagggaatgtctggccagcaggctttttcttttagatttattgtccactagccttgggtgaggccttctaggatagttgagagagcgacacagagagaggctgca

SEQ ID NO: 423773 - DNA, 138 bp, Homo Sapiens
ggtgactctagcaggatcttataaaggcgagccgggtagtaccccaagtagacagggtcttaacccccagttaaatctgtctcttcatacttctagatctagaaaggctaggaaacaactgtacccccctcccccaac

SEQ ID NO: 423774 - DNA, 417 bp, Homo Sapiens
agtgagatctcagagctctctgcctgtgcctgtacttgctttatgtgagagtcagattgagatcatgttctactttagagaagggactggaacttgacctgatcttctgcctgcctgggccaccagccctgagcccagctcctgggtggctgtggcccggagtatggcagtgatggccggctgagggaggaggcaggggttggctaacaccagagggaggatcacagaacactaggccatcatgtgatggtccttggaaaaaaggttctagagtcaaatactgtatatttgattcatggatttctctaacaaggaggaattcctcttacaaagatgtacaatgagaagtcctgaattaagaaaccaatgtaactcagtgcttcctaaatttatcttactccaaaacccttttttcca

SEQ ID NO: 423775 - DNA, 104 bp, Homo Sapiens
tagaggatcgtacgctctcaccacccataacacgctggtaggggctgtacaatgtaaggtgtaccaagaacgaagacctccctactctctacatatcaaaatta

SEQ ID NO: 423776 - DNA, 489 bp, Homo Sapiens
  misc_feature (139)..(139): n is a, c, g, or t
ttatcattaacttagcctaatatattccccttttggattataagagattccacctgtgaccattacatctaaagaatgggcactggtttaactaattttgagtaaactcgaaaaatattttcaacaagagccaggcttnggggaagtgtcctcaaatggaagggtttaaagcatttttttaatacaaagatgataacttgcaaccagttctattatttttaactctttgccccttcctccatctcttgggtttgagaagagctggatctttgggcaattatttattccatttccacatctttgggaaggagggacagtgggaagaacaagacccagcacttggggaatttttatgattatctccagctgtgaatgctagggagcatcatttatgcagtgaaagaagtaggaaaagcaatgtcttacttctgacgaagaacttacagttctctctaaaggggtgggtggagagcgggggtaccgagctcg

SEQ ID NO: 423777 - DNA, 553 bp, Homo Sapiens
tcacccacccagctccaattctgagatgacggtgtgagcacctgcgccggcttgattctacctagagtcatgagagtgaaatgaacgctacacagagctgagcctggtcactgccctatgccccctatctcctcctttctaccctaagctgctgtgaaacaccttgttattacctctgccaagggctggggtatgttgacatttcatagccggcattgcaggatccctgtgatattcaggaacacactcccacaggagctcccgctcagccagagccaagcccagtgtacagtgtcacagagtgtcagcaagtctggccagatcttttctcctcattaggatctgccttggggcaaaaggattggtttctgtgtagagggataattaaggaattagagacaccgaggggttgaggaggaatcattcaattatttatctgtaccgacctcgtcggattaacatttaacggaccgagtattgaacaaagagtttggttattttctaagtatttcctggggcgggggagctcagtgtagggggaagtatattatag

SEQ ID NO: 423778 - DNA, 195 bp, Homo Sapiens
caccacccatcagctacaatctgcttcaccacccataagctacaatcgctctcaccacccataagctaccaatcgctctcaccaccccataaagctacaatccgctctcacccacccataaagctacaattcgtctcatccatcccaaatttagtgcccttgatccaactgttctctcaagtttgcagtgccctc

SEQ ID NO: 423779 - DNA, 445 bp, Homo Sapiens
  misc_feature (201)..(250): n is a, c, g, or t
ggcaccttgattactaaatgcccttgtcaacagaacagccacggcataggcacaggcattcaggaagaagaaatcccttgactcagattgcagccaggcttccttagtgacttgatcccttaaactcctatcactcaagcttcctagctatacacgaagcaaaagcatccctgctccccttcatggagcccagtgccaggnnnnnnnnnnnnnnnnnnnnnnnnnnnnnnnnnnnnnnnnnnnnnnnnnncatgtatatacacacacccaagtgtctggcaagaacttgacacctcgcgcctccatggagaaaatacacaagacagaagtaatttctacatggcagacaaagacggagtcttctgaggtgaatggcgctagcctaaggcaaccatccgttgcacagatgcatcagaggaatcctcaggtactcaatctgcactac

SEQ ID NO: 423780 - DNA, 432 bp, Homo Sapiens
  misc_feature (199)..(221): n is a, c, g, or t
ttgttggctgggtgttgtggaggcagatcctcattccacctgatgatggctgtgggaatgctccttgccagtcctcagatatatatgatgaggctcctgcacaggcatttagcacaaggggtccagcattgtcttctctccaggcagatattcttagaaactttgatttgcagttgtgagcccgtgaacctgaacggannnnnnnnnnnnnnnnnnnnnnnattttccatcttgtgggccatggccgctgggtatttatagctagatcttcagggccattctcacgtggctaaagaaaatgaaaacctcatgtggatgttgttttgttttctctctctgcctccggcattgcgagcactccagttgttacacccttattgttgtaactagagccaccctgagcatccctgcgatggagcggttatgtacatt

SEQ ID NO: 423781 - DNA, 455 bp, Homo Sapiens
tatcagtgggtcccactgtgttcttaataaccaggctgccatcctagatctgtgggatgcttgccgacttttcattgcctactttgttcttcctgaccccaggcagattctggattcactggcttgggttaaggacagctgggaaactcaggcaggccaatctgaggcttggcccagtttggaatagctgggccaggctctcagcctaaaagcgccttgtcacactgcctaaattcccactctcaatgaatcacctaaggtttgcacctcagctgcataggctaagatgcatgtatccctggggaaaccacctgtgaattagtctcaatcccgaacatctaaagtgaattgcttggaaatattttctttgagggtgtgaggcagggagaaagaaagtgaagaatagagaggggagtcccagaggtgcattaggaacccaagcaaagcccataaag

SEQ ID NO: 423782 - DNA, 311 bp, Homo Sapiens
ctggccctttctacctgttttattaaaagagctggaatgtgctgggcaggcagtgcactgagtgcttttatctggactctctcatttactccttacagccactcactgacctagatacttagtattttgttgccatttcatagaatgggcagatcgaggccaaaagaaatgacctaatttgcctcagaagttaatggggttgcccctactcacccacaggtatctctgattccaaagctgagctcttcacttctcggatacagacctcccttttctgggcttagagctggagtagggtatgtgtatcaggg

SEQ ID NO: 423783 - DNA, 408 bp, Homo Sapiens
aggcctgaacccatgagtcatcaacaactaaatgataattgaaagaatggacgggagtaagaggggccagggcattatacactgagaaaataggccttaatatttaagtgttgttgagaagaaagagctagaaaaggagactcagaagtcgtggtctgggaagtaggagggaaactagtagaatgtgacatcacagagtccaagagaaaatactattttgaaaacagatgttcagttctgtcaagtgctgctgctagaagttgtatatggactctctttagcatcttacaacatggaggtcatggatgactttatggagggtacttcagtagaggaataggatagaatccaaaatggttttgattgaagaagagagggtggaaaggaaataaagattagttcaaggtc

SEQ ID NO: 423784 - DNA, 324 bp, Homo Sapiens
caaactgaacagtatcgtttgaaagctctcattattcaagctgtcactttttggcagggttggcttcccctccattttggcttgggtaactcctacttgccctcttgaggattccaactcacattagactcacctctctgaactggtctctcccgggttaccaggggatgcctcttcgttagtgctcccatacaccttcatggcttccctactcccttggtccttatcattctggtattgtcagcatcctgtctgttctcctggcgccccatattcttctcaacttggttattccctactgtgtgggatcctgggtacatctct

SEQ ID NO: 423785 - DNA, 587 bp, Homo Sapiens
tttgctgggggtgatctagaggatccgcttatctcaccacccaggaatgatccagtagaggtgagaagaattgatgatgcaggagaaagctgtgaattcctggagcactgtttgaggaggcgagagtgggtgggattggtgtgtagctgaagagtttggcctttgctgaaagcatggagagaaggagaatatagggacacagtggagatggggagataaggtggtgggacttgatggacatgttcttgtgattgcatctatctttttcagtaaaatagaaagcaaggccatccactgagagtacagatggtggaggaggcatcgagtgtatgagggagaagaaggtgtgaagtagtcatcccaagagagactggacttaacagatagggttgtccaagtgaggccagtcagcatggtagtgtgtctccctctggcgacattcagttgcgtaggtgcagactggttggagaacaggatttaacctcttggccctttgctaaatgagcacagtaaagcaagaaaaggaagggacaatgaaggaagaacaggaatacagtgattataagggttcagacctagcgatgggg

SEQ ID NO: 423786 - DNA, 449 bp, Homo Sapiens
ccagcgtgcacttttcccatgtatgagaagtgccacatcactagtagaaaatgggaacaggtccatggagcttatgattgtcccgaggcatctggcaaggattcctgttgggcttggaaagtcattcctccttcccatcggcattccctaatcccttgctgggaccacctagctcaggctgtggtgcagcatgccattcaagggaggggagcacacaaaggcagcttgggtcacagcaataaccactgaacactcatcccaaccgctaacatcctgaacccaacgatatccctttgcatttccagttttggggaaaacagacacagccctgcctagtgggtgggggatggtggcacctctgagccatgctggtcccaggacacccggactcgctctctcttctgtcctgcctagatccctttttctggggaggggtgggtggagagcgg

SEQ ID NO: 423787 - DNA, 140 bp, Homo Sapiens
atgttctcacccacccccatcgagtaggtatctgaatatacagtaactaagctgaagcacttgcaggtgatattcaggttcagggagtgaccgtagaaatagacagctacaatagaagtatggcatagttaatttagttg

SEQ ID NO: 423788 - DNA, 362 bp, Homo Sapiens
  misc_feature (51)..(156): n is a, c, g, or t
gcgtcatataacgagacttgctcatattgggtgcttaaactgtagtccttnnnnnnnnnnnnnnnnnnnnnnnnnnnnnnnnnnnnnnnnnnnnnnnnnnnnnnnnnnnnnnnnnnnnnnnnnnnnnnnnnnnnnnnnnnnnnnnnnnnnnnnnnnatagcagcacttaggacagcgtccagcacgtggtaggagctcagtcatgtcagccaccgttattattacacacaaatgcacagactgtgcagacacagcaatgccaggctctgccatctggcagcagcagcgcgaaggtaacgatttatttctgtgtgctttgtctgtctgtgtttaccgaagtgagtgatatcagtgtgtgtgtg

SEQ ID NO: 423789 - DNA, 584 bp, Homo Sapiens
gtccctatctcaccaccctctgagcctgggattatggaagagccctgcagacctggcatgcatgcgactgtgtcaagcccagcagaggctgagagcttcacttggtgaccacacgatggttataacatgtgcatcctgcccggctgggctcgctgacggtccctctcagcaggcaacctgcagcctgactcaaccaggatgcacccttttcacagatgagaaaccagaacctgagggctcgcaggcgtgtctccatagatcagagacatttccaaatcaaacagctccaaatccaccctcaggaggcaccgtctgcctgttagaacgggtggttcccaccactcctgaatgagggtgtgactcctggttttggggggacatttcttcgtaatgctgtctccccacatgttgttttaggtcataattacgctccctggcaggggtgggcaaggccctctgaccctgtttacagacgaggaactgtgagggctatgagcaggggcccctccctggcctgggcatgtctggcgttgggcgttgtggctgcgccgagcttgggccgaggggtgtgggaaagtattggg

SEQ ID NO: 423790 - DNA, 137 bp, Homo Sapiens
cagagggcaccaggaaggcacgttgcacactacttactgcttcatgtgaggggttcatggtggcttctccctaccttcggaccacacctctggtggggaggtgctgcgtgaggatcccaggtgtgggtggagagcgg

SEQ ID NO: 423791 - DNA, 608 bp, Homo Sapiens
  misc_feature (83)..(91): n is a, c, g, or t
  misc_feature (358)..(382): n is a, c, g, or t
aaccccaagctgtggattactgtaccgttcttttagctcttccgggcttggaatttttcaaaagaaaaaggtgaggaggaagnnnnnnnnncaactttgttccatctggaatagattttgatgcaggtccttggttgccgtggccctcctggtctatagtcctggatttctggtttctttgtccttttacagcatgtacaatagtcagtttccctctctcttaggaacttctttttggggtgagttattcttttttcggacttggaagtttttatgattagtgtctttctggcagacttcagtgacttttctagaagcaggtaagacctagcatgctttgtcctgtgcgtagatgccnnnnnnnnnnnnnnnnnnnnnnnnnaacattgcattatgtgctccaaggaaatttgcaaggaagttttgttctctgggacttaaacaaagtcttaatcctcagaaatcatcttaatcatcaaatcaatgtgtcgtgtaattaaccctcttccagtgacccttgagataagctttttcctctcaatggagagtttttgcaggagggcaggtcctgcttacattctttggatatgggcttgtaaagactcctg

SEQ ID NO: 423792 - DNA, 329 bp, Homo Sapiens
gggtgatctacagatctagctctcaccacccggatagtagctaagcattgcgagacccgtgccgcggtgagcagaaaaattactcgagtcttaaatgaggacgagttgccagcgctgtcggcagagggaggaaggcgagaaagaaacgcaggaagaagaggtgctgtggaggaggtggaatgcagctatgaaatgcaaggccacaacaaaggtgggatggccagagttgtggaagcccaaaagagaagcgtggtctccagaataaagattctcaaaagaccagggtgcccaacttaagctggtgaaatcagactatttggttgcgtggc

SEQ ID NO: 423793 - DNA, 312 bp, Homo Sapiens
tgtcatcatctggtagtatatgcagttgctcgttgtacacttgtttctggaaggcttgtcgtgtattctatttccccagatctttgggattctattctcactagaccagtcactgtccactggccctgtacttatcttgcgggagcccccatgttcatcctttccagtggagctaggaagaattctagttacttctaaatcttctaattctgatgctgttgggccatttattaagctgggaatttagtctttgggctcatggacattattccaaaggttgtcttgtctatgggctcatgaacattattccaa

SEQ ID NO: 423794 - DNA, 630 bp, Homo Sapiens
actgtgtgtcgtcaacaaccaagcctgggaacattcccaaaagggtccaggaagcagctcactcagcagacgtttggtgatttcagaaaacaaaagggtcggcaggtcacgtccatcagctccctgaagagtcctccaggatcacgcctgctgcgtggcttggcacaacctgcatcacgacaacacggactttccatctttactgtccttttgatcacttctgcagggggatagctcaacttacaaaccacgtaaatattttcctttcggcaccaaactttcccctggggagctggaagcccagctggggtctttttgtctctggcctccgggtccagggctgacctgggataggagcatttgtaccagcctcccggagttgcagtgagaggtaccggcagggtttcagggacaggaggctgttaggactgccacccaccacatctggtgtgagggaccacaggatggaagaaggcagatatgcggagttctgaggcaggttatgtgggcccttggagttgctgaaccaaagtacacctgcaatcataaagccaattagatgtttgtaaagaggctggcatgggccgggccggtggtcagcctatatccagcatttagaggccagtggtt

SEQ ID NO: 423795 - DNA, 126 bp, Homo Sapiens
tctagagatccccgttcatttccatgcggtgcacttatgcggacacttcctacaggtagcgttgaccctaattttggtcgtcgggtacgcaatcgccgccagttaaatagcttgcaaaatacgtgg

SEQ ID NO: 423796 - DNA, 339 bp, Homo Sapiens
  misc_feature (292)..(292): n is a, c, g, or t
acccacccacactgcccgagcacctcacctcccaatgactgactcgtccccggtcttgcacacacctggggagtgtagctggcctgtcctgcacaccagccttgcaggatcagtgagtagaccatccttgtctgctcttgccgggtgcagctgtgtgtagtggcccaagggggggtcatctgggagggcaccaggaagcataagtgacatgcaccatgaggaagcgtaagtgatgtccaccacaagaggtgtggggagcggcagcagcgcgttcatccactgtgcttgactntgtttatttccccgatgaccttttcccggacttcctagctggatctc

SEQ ID NO: 423797 - DNA, 380 bp, Homo Sapiens
  misc_feature (246)..(321): n is a, c, g, or t
cgctctacaccccccccataatgacacattttaccattctcagaatcttctttgttattaaaagtagagaagctattattaccccatcctatagctgaagaaactgaggttgagaaagattaaatgatatagccaaggtcacttgactagtgagtggcaaatatgtctccaatctttttattctatgtgcttttcacagtgtcttatgttcaagtcttctattagaaaattcttgatttgggacannnnnnnnnnnnnnnnnnnnnnnnnnnnnnnnnnnnnnnnnnnnnnnnnnnnnnnnnnnnnnnnnnnnnnnnnnnngacaaaatgctaataaaagtattgcttgtgtagatttctacaacactagacttgaaaat

SEQ ID NO: 423798 - DNA, 281 bp, Homo Sapiens
ttacccacccccctcgtgctataaatttccttcttaacaccaccttagctgtgcctcagagattctggaatgttgtatttttattctcattagttttgaataacttcttgatttctgcccttatttcatcatttacctaaaagtcattcagtgcaggttattcaatttccctgtaatgtatggttttgagtgaatttctcagtcttgatttctgatttgattgtgctgggctttgagatattggtgtgtggatggatgaggtgctggtgtgtggatggatg

SEQ ID NO: 423799 - DNA, 135 bp, Homo Sapiens
tccgctcttcacccacccctccattccattccttgcccagcagcaaatcccttcacaccagtccctacaaaggcttcctgctgccatcatcaggatgaagttccgcctctgagggatgacttataagctcctctg

SEQ ID NO: 423800 - DNA, 430 bp, Homo Sapiens
acggtctgacgagatcctacacgtaataagtcgatgttcatctggtatgtcatgttatactgtttcaggtcatgacgattggataccgtatgtgtctcattgcatagtttcgtcaagtatttagtatgtctctcataagtcgtataatcctagcgtataaaccatcattcactggttaacatctatccctgaggagggatggaatgatctctcatctcctcaatggaacccattcccttttcagacaaatgtacttgctaaaaagttcttttcacattgtgcaaaatacttcctccatgggaattttttcccgttattattattatcttctagagcaaaatataatagtacccctcactcttgtatattgtagccttcaagttgagaaacagaactatgactgctcttctattatctttagctttcaata

SEQ ID NO: 423801 - DNA, 490 bp, Homo Sapiens
cgggtctcagtacggatgtggcacctgggccaggaaggttgggcagaatttcagcaaatggagatgtcaaggacagggtgttctagacagaaggagatagagatggcaaaggtacagacatagcaaaatgcatgacttgttggggaaatctcagatcatctggtctctggtggggacacatagtggagcatcaggtgttggttaggcagaccttgaatgccctgttaactgtatagagggtgctagggtcccaagtacccaagtatggcattcattctggaaccgaacaatggcacaatagtctcctttgagtagaagttgcttggatgcattggggagggaaccgatctgtcaggagtgtatgtgagggactggacagggatggggcttggggagagcacaggagcctgtctgtgtcagtgtctgtctgtccctttgcccttatccactttcgactcacttgggtctcccgttcacagcttcactgccc

SEQ ID NO: 423802 - DNA, 454 bp, Homo Sapiens
acatctcgcatttatggctagcgagatactctggcgggcagccaggctggactaccattggagtctctgtgctccaggtcgtggctatctgcgaagaggagcgagttggcgcagctctaacttagaatggattcttgtctgggctcgtgtattacctcatcagctgtggacaggagcaatactctcaacagcacagacaaaaggggacagatccctatatgggtaaaggtgatgtgggctggggtaagtaccctgagaggtgtctgtcacagaaaactgcctgggagaactttgtccaaagttctgggctccactctccaggcgtattgttcagtcactaggtataaaatagacactaagtgtccacgtgtctaccaagctccctggatgcgtctgatgcctctgcagatttacacatcactttactctaatacgtgtacataaattaatatgt

SEQ ID NO: 423803 - DNA, 494 bp, Homo Sapiens
cgggccagtacggatgtgtggagtacggatgtggtttgttcttgctatttcaagttccttgtatgtgcatcattatactgtttatatagaaagtcttccatatgtatctgcatgtaggtattgactgctacagatgtccatcttagcactgcttttgctatatcccatagttttgggtatgctgtgtttcaattttcttttgtttcaatacatttttaaaattttctctcttaatttcttcattgacccagtggttattcaggagcacgttgtttaacttccatgtatttgtatcatttccaaagttactcttattgattgctagttttagtccacttttattccagttttattaatagtggaaaacttcccgagtctagcaggatgtttacacatctggatacaagaagctcagagattctcaaatatttataatgcagaaagacattctccacagcacattatagtcaagccttttctcacgttggggagct

SEQ ID NO: 423804 - DNA, 586 bp, Homo Sapiens
acagctcggtacctgtccagcgaactctggaaagaggcactgctgagagataaagtctcctagcgttcctctctgaagattctgcttttggactgcactttggtggagcctgtggcatccatctttagggtagaatccagaggaatccttgtccttgaaaacgtcagaccaaagggatcaaatacaagagaaaggacggtgtgaggccctgtcttgcacgtgttctagcccactggggcacaggctctgggcctgctcaccttcatgtgctgctttcaaagaaggaaagctagttcctaatcgctagtgagccccagctacagtgaaaatgatttcccagggaaaccgggagagggagcaaggtgagaaatgggaaaggaccagcttgaacacatttacctggctcccgagggccatgtgctttcctgcaaaatcacgaacaaacgtccctgtggccgtgtgcctcctcccggtccccagagtagcagcagcagcaccccaggctgtaggatggaaggaggagtcactcccagcgcaaatcagaagatggagtttgcaggggaggcccaagagtaagcacagacta

SEQ ID NO: 423805 - DNA, 208 bp, Homo Sapiens
gaccggtccatgttctttgagaatgtctatcagatctttgcctatttaattggatagtttatttttttgctattgagttgtttgagttcctgtatattctgatataaatcctgtgtcatatgaatagcttttgcaaatgttttctcccagttctgtaggttgtctcctcactctgctgaccgtttcctttgccgtctatgagcgtaat

SEQ ID NO: 423806 - DNA, 277 bp, Homo Sapiens
catacagacacgcatgagtgagccccaatgggcgctaacatctgagaagcatggctctgcaaaggtgtcttgtccactgaattcgttgaagtctatccactgatttcagcccacaactggggcatctttatcaaagcccagggtgctccacaagccatcaggcctggggcaggtgggggccctcccctctcccaggagaggcctagccactggcattcctgcaggagcgcgtgcagacctcagggagactcatgaaatgctggtcactgtgcactgg

SEQ ID NO: 423807 - DNA, 210 bp, Homo Sapiens
atcctcccccaagcctaagctcatactcctccctccacctggaatgctcctccctcgggtgtcctctgactcaagctatcacttccttaacgactatgcttacaagccaccatgcaaaaccttacttccaccatgtaaaagcttcctgaccaaacctcccaccatcacctccagcactccctaaccatgtgctgcagtagaggcaaccgg

SEQ ID NO: 423808 - DNA, 165 bp, Homo Sapiens
tcctgtgccatatgcaaagcctgccatttgttacttggactgcccccatgcagcagtctgtgttccaagacacactagtgtccccatttgcacactaagagttcctagccagcatcaagacctgatgtggtataagagtagcaggagtagaggaaccgagcgggt

SEQ ID NO: 423809 - DNA, 130 bp, Homo Sapiens
ttttttcggcatgacaggcaggaactgtccagaatacctctggagaattctacttaccctgagatcaagggttctgtgagtagtacaactcacacccaaagtcttagttgcagggcactgtcggactctg

SEQ ID NO: 423810 - DNA, 427 bp, Homo Sapiens
cgtgcagtacggatgtggtacattagtagatggcaaggtactgcatggtctgaaaagtcggggagacagctgggctaggcataaacaaatatgagttgctgactgctttggaagttctatatacaccatagtttttaataaacacacatcaataatcacagttattactactgtggttgcataatcaacaaaatcgggccagattagctagttttaattcagttcactccactgactgaaggcctatcaaatttgagtagattatgtagcagcagaataggagtaaaatgaaaaactagcttctagaagatctatgatctggtgggcaagacattcatattactaacaggaagaggactatgttcaagtatactcagagccctatagaaaaggaattcaggatgtcagagataaatttttggaagag

SEQ ID NO: 423811 - DNA, 159 bp, Homo Sapiens
actggcgtcgttttacactgaggaaagagctataactggggcagtcgtttttcactgagtgaacgagcttataacgggccgtcgtcttttcactggggaacgtgctatacatggggcgccgtttatcactggggaacgtgctataccgggccaccgttt

SEQ ID NO: 423812 - DNA, 168 bp, Homo Sapiens
gcaagttcggatgggaagagtggcttagttgagagctacagggatgtcaccgatctgccagtgctagagggacaaaagacaaagggcagaggaacacaacagaacatctaacatgccactcttagatcaaggcagctaaaagcactgatacatcccaggaatctgggg

SEQ ID NO: 423813 - DNA, 225 bp, Homo Sapiens
tcttcgcttctcacggagtgcgagctccctgccaggtgaggtatatcagggctttccctcctggccgagggcaggtgtacagagaaacatggcggatcagagcgagacctgcatttaccaacgtcctattcacagatgttaccggttcattcacagaataaacaggtcctgtctttacagtaatggagtaatgcctgcaaatgtcgtactcggggccctgtcgtg

SEQ ID NO: 423814 - DNA, 118 bp, Homo Sapiens
tgtacacttcacgctgtgcaaatcatagacattaataatgaaccatggcatttaaaatggccaagctcagatgcaatctcaaaaatccctctccacacttcagaatctctctctggga

SEQ ID NO: 423815 - DNA, 106 bp, Homo Sapiens
atcccactgaaatgtgggtgttctaagcatccattcatcataaagtttaggggcttcagataccaggatgggtacttgctctactaaaatgggatccttaggaaat

SEQ ID NO: 423816 - DNA, 101 bp, Homo Sapiens
ctcttataatcaccaaaaggagataatgggtttaggccaagcgagaattcatccattttctcctaagcacttggtggctcaaacttagatttctaaaaatc

SEQ ID NO: 423817 - DNA, 100 bp, Homo Sapiens
cacaggtggcagcttgagtctccgtgctagggtctgttaatgcaacaactggagaaagaatttacagggccagggtggatgtaagacagggggtggggaa

SEQ ID NO: 423818 - DNA, 427 bp, Homo Sapiens
acaaagatggagcaggtgccactcaatgtgcaaaccctcccccttcttctggtgaggccagaagtacctaggtaggagcagccctacctccgaccacctccctccctgcagtgggaatagcagcccaatccccaggctgcagggatccacaggccatgcaagtgtggctctacccccagcatgccctggtgcgaagctgtgcccagagagatgttatctgcaccccagactgcctgtggtgctgcagagtggtgctgaggagagagcagggcacacctggagtctgtatcacctgctttccctagggagtcttgggccctctccacattcaaggcgaggggagcagaggatctccacgaagaccccctgagcacatcccttccctttttgctgatagacaacccgaggcttaaggggctttggaacc

SEQ ID NO: 423819 - DNA, 101 bp, Homo Sapiens
agatgggttaggaatacactatggattaataccgtctacggcgttgccttttttagaataccatcaagtctccagctatgaacacgtgagctctcacacca

SEQ ID NO: 423820 - DNA, 175 bp, Homo Sapiens
tatttgctgcccagtaatcattaactcctataggagggagaaaataataaagcaaccaggaaaaatcttaagtcaataatggatgaagataaccctgtttctcacttatacaacagctatctgtcccctaccatttactagagagaaggatgggaaatggttgggtcaacacggc

SEQ ID NO: 423821 - DNA, 625 bp, Homo Sapiens
  misc_feature (532)..(532): n is a, c, g, or t
cctgtgagtgaacggaaggggtgtcgtctgcagatccctgccttccatactcctgtgttcaaggctgcaaattgggagaagcttctgacttcatcgtccgccagggacactgatccaggtgccgtcctctgcaggggaagttggttgctacaagatctgttcctgtggacaaagtggcctcttggaaaactgtatggaaatgcactgtatcgacctccagaagtcttgtattgtcggaggaaaaagaaaaagccacggaacatcctttactattgattgcaatgtctgttcttgttttgcgggtaatttagtgtgttccacccgcctgtgcctcagtgagcacagttcagacgacgaccgccgcaccttcacaggtctgccctgtaactgcgcagatcagtttgtcccagtgtgtgcacagaatggacgcacttaccccagtgcctgcatcgctcgctgtgtgggtctccaggaccatcagtttgagtttggaccttgtatctccaagaatccctgtaatcctaaactctgncccaaaagccaaaggtgtgtggcaaaaccacaagtctggctgacgacttttgataaatttggatgtaggccatatgagtgtgtgtctagaaag

SEQ ID NO: 423822 - DNA, 483 bp, Homo Sapiens
  misc_feature (278)..(385): n is a, c, g, or t
tttggtaaggggtttttcccctaacaatcacagccgtgccctctgcaccttccatgaaaccctgaaaagactggaaagaatgcgtcacctccgtgacagcttcttcacccctgcctgttgctggtcttggtgcttgtctacagagatttagtgtcatggcaagaaattaggctttgggcctaaaagggtttgattcagatatggcctccccacatccttggtatgtgaacctaatatcacgaagaccctctcctgtgtggtggcttgggagtggaatnnnnnnnnnnnnnnnnnnnnnnnnnnnnnnnnnnnnnnnnnnnnnnnnnnnnnnnnnnnnnnnnnnnnnnnnnnnnnnnnnnnnnnnnnnnnnnnnnnnnnnnnnnnntctaacttattttggggatagtaagttacattataaaatgcctcatcttccacaatgcatgagaacaccagccaaatcatagcccaaagtgaaaagta

SEQ ID NO: 423823 - DNA, 139 bp, Homo Sapiens
cttaaaggagtgctgtttttcctttcttgcctaatctagccccctcctgagtccctgtgaacctctggtatcaactcagtttgggcccagtagaaaggagtggcctagaatagaaaaatctcctatccatcttttacaa

SEQ ID NO: 423824 - DNA, 603 bp, Homo Sapiens
  misc_feature (23)..(23): n is a, c, g, or t
cgcgggcaggtactttcacaggnggtgggaggaggtattgcgctgggtccactgcttcccagctccacgtgacctttcctctcaaatttcctcttgatttcatctttggcagaactggtacctgcccttcagctccaagaaacaaaagagcaggggggagtcagaaggctttgactacctcacccttaactagagatagaaagtgcttgattaaattctttgtgatacacattgcatttccttccctttccaacttaggttcatataacaatgaaggatcaattaaaatgaactccacctcccttctcccttagggtaaatatagattcccttagggctgagttgggcagggccatctacactaatgaaaagtcttctaggagaggtaatctggcctgttctgggctaggtacagaacaccacatcccatttgccctcattaactcattctttaaactcattcttttcctggcagcctcccttttctttctatccttttctgtataatcccatttagctacccaccataactctactttggatcatggaatctaggataccatcactgacaacgtttgtgtagataactgtctcttatcagta

SEQ ID NO: 423825 - DNA, 158 bp, Homo Sapiens
ctggctggacacagtggcaccgccgcagcccagaccaagcacaccatcccggacatcgtgaacgtcctgctcgaagagctggtgcaccatcgctacgagctaccaggcttccggacccttgagatggccgctatcggggcgcgcgaacgggtcaacct

SEQ ID NO: 423826 - DNA, 529 bp, Homo Sapiens
agcaggaaaatattaggaggacagcttcacatgaagggactatcattgtgtttatgctgttcttgatcacatctcttagttgctttctctctgaatgtccgtgtataaaaaagaagctacaatgtgtgtaccctgcgtgttatggaggaagtgtttaaaatttgggtataaggaacaacaggactcagtaaccagccactccccaacccccaatgtcagtagaagacagatgtcaaaatatcatgatcaacttgaggtagcataaatcaaaacaattttgatagaattagccatctgtggaactcttcccgaaaataacaaaatttcaccagggagccaccaatctgaaatgtaattactctaagatgggctataacctaattaattgtaaccttgcctgtcataaggtaaaatattttgctgacagaatatctaaaaagagagctgggaaatagaacatttgtctctgttcatccaaaattacatgagagagatactccagtagcttgggtgcatcaaacgttacaac

SEQ ID NO: 423827 - DNA, 394 bp, Homo Sapiens
ccccaagcccttggataagtagacaaagtatgtatgtaaatggtcctgtcatctcagtgaatgtctcattttaaattttggtgaaagcttatgctgtactgtagcacattattttatctataacattgaaaataattggcctttctaaacatggaactgtttatcatgcagtagggtaaggcagtgccatgctgtggtccttaatctggggaggatctcctcccttttccccatagagcatttggaaatgtgtgtgtggatggggttgcttttagatgttccagtgactggggacactcagtcattggatggcttaaggatgctaaacgttcctgagtgcttgggatagtcttgcagaatgaatacttgtgctgtccagaatgacaagagcacc

SEQ ID NO: 423828 - DNA, 543 bp, Homo Sapiens
catcccagacctgggctgattacctccagtctttttatttgtttgaaagagaaataaatgatagtatttaatcagtttattttcagttactccatctagacccatttttagggtctagggttactctgacagatacataaaagtgtttttctttttgatcacttgtaaaacaattttctgtgtaaataaattcctcaggataataaagtttgacggtatgttctcaggtccacaacagcattaaaagactgttttccagcaagatttcatgtgttggacttcagtgattagagaatttggttgggtaagagcgggtgaatgagcctggctcctgaaaaaagagaaaacccatgctggattcatcaagaccttacattcagcaactattgtctgtcacctcaacagatgaaacaaccaacaggtatagtgggagccaagagagaatacatacgttttgaccttaaaatgttttgatattaaacatgaggctaaatttgccccacgtccggttagagcataaagagagaacctggagtggtgagt

SEQ ID NO: 423829 - DNA, 181 bp, Homo Sapiens
cgatctagaggatccctcctatgcaaggctgattcgtttagctcgtgccaagtaccgagagcataaaaatgatgaacccttagtcactgacagctcacagtcccgagaaggcagtcccctagtcagacaatatcagagtatgtaaaatagccccaagtggtttatccttataactttattt

SEQ ID NO: 423830 - DNA, 488 bp, Homo Sapiens
gcatcttggtgaagtctacttggaggtcttcaaaggggtctgctccacaggcttgtatgccgggcgggacatttgcacttggcctacctttctgctgccagcaggtgacacactgatacaccacggttttggctagggctgccggatgtgagttgtagaactaccggcctaacaacttttcaagtgactctcggcctaggtgggtggtctcatgaacagccagtacgactgcagctcctagcggttgtggcatggctattcttctatctgataactggatccatccctcttcaatcacctgccctccctctgcctggagaaagtccttctcttctttagaataagtaggtacaaggtcaggtgcctgaaggagcagggggtgctgtgactgatgcccggtagggggtggatgctgcttttcaagcctctgagtcagctcgggagttcccaaggcaatcaaggtgaaagattgtcgtcgtcctctgcag

SEQ ID NO: 423831 - DNA, 222 bp, Homo Sapiens
cacaaagtggtagctagctcacctttatttatgaggttgttatggggttgatttgtcttgaaagaatcaaatctaagagaaatgtttggaatggctagatgatcctaacagaagaaatcttacaggtctttactgctaaacctaaggagatgaaagtaaacagtaagtggccaactcaaagaagcatggactatgttgaaacatggactatagctgcaattt

SEQ ID NO: 423832 - DNA, 384 bp, Homo Sapiens
caatgccccactcctgttagcagcaaatataagacttgggctatgtgtctgaacttggtcttgggtagtctccatttcacagactccagtctgaattaagcatcaacctgcttgatcttttaccataaagacagtagtaaccaacattgaattgcactatgtgcttcacatgtattcatctctcactgtaaagccacacatttggtatagaattatccttgtatacagacgagaaaacaggaatagcgggcaacataacatcgccttgagtgcatgcctctaaagctgatggagctaggattcacatccaggccacaaagggctactttggatcctccctctccaacatgcatataccacaccatactttccatgaagatcatc

SEQ ID NO: 423833 - DNA, 318 bp, Homo Sapiens
caacatattttcctgattagagagcttccaatcaaatatgcatttatatttagaagtatggaagtttatctgaaataatttctgtacattttttagattctgccttaccaattattctctatttctaatcaaacacttgcttataaaatgctcccgatgaggcaggtggtatctgaaagttccttccaaagctgtaagtctaaggcactttagaatgagtatcaagagcgggtatcacccaagagtcaacaaaaatgcggcattcttatgtataggaatggataggtaaacggtttgggcattccaagtgtagctgga

SEQ ID NO: 423834 - DNA, 468 bp, Homo Sapiens
ggaaaaaatacctctacctctctatctacatggcaccccaaaaagttccatatgtggttgaagaacccttccataaaaggtgagaagaattaagtctctctgtgctgacccccataatcttaactgtaatggttggttggatccagttgatgcctattcttctccctgaggtctttaggaagacatccaaacaatttctgagaagaagtgcacatggaaattgactgtacactgtctccttggctgtgaactcaagcatgtaggtaaaataaactacagaaaatatgccctctacttctgatttaaatttgaatgccccctcatgagtgaaatggtaaaaatccagcctggttacattcagagctgcttcttttctcatcttggttctgggtcaccctctgttggaacttcttccatacccaggccatcagcatggtccgaataatcagaatgatcacagtccttcca

SEQ ID NO: 423835 - DNA, 180 bp, Homo Sapiens
cgtaggaaggacaaaacatcttattcaatcagtgtttgcgcagcaggtactactgtatgtcacttcctatgctagatgctggtgataacgttttttttggtctataaggatcttaaagaataaagactataaaggcaagattacattcctagcatgggacaagaacatcagggataatga

SEQ ID NO: 423836 - DNA, 420 bp, Homo Sapiens
aaatccaaacgtgcttgacagggcggagaagtctaggactttcttttccctcaaccatgccacaacaacaaagagacacgattcctaatcgcaaaagcacaagcttttgtttgtgctaaccagcaaagcaaatgttcgagaaatttgacaaaaacaagctcctcctggctccaccctcagccttattttcctttcttaagcaatatccctttcacacagatgtggacagagtgccaactggaaggcgggaataacctgtctgcccctgctcccagggctgactcacagcagtttattttagcagtggttgataaatagctgatcccccaatacccctgccagtgtttcccatcctgtgtaggcagccttgtccccactggggcctgccagaccctcccataatctagcaggtaccgagct

SEQ ID NO: 423837 - DNA, 464 bp, Homo Sapiens
attggacccagaagttccgggtacagagtctgggtgagctcaccttgcctctgcagcagcctcaaacatatgacaagtgcttcggtctcgtctggtttctaggtaacctcaggagacaggtgtttacctcattccccgagcagcaaaagtcacacaatggcagggcctggttctcacgcatctcatcacacatcctgtccacgctgcctccttggagcctaggctggggagccgccttagggatgtacccacctatgcttctggcattgggctcaaggtctgaggtggggttttactttgttctgtaacctgcaaagttgataggagaccccattgctctgttgggtgggtttagcgtggccccaaactgggcctctgctgcctggtcactgagtatctccctgtggtgccccctcactaccttctgcactaacatcaccacgtctcgtctgagccaaattctg

SEQ ID NO: 423838 - DNA, 418 bp, Homo Sapiens
tcaaggggaccggacaaccggacaagtaaatgctctcccttggccaggctctgccatctagcttgggttctttttgcctcctctttgacaatacagaaaatctcaccataccagatagcgcttctcaggcaatgtcttcaggaaagggaaagggagttcacagcaccacacagtgggcaaccccactattcccagagccatacctccagacagctccaggtttccctcaccaggctgatcggagagggcaccaatttcaatcattgccaaatgctaacatctaaatgttttggaaccaagtctatcatttttgtccagcattagagaagacgggggcataatggaaagggttgtgatctagaaagtggaggattgtggaatagtttctggttcatgctgtcctcatttataaaatgca

SEQ ID NO: 423839 - DNA, 549 bp, Homo Sapiens
acaggagagaagttgttaaacttaacctgtcaactggtgacaggtgctatagaaaaaaagtagtgttaaggagaataaagcagcagcagaggtgctttattttacatagggtggtctgggaagttttctctgattaaggtgacatcggaaaaacaaaagtagttaagcatgtcacagatatgtctaggggaaaaagagttacaggtacatgtcactgccttcttgggggaaatcatatagttttccctcagtatccatggtttcaggactccctgcagataacaaaatccacagatgctcaagtctcttatataagatgatgcagggagggggaagaggtggaggaaaaataaaatcatggcatattacctgtgcacatcctcttgcatactttaaatctcgtgattacttaaaacacctaatacaatgtaaatagttgctatactgtactgtttagggaatgacaagaaaaaagtctgtacatgttcagtacagacgctctctccttatattttcaattcacagtgggctgaatcatggatgtggaac

SEQ ID NO: 423840 - DNA, 598 bp, Homo Sapiens
ggaggagggactctaaggcctcccgtgggatggctgaccctggtatagtcacctgagctgagggtgggccctcgactctgcacaccgttagttcaatcctgccagagttgactggtctcagcgagactaactcagtagatccagctcataagaggttgatgtgtaacttgtattccaggctgttgatgtcccaggagaaacagaccttgcaagcagatcagattttcctgttatctaacctgtgccttcttctctagagggaactttggggaagcaaaatcatgataaggctcttgtttggtgagcaggactggagggaggaattgatggaagacttgggtgagtgctctggggccaaatctccctcccctggtccaggaggacagcatcccagcacctcttatcactttctgtctcctacagttaagccacgacctgacgatacatgcaacagtttgcctatcagacaactctgccagcctacaagttccagaaaggcaagcacagcatgttatccacatcttcagcagtaagtgctacatagaagatgctcagtcacgtgcgtgttgctttttttaccattgcagtcccttctaaa

SEQ ID NO: 423841 - DNA, 441 bp, Homo Sapiens
tggcagctgactctgtcagcgagagcaagggaggcgcaggagggagcaccagcaagagagagtggaggagacagagccccggtcctgtgtaactgaatcacagaagtgaccacactccagttcttgccctattctgctcatcagaagcaggtcattaagtccagcccatactcagggagagggagctgtaggcatgcttggagatatgcaggcttggttctaaatcaacacaataaagcaagtgtcatcacaaagcatgtcacacaaatttcttggtttcccagtggatataaaagtactatagtctattaagtcacatctttagactccacttctaattctagttctcttgctgtttccaccacatctgaggtcacttcttccactcgtgttgaatccctcaaggtcatctgtgagggttggaatccacttcttccaaat

SEQ ID NO: 423842 - DNA, 214 bp, Homo Sapiens
tgtcctatgatgacttcagtacccccaacaaaataggtgtccttgctgtctctctgaacttgcctttccactgtacagaaagccctttatcatgtcttctctctgttgtcctggagactcctttttaccatctcatgcttcaaaattcagctcctctgtgaatcctttgactttctcttgatgacacacacaccttctctctgaaattactcat

SEQ ID NO: 423843 - DNA, 205 bp, Homo Sapiens
ccacagggatggtgcaaggataagggacagcgcctgaaccaggaccatggtgggggcgaggaggaaggcctggtcgccctatacaacagggcttctctcgtgactaattacggattcttctctcttagcttcccagctgcactgtcacctatgcaagaacggggcccaggtcttccacctgctctgcttccccgacagcaggcag

SEQ ID NO: 423844 - DNA, 106 bp, Homo Sapiens
ttttcgaaacttacaggacattgactcttggatgatactattaaacctaagcatcttttatttttttagaatagaaactttcagcttacattttcttcagtgtagg

SEQ ID NO: 423845 - DNA, 169 bp, Homo Sapiens
ccacttacacaatatgggtacgggttgtatctttctcttccaagatttaacagtttgagcacaccattatctgtcttgtagcgtagtgtactcaagagtgcataagtagacaaagatacacgtatcaccgtcagtcatatcacagtgaccttgctaatagattatcaca

SEQ ID NO: 423846 - DNA, 100 bp, Homo Sapiens
ttagcagcaccgtctgacacttgcggtggaagagagtgtgagaatgagacatgaacaagcaggccagaggtccttgagcagtgaatgtgggtcctagccc

SEQ ID NO: 423847 - DNA, 141 bp, Homo Sapiens
ttttaagcacatagttccttgctcaaaaacctgactggctgtcatgtgtcgcatgttagaagcaaagttgcctgtcttagcattcccaattagcctatatttcctgatcatatctatatgaacccttcctcagctcacttt

SEQ ID NO: 423848 - DNA, 125 bp, Homo Sapiens
cctagagtatcccggtagagatccttaattacacccttctggcacgagaatacgtcatgccctggcagtgtcttgcacttgacaccatcctcgggtgactcagctgacctgaaatgcccaccttg

SEQ ID NO: 423849 - DNA, 396 bp, Homo Sapiens
ggcggtggggggtgatactaggagatgaaaaaattgggcagtaacaatacttttcttgaatctttctgactacctttgattctataaatcagctggcattctgcagatccaaatttctcacctaaatttcttctctgggctgcaggactgtgatcatatgacttgtccaagcttcacagatatagttgttgaaaggctgtcccattgcagtttgtgataaagtagagtagcttatttaagataacattgtttattaaaattggattcattaggaagatagatcaggaatgtaaagaaaatattgaaacattgaaactgaaaatggacaaaatgaggacttcggatggccacagtggaaatgaaaaggagacagtggagttgaatgcagtctcatgg

SEQ ID NO: 423850 - DNA, 167 bp, Homo Sapiens
tccagaacagggaatcaattatacaaactccccacaccaaagctcccgtgtcagctggtagacatagaacaaacagacatcaatgcaaagtgatgtgtgtcacaagccaatgaagaaaacaggacagtgtgatgtcacacaaggcacaaacaacaatccaaacaagt

SEQ ID NO: 423851 - DNA, 109 bp, Homo Sapiens
tatgggaattttataaagtatcaagtttgccagtcaaaagcgtacgagagtaaatcttttgttgtttaatgttccccctagagatttctgtgcatagattgttggtgtg

SEQ ID NO: 423852 - DNA, 539 bp, Homo Sapiens
ataggatcaggcagtgtgaacttacccgatggatctgacggactagccggccgttggtccacacagcacaagtttcccatttagataatgttctcttgaaaatcggacactgatggacctttaaatatgcccttagaatccacgtgttggtggaaggtacacgtcctcgagatgttcttgtgtcccttagaatccacgtgtcggtggaaggtacaggtcgttgagatgttcttctgtcccttagaatccacgtgttggtggaaggtacaggtcgtcgagatgtgcttgtgtcccttagaatccacgtgttggtggaaggtacaggtcgtcgagatgttcttctgtcccttagaatccacgtgttggtggaaggtacaggtcgtcaagatgttcttctatcccttagaatccacgtgttggtggaaagtacaggtccttgagatgtcttctgtacacattccccttcatcgtacatacctgtggaaagtacctgccgggcggcgcgggtacgagtcgaatcgcaacctgtctagcgtcgg

SEQ ID NO: 423853 - DNA, 212 bp, Homo Sapiens
ctaagtcgtaaaggattatgacggggacgggttttagacacatacgatcatggaatatcaaataactgatctcggtcatcatctctatcattctgtgatggtctgagtgtgtctcccgaacgttcatgttgatctcctaaacctccgaagatgacgattttaaccggtgtggacttcgtcggtgactaagttctgacctgggaacacccctg

SEQ ID NO: 423854 - DNA, 427 bp, Homo Sapiens
agtggtatagaggcttgtgtggtcggagaatggctagacctggtgtaacccagactagacaacttggctttcttctggagtgatgggggccctgatgtttttgggagaaggaggtaaaggcagcaggttggcgtttcagaaaacttcccccagtggtaagatgaggagtgaactagaaagcagggagacaccagttagaaggctcttgaaattgtccaagcaactgattgaggggtgaaggtggggatggaggagacagaacccagagatgctgagaggcagaaccagcagcacttggtggctggttgggtgtggagcaagtccaggaagggctggactgcctacctgcctgctggttggcctggtgaagagaagtgacatccttaagcaaagcttgtgacctggaagaagtattgatttgcctcaa

SEQ ID NO: 423855 - DNA, 391 bp, Homo Sapiens
tggtggtgaaatgtcgtggtcgttagggcactagcatataatggaaaggcaggatggtacatcagaaagagcactgaactgagttagcagacctagactgacattccagctgagccacctgagcatacagcctcagctatttcaggcagatacacacaacagttgtgagcaccaaatgaaatcacatgtaaactacaaataccacagaaacattaaaaagcatttaaaggcaaatgtgtaggaaggtttctacaaaatgttatcgcttttttaacaaccattaacacggtgcaggtcagaggatttaagagtgggttttaaatgacccgcagttatctcagggatcctcatatctgtaagtgaacagaagaactgttggtaggctgactga

SEQ ID NO: 423856 - DNA, 125 bp, Homo Sapiens
gaacacacaatggtggatgattttcaggttttagaagtagtaaaactaagccagatgtcaattcaggtttctcattctcatattacttttgagtcacaaacgctgcctattactctctggtacaa

SEQ ID NO: 423857 - DNA, 534 bp, Homo Sapiens
aaaaatgtatggtgagagcaaataataggagggggtcttggttatgccctaatattaaacagttacacgacaacgactcatacccaaggtgttaaaaatcaatgctaatgatggaacacttcatgcggacgttattttagaaaacccctaatcaaaacaaatgcaaggggtgaagtgtgctcagtgccagagttttgtgtgctccttagaaagacgatctattccctggagagaaaggaaaggatcagaaatgataaccacttttaaaatacatcagcttgctcatgtgtcggtgtattttttctttatcagcttttcagccaaagcttcatttgatttgtgcagggaggtgtataataggaggaggccagtgagccgatttttatagagtctgtttgtagcttaaacaaagatgggggatttggaggataaaagcggcctgaaatatagcagattatgcagctttatttttcaaagatttgttaattcccctcctccctctcctgctctccggctgagccggtgtgtattgta

SEQ ID NO: 423858 - DNA, 126 bp, Homo Sapiens
taatgtcatcagttaaggcaggaaatggccattttcacttcttttgtgattcttcggttactatgggccatctggatatatacatgcagacttgggctcagaggcctgacataacagtcacgtggt

SEQ ID NO: 423859 - DNA, 381 bp, Homo Sapiens
ggggaaagggaaagcagccgatcactgattccttggaaatcagcgcttctcagacactccagtggtctgtgtgggattaagtcgtccgcagtctttccctcccttaatctcttctaaccttcctcgaaagtgccgtttcccagcctattttagatcatgccctttgctctcgcctgtacttctccaggggctctagtgcctctctaagtgaagtggtttggggccacacacattgctgtctgttctctccaggtcccacatgcagaatccagcagccccctggcctcacacctgcttttcatgtagtgggtgggactgcccgatggaataggcttgaggcagcatacgagtttgctatacacttgctcaaaacattagtgg

SEQ ID NO: 423860 - DNA, 150 bp, Homo Sapiens
  misc_feature (107)..(107): n is a, c, g, or t
  misc_feature (119)..(119): n is a, c, g, or t
gagaatgcagcgacgatgtgcgaaggtcctacggcgcgggcttcgttagcgggccctttgtcaccgacagcgaacctcaacttcgtcgagtaagaatgtttaacccnctgtgtcgtcgngtaccgcgaagcgtcgacgcgaaatggtctg

SEQ ID NO: 423861 - DNA, 317 bp, Homo Sapiens
  misc_feature (164)..(271): n is a, c, g, or t
atgcagataatgacatatttattcaaagactaagttcaagtttggaatatgaggatgcttaattcagagcccaagatctgcaatctgaattagaagacaaagaagagatgaagatggcacaaaggactgctgctcaacaaatatgatgctgtagatagacttcnnnnnnnnnnnnnnnnnnnnnnnnnnnnnnnnnnnnnnnnnnnnnnnnnnnnnnnnnnnnnnnnnnnnnnnnnnnnnnnnnnnnnnnnnnnnnnnnnnnnnnnnnnnntttaattagatccaaggctctacagtgatagtactactatcttgcg

SEQ ID NO: 423862 - DNA, 178 bp, Homo Sapiens
caggatggtggtttgaccctgtaggaacagggtccttcactcaggtgccacactctgcagtccaacgaatctgtacccttggtcccaagctccagcaaagggtgagcaactcagctcaagccaccagctgggacaaatggctctggtctgtggctctgactgggggccgctggcattc

SEQ ID NO: 423863 - DNA, 456 bp, Homo Sapiens
  misc_feature (65)..(288): n is a, c, g, or t
gggtctctgtttccccttttctgtgggtcactgtcctcatctctttgggtctgtgtttccgcttnnnnnnnnnnnnnnnnnnnnnnnnnnnnnnnnnnnnnnnnnnnnnnnnnnnnnnnnnnnnnnnnnnnnnnnnnnnnnnnnnnnnnnnnnnnnnnnnnnnnnnnnnnnnnnnnnnnnnnnnnnnnnnnnnnnnnnnnnnnnnnnnnnnnnnnnnnnnnnnnnnnnnnnnnnnnnnnnnnnnnnnnnnnnnnnnnnnnnnnnnnnnnnnnnnnnnnnnnnnnnnnnccgggtctctgtttccccttttctctgggtctcttgtccttgtctctctgggtctctgtccctgtttctccgggcctctgtccccgtctctccgggtctctgtttcccctttactctgggtttctgtccccatctctctgggtctctgtccttctctctctgggtccc

SEQ ID NO: 423864 - DNA, 235 bp, Homo Sapiens
aggagagggagacaggagtgggtgtgggaaaagtgtttcagacagagggaacatgtagaaaggtcaaaaggagagagcatatcatattcagataactaacatgtagtttgtatggcttaatgtagagttcaagaggtgaacgcaccaggtggatatgggggtttggctttgtgagagtagtgagaactgagactagagaggtaagcagaagccatctcttggagagctttgtaag

SEQ ID NO: 423865 - DNA, 525 bp, Homo Sapiens
gttgtcggtgttgtgcagtcaaaagactaagaagtatctatagcacagtaaatgtatttgcatatagtaattattgctctgtgaaattggtgcttttgtataagatacaaacaggatataaagcaaagaggcaacatacagccttgagtccttagagaccttaaattggtgagtttgtcttctcatgcatatgccaatttgtgttgtaagcaatagggactgtctaacaaattgagaaaatacaccgtgtgtgagttgttttggaatgtgttcttatatttgtcttttgtatgtattttcggaaatgtatacagttcacattacttaaagcaatgaaattatacctgtaagactagattcaagaggagctgaaaattgttccaactttcccatcttgagtgctaatagtttcttattgacaaaatttgcttaggggaatttaggacagtaaaaaactttgatcacattctcttcttaaacctatatctaaagaagactatcatatttaccagctgaagtttgaaa

SEQ ID NO: 423866 - DNA, 471 bp, Homo Sapiens
cagactgaagaacttcctttaacatttcttataggacaggtctggtgttgatgaaatccctcagctttgttgtttgggaaagtcagcttcgtttgtttgggaaagtctttatttctccttcatgtttgaaggatatttttgctgaacatgttattctaagataaaattattttccttctgaacatgtcatgccactttctcctagccttaaggtttccactgagaagtctgctgccagacatattggagctcctttgcatgttatttgtttcttctctcttgttgcttttaagatcctttccttatcatgccctttgggaattgggttaataaatgccgttaggtagtcttatctggtttaagacttcttggtgttctatgaccttcttgtacctgaatattgatatatttctttaggttaaaaaagttctctattattattttttgaataaactccctactctgatctct

SEQ ID NO: 423867 - DNA, 114 bp, Homo Sapiens
ctaacaatgtactatccattaagtattaattactgtatgcaatttcaacatgaatgttgtgtagcaatagaaatatctaagcttctgtttcttcctctgctaagtaaaagaata

SEQ ID NO: 423868 - DNA, 131 bp, Homo Sapiens
ggaggggaaatggacacaactacagtgaaagatgctgcaggagaagccagtgaggggaaatggacacaactacagggaaagatgctacaggagaagccagggaggggaaatggacacaactaggaaagatg

SEQ ID NO: 423869 - DNA, 126 bp, Homo Sapiens
gtttgagaaatccccacagccagcatgaatctcgtcctccatgttcagacataagcctctcattagccttggtctatgacattttggtctcagaaaatccaagtgggctcaaagtctgaccacctt

SEQ ID NO: 423870 - DNA, 530 bp, Homo Sapiens
ctgagagttgggatcatctggctctgggcttcgatgtgaatctttgaaacagaaatctgtcagtataggcattaccgttagctgagggatgtatgtttgtggttttctccttgatgactccagaaataaactgatctagataaccttctcagcagtagagatgggtcatttggatttgtttatgggagtctaggtatgttggagtcatgctgaagaggttggctttagcgaattggtttgtatgttaacattactcttaacactttgtaggccctctaggcctcacagagagccacaccaaactgagaaacataccctccaattgaatgtacagtctctgaagatttagggctttactgttatgaacagctttataactaacagcatgtctttaagatcaggtagtggttaaaatagtgagctggggcaacagacccagctgcggaaggagtatagagatgggcagctgaggtggggagtactcagaataagtaatgagtccgtgaggtgcagaatctctttttactgta

SEQ ID NO: 423871 - DNA, 474 bp, Homo Sapiens
cactatgtgagtgcccaggacagacgctggctccctgccgtgggcatccagggtctatctgcaaattcctaaaactagattttatctacagctcaattggcttcctttttgataacaagatgttttattgcatttgtcctagacagacaggtgttattccaatggctacagtgatgtatttacgaagcatttgtatggtttataacgtttcccttatgaaggctactgcctcttacattactataatttctatgggccaatctttaaataaatgctacatgtgtcgccgcatcgcttgttccaagtgacccgattcaaaggtgatataaatgggatgtttctccccttcatcaggataattgtttagtatcttgctaatgacgacataagcccagtgacagcggaccccccaaaggcctgctaggagttttactgaccactccagctaaaagagtgaggtttaactggtgaccc

SEQ ID NO: 423872 - DNA, 523 bp, Homo Sapiens
gtcagtcctgtgtgcgtgtaacacttgctgcagacaggaggactagactatggagattcatcgcctccatggtgccttctcctcctggaagcaggaattgacgcctatgaccccttagagactgatcccatactggcatcttggtggttacaggtgtctatgactgtgtacgtcgccctacggcaggcatggacatgcatattcgtacaacaaccatgtcttcatttctcagcatttcaaaagcatcaaacgttttctcaaccccaagctccctgttctcagtagaggtagaagtgagcgaaggaactgctgatgaatgtgacactggcatttgtccctcccaactgcatccatgctagtggctgaagcctctgcagccttggctgagcatctcttctccagcacccaaggcttctttaggagaattacaaaactcactggttgtttaacagtgactgaaaactgagctgctcagagcttcaaatacaaccgaacactcctcatgcctgtggaacgtaaccgg

SEQ ID NO: 423873 - DNA, 365 bp, Homo Sapiens
  misc_feature (293)..(303): n is a, c, g, or t
ggtcccactctataaccttttatctgaagcagtttgtcctcaaggcctctcgttgctttagccacctttcaagatgtcctatctttattggcttctagagccttcattctcatccgataggctctaggctcatctcttgattccaagccagtacctgctacctagtgtttgagctgactggtcctttataacttctctgaatgctgcacttcatcaactgcctcctccttgtttcaacccggggaactgtaaatccctatatatttttggtcacctctgtttagtggagtaannnnnnnnnnncaaaattttagagtataatctgtagtgtatgtataactagtaatttggcttatatcctcttt

SEQ ID NO: 423874 - DNA, 458 bp, Homo Sapiens
gcaggtttgtgagtccacagagcagggcaagctaatcctggcttggagaagagagacggagtacaatgagcattaaagaaaccttttcagagaacaggacatttgggtctccaaggagtatccctccatgtcagatcacgttctctgtaaaatttcacagacagtcacctaggattcaggtctcgactgaggtagatccgacgtctgccttctgtggtaccacatagtaacctcccagatgtgccaggttccccagtgtctgggatgaccttcttctgcaatggccagacatggcctgtatccccatcctgcttagtgcagctgcactgcatcaaccaagccatggctcttctctgttcttaaataaagatgataacctttgacgacaccctgcagtctcaacctttgcctactccattggccctcgggtgttcactgtaaccttcccttgctgggtc

SEQ ID NO: 423875 - DNA, 181 bp, Homo Sapiens
gggaccgtgtagttttctcctcgtgtcatagctgatgtgcagtgtgtgtcccgccccactgatgttcacgcgacttactgtggcatggagcgggcctgaatccagccctctgcctgaagcaaagcctcccaggctgagcccagcctagtcagccgaaccctagccaagctgcagacgagag

SEQ ID NO: 423876 - DNA, 182 bp, Homo Sapiens
cagctcgtccgggttctgttggagagctacatctacatttatggactagacagtagccagccatgatgaactaaacttctgagaccatggagtaagggaatgactaccatgtggatgagacagaaggcatactgaaggtgaggctgtggctaaggtgaaaaagaagattatttggcagtgga

SEQ ID NO: 423877 - DNA, 206 bp, Homo Sapiens
accaattatttctcccagcgcttaaataatattctcctcgtcactcttcgcgtctctcttccatgcattaccccatattctttgaaattaccttgaaagaaccccttctaattgatatctgcagttccaatcctcctgttatctcctgaacccagtccattcaggcttgcaatccctatactctaccacccctgtgtcaatgatca

SEQ ID NO: 423878 - DNA, 229 bp, Homo Sapiens
ccgagcagtattatctgcaaatcagattgtgtagagattctcaagaaatgtggagaccagaataaattccctgaagaacacacagctgaaagtatctgtgagtttctgtcccctgcagatgacctggagagctgtatccctctggacacgtacctcaggccaagtgctttaggaaacatcatagaagaagtgactcacccctgtaacccaaacccctgcccagccaacg

SEQ ID NO: 423879 - DNA, 120 bp, Homo Sapiens
cacagcggtccatcagcacaccagtagcttgagcaggcacggctcatgaagtaaatggtgcccaagcgcttaaagggcagcacgcaggtgttgcgatcgaaacgaatctggcgaagcaca

SEQ ID NO: 423880 - DNA, 306 bp, Homo Sapiens
gggtagtgacatgaacgctgacgatcttctacctaattctacgacataagtttccccagtgggtatgctctttagctgatttaaacaacaatgtataggcactggggttcagagtgggataagctaggaaactaaagggatttcaggggaaagaatcaccccaaatcatttctcccttccatttctcttaacagaacgctctcttctgtgtcataccctaaagttaaccaaaaaataatctggatactccacctctgcataaaacacagatcacaatcattatcatacattcttcttcgcatctca

SEQ ID NO: 423881 - DNA, 182 bp, Homo Sapiens
tgtatgcctaatagaagaaaaaggcaaccatactgattctctggatcaggcacaaatgaacacagcaacaccatgccttttctaggaaaaatagtgaattactttgacagcaacagggtattatgaagagagaccacaaagtacatagaacgtgctcaactcttattttacagactagcaca

SEQ ID NO: 423882 - DNA, 295 bp, Homo Sapiens
  misc_feature (130)..(130): n is a, c, g, or t
  misc_feature (132)..(132): n is a, c, g, or t
  misc_feature (150)..(150): n is a, c, g, or t
  misc_feature (205)..(205): n is a, c, g, or t
acctgtacataggttttattgttttgattttttatgtgcagaaaacatatatattgactgtgtcaattcacaaaaggtccattaattaaccagtcagactatatgttgcataaatatcattttacatagngntcatatatgcattttagnggttgggaaatatgtttgcagctgtttttaattgtctacttaatgtaaaaggggncaagaagcagagttaggcttgttgcttactgtagagtgacccaggagtttaatgtactttgtattccattataccatgaaaatgtttctg

SEQ ID NO: 423883 - DNA, 413 bp, Homo Sapiens
  misc_feature (17)..(17): n is a, c, g, or t
  misc_feature (65)..(65): n is a, c, g, or t
  misc_feature (293)..(293): n is a, c, g, or t
  misc_feature (295)..(295): n is a, c, g, or t
  misc_feature (316)..(316): n is a, c, g, or t
  misc_feature (343)..(343): n is a, c, g, or t
  misc_feature (403)..(403): n is a, c, g, or t
cgccaagcttggcacgnaggttctatcagcattttggttataaccacttaaccagtttctaaggntctccaaactttccctcatcttcctgtcgtcttttgagtcctccaaactcttccaatctctacccattacctagttccaaagccacttccatattttcaagtatctttatagcaacatcccactcctggtactatttttctgtattaggctgtttttgaatttccatgtagaaatacccaaggctaggtaacttataaatgaaagaggtttaattggctgacctgtananagaggcctcaactggtgaggnctcatcaagcattcaatcatgttggangtgaaaggggcagacagtgcatcacatagcaagagtgagaacgagagagagaggagaggngccacatact

SEQ ID NO: 423884 - DNA, 350 bp, Homo Sapiens
  misc_feature (75)..(75): n is a, c, g, or t
  misc_feature (88)..(88): n is a, c, g, or t
  misc_feature (170)..(170): n is a, c, g, or t
aaagtttgctgaatttattgaattgtcaaatctttccacataaactgactgcttctgaaaaatgagtaagcacangagagagcaatancagaaaaacattctccttattttcttgtttatgtatcaaaattctacctaggagagcaatcccatttctcttacttcctggngccataatgcaaatccccttttccctgtatgaggatctgaggacctgcgtgagggcagctgcctcaacaggctgatagtccaagttacatgccatctgttcatcctctgcctcgaggcatgtgccatttcttgttggagtggacaacttccactgctgattcaagccctctcttttatca

SEQ ID NO: 423885 - DNA, 181 bp, Homo Sapiens
  misc_feature (77)..(77): n is a, c, g, or t
cacaagtttggctgttttattatctgacaagtgttaattccatattaagttacttttgcaatgtgaatttataaggngcatttaaagcaatcttacagaaaatatttgatctacttaaaaattacaggtgttgtactataatattttcatatgcctaaaacatttagaaaagaaatccaca

SEQ ID NO: 423886 - DNA, 298 bp, Homo Sapiens
  misc_feature (200)..(200): n is a, c, g, or t
  misc_feature (229)..(229): n is a, c, g, or t
  misc_feature (276)..(276): n is a, c, g, or t
ggttttaaaaaggcaatttattctgcattctgaaatttaagccctttagataccacaaagttaccctcctggccttaagaaagatagctacgtttaagcactctaaactggaatatttatgtttagttacactggtaatttctaatgaatgggataatataactggctatctctttgcaatattttcaatatgtcctggnaaaaattatgcatctaggcatccctaagntgaatttgaaataaacctaaatactactatatatacaattatccctngcaaatctgtttcctaaaacag

SEQ ID NO: 423887 - DNA, 230 bp, Homo Sapiens
gctgagtggaaataaaccttgttagaattcaccagaaaagaagtgatgcattgttaattctttcttgcctagcttgaacatggcattccattaactgttttatctgattgtttaccaatgtgtttctcatcatatcatgtattcctgtctcaattttgcatgatttaaaactagtttactattcaaattgcatcatagtataaggtttctgctttgctatcactgacttt

SEQ ID NO: 423888 - DNA, 211 bp, Homo Sapiens
  misc_feature (23)..(23): n is a, c, g, or t
  misc_feature (91)..(91): n is a, c, g, or t
gttgatcaatgcttgtgtatttnaatccacaatctgaatatacttaaacccagaacactgcgtggtggttagaaccccatgggggccaggnggtcgacaccagcgcccctctttcatgtcagggccacggccgaagctgctctgacactgacaaccaggcgtttcgggagcccagccaacaggagccagcacttccgagcaagtccgtgag

SEQ ID NO: 423889 - DNA, 231 bp, Homo Sapiens
  misc_feature (51)..(51): n is a, c, g, or t
  misc_feature (111)..(111): n is a, c, g, or t
  misc_feature (168)..(169): n is a, c, g, or t
  misc_feature (178)..(178): n is a, c, g, or t
atttggatgtctaggtctctagcaaggctggggaagttttccttgattatnccccaagatatgttttccaggcttttagaattctcttctccctcaggtacaccaattatncttaggttcagttgtttaacataatcccagacttcttggagactttgtttatatttnnttattcttnttactttgtctttgttgggttgggttgattcgaagaccttgtctttgagctat

SEQ ID NO: 423890 - DNA, 317 bp, Homo Sapiens
  misc_feature (153)..(153): n is a, c, g, or t
  misc_feature (218)..(218): n is a, c, g, or t
  misc_feature (258)..(258): n is a, c, g, or t
  misc_feature (279)..(279): n is a, c, g, or t
ggaattatgaaaggaatttaaaaacaatctgagaatgaagtctccatcaccatcagagaacaggaggtaataatatccattttttggaggatattcaattcttcaaatcactgaggaggccagatatgagaacagaaagaatctatgaaaatnaactctagcagctgttcctccttgattagctaccaaaggaaatctggaaatttaacataaatatnctgcttttcaggatcagccaatagctaacatatacaattnctggaaaagaaattaatttancttataccaaactaatcctttctggtgagatcgcaagt

SEQ ID NO: 423891 - DNA, 250 bp, Homo Sapiens
aacttttaagttcatgagtacacgtgcaggatgtgtgggtttgtcatacaggtaaacatgtttcatgggggtttgttgtacagatgatttcatcacccaggtattaagcttggtatccattagttatttttcctgatcctctccttcctcccaccctccactctccaacagacactggtgtgtgttgtttccctctatgtgtccatgtgttctcagcattcagctcccagttataagtgagaacatgagg

SEQ ID NO: 423892 - DNA, 268 bp, Homo Sapiens
  misc_feature (43)..(43): n is a, c, g, or t
  misc_feature (87)..(87): n is a, c, g, or t
  misc_feature (133)..(133): n is a, c, g, or t
  misc_feature (183)..(183): n is a, c, g, or t
  misc_feature (193)..(193): n is a, c, g, or t
  misc_feature (239)..(239): n is a, c, g, or t
  misc_feature (248)..(248): n is a, c, g, or t
acgtcaattaaaaaacattcctcagttcggtaaagtatttggnagcaagctcctataagtagagagagtttctaatgtatttaagtncagatcaattacaacttgaaggagaggttggtgcattgctgaagancttttaataaagttgcaggtgctgtcagaaatggaaccatacctgaaaantaataactgnaatttcttcagttccatagcattgcaaaaacttacttccgcatttnctcatgtgntatatggggtttccatctct

SEQ ID NO: 423893 - DNA, 269 bp, Homo Sapiens
  misc_feature (30)..(30): n is a, c, g, or t
  misc_feature (34)..(34): n is a, c, g, or t
  misc_feature (40)..(40): n is a, c, g, or t
tttggcacgcggaagtaatgaaatgaatgnaagnaaattntccttgtagcacaactgtatgctgtgtaaattggtgtgagctcaaagcccagtcatgtgttttacctgtgggtgactctgttgtagaatggtcatattactgcatatgttatcatgacaacttgtgagtttgagtttatatttctcaaagaacaagttacccgtatatgcaacattgcgccattaaaagcttatttctctgtacacaaaatgggtaaaatcttgaaaaa

SEQ ID NO: 423894 - DNA, 279 bp, Homo Sapiens
  misc_feature (37)..(37): n is a, c, g, or t
  misc_feature (45)..(45): n is a, c, g, or t
  misc_feature (51)..(51): n is a, c, g, or t
  misc_feature (54)..(54): n is a, c, g, or t
  misc_feature (57)..(57): n is a, c, g, or t
  misc_feature (60)..(60): n is a, c, g, or t
  misc_feature (67)..(67): n is a, c, g, or t
  misc_feature (70)..(70): n is a, c, g, or t
  misc_feature (93)..(93): n is a, c, g, or t
  misc_feature (115)..(115): n is a, c, g, or t
  misc_feature (179)..(179): n is a, c, g, or t
  misc_feature (227)..(227): n is a, c, g, or t
ggtctcccctaacaccaagggcagtagcagtcctctnagcttcanagagangtnctnctntcctgtntcnctcctcggcctactcttggcttnctggttgaggagaatgcagganctggcctagggacctgggtcaccctgcagaggggagaatgttggagggaaaccttgccgacagnctgtcctcccaggagcacagggctgccttcgtcttgaacgggtgagtnacgctgtcacacccagcctagtcggagtcagaatcagagttgggtgtaaggg

SEQ ID NO: 423895 - DNA, 333 bp, Homo Sapiens
  misc_feature (148)..(162): n is a, c, g, or t
  misc_feature (256)..(256): n is a, c, g, or t
  misc_feature (303)..(303): n is a, c, g, or t
  misc_feature (323)..(323): n is a, c, g, or t
acgaggtcccattgcacttgcagagcaaacactcccagagtataaattacccttgctacattctgactctgaatgaataatatttcctgtgtagtgacatgctctacactatagacttggaattgaatggcatctgattcaggtggannnnnnnnnnnnnnncctcccaaagcaagtagatggaaaaagcggtcaactctacccttgtcggagcataatgcaaatctaagtctgtggaccttgtatcataaatganatgctttagtaaatgtgtcaatgttttccttctgttaattgaaactngaatgtaatatcaaactttngggataatat

SEQ ID NO: 423896 - DNA, 311 bp, Homo Sapiens
  misc_feature (17)..(17): n is a, c, g, or t
  misc_feature (21)..(21): n is a, c, g, or t
  misc_feature (48)..(48): n is a, c, g, or t
  misc_feature (153)..(153): n is a, c, g, or t
  misc_feature (193)..(193): n is a, c, g, or t
  misc_feature (203)..(203): n is a, c, g, or t
  misc_feature (275)..(275): n is a, c, g, or t
  misc_feature (287)..(287): n is a, c, g, or t
ccgctcaagcctctggnaacncaggtcaaagcctctgccagttcatgnagtatgtggtaaaaccaccatctcttggctgatttccactaccttagtagttctggcaccagaaaagtatacaatgtgaatgtgtaggcttatgtagtagatctncaaaatctctaatatataactgaagtaaagtgtacaaaanctgcctttcnctacttcatgtttcctcccatgcttcagaacaccattgttgaagaaacaggaagggcagtgagatatttggnagttggcatgtnttcaagacactgtattgggtaatt

SEQ ID NO: 423897 - DNA, 151 bp, Homo Sapiens
  misc_feature (41)..(41): n is a, c, g, or t
  misc_feature (53)..(53): n is a, c, g, or t
  misc_feature (69)..(69): n is a, c, g, or t
  misc_feature (97)..(97): n is a, c, g, or t
  misc_feature (110)..(110): n is a, c, g, or t
  misc_feature (112)..(112): n is a, c, g, or t
ctcagtgagacacggagaggaagcttgcttttacccatctnctaacttctccnggtgttctcatgcacntccctggccataattacttgtagtctancagccagttttgnangaatgtactaggtaggctcagtacctatgtatgctgtct

SEQ ID NO: 423898 - DNA, 255 bp, Homo Sapiens
  misc_feature (149)..(149): n is a, c, g, or t
ggaggcataaaagggaaggggggaaggcttcaactgtcttattttaccaacatcagaagacttaactctgacccttagcccagatgggccctacattcaccaagtcccccaaggccagagtcaagggcagatgcccttcagagttacanaggatatgaataagtgaatgggcaagagcagaacagacagaaagccagtccacagggacaggcccacagaaaagtctgtcaaagaagccgtctaaaattcgtacca

SEQ ID NO: 423899 - DNA, 384 bp, Homo Sapiens
  misc_feature (148)..(148): n is a, c, g, or t
  misc_feature (263)..(263): n is a, c, g, or t
  misc_feature (284)..(284): n is a, c, g, or t
ctctctcaattgaacaactctgttttatagaagatggggaaactcaggctaagaatttgccaaaggcatgtagcagtcagtggaggagctggaactagaaccaggtctactggactaaaattgccaccacagcaccatcctgcctggntggttgctggcagtctttcctctgaagcatcttggattgggctgggatgagcaacagccagcatgggggcagtggctgcctctcctaccttgtgttgcaatgaggagaggaacgntccattcccaagagggaagantatcggaaaggcagcttccatccttttcccagcctccctaactctctttcccgagagcggaggaatgacttataagcagcttgggagaaggagcttagct

SEQ ID NO: 423900 - DNA, 209 bp, Homo Sapiens
  misc_feature (144)..(144): n is a, c, g, or t
  misc_feature (184)..(184): n is a, c, g, or t
  misc_feature (192)..(192): n is a, c, g, or t
gcgctgcgaaccgatccagaggaagtaggcaatcccgcccacttcctggagtccatgacatgactgcttcgcacatcgaccttttcaccattgacgacaacggccagtttcaactggcagcgccggccaagtcatcgaggccgncttggacatccttgacgaaaaggtgatgcgcaacggcctnatttcctngccggctgacgccagcg

SEQ ID NO: 423901 - DNA, 306 bp, Homo Sapiens
  misc_feature (52)..(52): n is a, c, g, or t
  misc_feature (208)..(208): n is a, c, g, or t
  misc_feature (287)..(287): n is a, c, g, or t
gtttcatctagtttattcaaccataagacacttaatttcatttatgtcaggntcaggatcaaagtatgtaatgaaatatttgaggccgaacacaaattagaaaacaattcaagattttacacatgcccatattacaacgttgtcttagattcccggccaatggagctgctttggtttgccataacagtacacatttaaaataaatgangttcaagatatttctctggcttaatatttatattgcctttttgtgggttcttagtatattagaacgaatagcacattanccaaaacactgtcatgagc

SEQ ID NO: 423902 - DNA, 214 bp, Homo Sapiens
  misc_feature (79)..(79): n is a, c, g, or t
  misc_feature (102)..(102): n is a, c, g, or t
  misc_feature (130)..(130): n is a, c, g, or t
  misc_feature (145)..(145): n is a, c, g, or t
  misc_feature (159)..(159): n is a, c, g, or t
  misc_feature (178)..(178): n is a, c, g, or t
  misc_feature (187)..(187): n is a, c, g, or t
ctagccctgattctgtatccatggggttcattgttactctgagtaacaaaagcagaagtagctcaggcccctgcctggncagcccaatgcaggtaggggttnggggggcgcccttccctcccagggctgntgccttccggctcantgctcccttttcangggatgacggcatcatcanggctgcctnctccctcagcggcagcttcaccgtcag

SEQ ID NO: 423903 - DNA, 260 bp, Homo Sapiens
gctcctgtgtttcttttaattatgtggattacagacacgttcaactttggttctatgttaagaaaattcaagtttaaatgactcccaatttaagtgatggtatttaaaaataaattttgtgttatctaagacaaaaattgtactttgtcttaaaaagatatctggcttggatgggtcagaggggtacggaacagggtggccttcatcagtagctacaaaggcttttgcaaccgtgggctaattgcaaatgtccttcatga

SEQ ID NO: 423904 - DNA, 126 bp, Homo Sapiens
  misc_feature (56)..(56): n is a, c, g, or t
gcagtttaaggtttgcatttattgacgataccattttgtttttaatcgtgtaaatnaggccatttgttagtgttacatggaggtttggaggggatgtcacagtccttctctacttaagaagtgtcc

SEQ ID NO: 423905 - DNA, 382 bp, Homo Sapiens
  misc_feature (137)..(137): n is a, c, g, or t
  misc_feature (158)..(158): n is a, c, g, or t
  misc_feature (160)..(160): n is a, c, g, or t
  misc_feature (257)..(257): n is a, c, g, or t
  misc_feature (264)..(264): n is a, c, g, or t
  misc_feature (283)..(283): n is a, c, g, or t
  misc_feature (367)..(367): n is a, c, g, or t
ctatgtgacctttccaacaagtaccttcttcttctccagatagcttctaagacgtcttaacaagtgattatttgaaggttttaagaaaaatactcaatgaccaagaattcactgaaatatcagacattgagcatgtngtgtgcctcagttgggatttncnttttcaaattgcttcttaaaggaagtgatatgatttaatgctattaaatatagatgaagatgaactgtggaattgaggttgttttatcacatatttnttaatangtgaaaataaattctacangtcatgtataatactactattttccttccactctgaagaaaatattgccctgttcataggtgtatttatcccatactcaaatgnctcagcccttctcat

SEQ ID NO: 423906 - DNA, 313 bp, Homo Sapiens
  misc_feature (40)..(40): n is a, c, g, or t
  misc_feature (45)..(45): n is a, c, g, or t
  misc_feature (89)..(89): n is a, c, g, or t
  misc_feature (121)..(121): n is a, c, g, or t
  misc_feature (152)..(152): n is a, c, g, or t
  misc_feature (224)..(224): n is a, c, g, or t
  misc_feature (239)..(239): n is a, c, g, or t
  misc_feature (265)..(265): n is a, c, g, or t
caggggactctaatgccttcagctctggccatcctgagtnctgtnatctgcttcccctgcttcctacaccacccacaatcccaccacgntgctgcagtcactgccaactcatagtgccttntaagggccccagtgtctctgggacacccctntcccctgggagggaagcaaggtgctcatgaatgtcccaggtggaggtgctgaaaaagtgtggagatgccttnttgagtgtcaaagtntgggattccagctttcagcctcaggntccaggtgtgtgtgctgaagtggaattttcttctctcgttcactctcc

SEQ ID NO: 423907 - DNA, 201 bp, Homo Sapiens
  misc_feature (63)..(63): n is a, c, g, or t
  misc_feature (136)..(136): n is a, c, g, or t
  misc_feature (147)..(147): n is a, c, g, or t
  misc_feature (158)..(158): n is a, c, g, or t
  misc_feature (180)..(180): n is a, c, g, or t
gttgttgttgctttttatttcagcagcttttggggtaacagtggttttggttacatgcatganctgtggtgaaggctgagattttagtgcatctatcactggagtagtatacactgtacacaatatgtagattttnatccctcaccncctctaatccngccccttccaagtccatcatancacactgaatgatagaggcaa

SEQ ID NO: 423908 - DNA, 193 bp, Homo Sapiens
  misc_feature (120)..(120): n is a, c, g, or t
  misc_feature (159)..(159): n is a, c, g, or t
ccccaaatagtgctgaatatctcaaagtaatttgcagtcttattctttaaagaaaattgccatttgtcctctgagaatcacaaaattgaaaagcaaagatacctctttggctttgtaggngctgttttgctaggcttggaacgctcctccctgccacancccgtatccttcttgtctggcgagtgtgtgtgcc

SEQ ID NO: 423909 - DNA, 266 bp, Homo Sapiens
gctgtgacagttgtgcgttctttcttgggctctgatttctctgtagtagggcctgggtgtcctgtccccctttagctgttggataagtaagtaccaaagagggaatgctccctcaggcccccaaacctggagcttaggatttcagagagaaggatactgtgtggggacttgagcttctggagagggtggcgcctcgcgtcatagtcagaagcctagtcttgttttttttacagaggcttaattttcagcatttggggtcaggcttt

SEQ ID NO: 423910 - DNA, 197 bp, Homo Sapiens
  misc_feature (54)..(54): n is a, c, g, or t
  misc_feature (61)..(61): n is a, c, g, or t
aatgacaattctttatttgcaactgtgtctgtggataggtggttcacatatttngattatnatggactttaaaggtgacagtttcaactgaggacagccttttcttattacggcatttcttagccaagctttctgaaaaactctgtgctaaactcatggtttcaagcctttgaaagcctcttaaaggatgctaccca

SEQ ID NO: 423911 - DNA, 258 bp, Homo Sapiens
gctaaatcatgttagacacaactgtgcataaggttcaaaacactctagagcagtttttttaaggatatggttttatactgattgcttttcattgctaagaaaggtggttattaatagacgatataccctctttactgcctgctgctatgttcacatgctatagctggataataaaacctacaaagcaggctcgtaactaaaacttaacagtaagccttactagctaaacagtgtgaaggtcaaattagatcactcact

SEQ ID NO: 423912 - DNA, 172 bp, Homo Sapiens
  misc_feature (147)..(147): n is a, c, g, or t
aagtaaggaaagtgaaaatcatacacatactcataatctttttcctattctaaaatgccattgattgcaagattatttagctttgattatgacaactttcctgcaaaacaagatgcaataccacattgaatgtgtacactgattgtntgacctatccaaatatcagaaaaat

SEQ ID NO: 423913 - DNA, 142 bp, Homo Sapiens
  misc_feature (91)..(91): n is a, c, g, or t
ggagaggtgaagaagacagaaggaaaagccagggccagttttctttccaagttgtccatggtaactgccatatgatacttatcgcactggncacaacctagtcaggtagtcacacttaggtgtaaagaagctaagaatgtag

SEQ ID NO: 423914 - DNA, 250 bp, Homo Sapiens
gcaagtcaaggagtttggtagagctttatgaaatctctaaagattgaaggaaaacaatcactaaaatcgatttgataaagtgcaactaagtagtatgctagcctgttaatggattttcatcttgtcatttaagtttcagcaattgagtaccacactagaacacccacaaatgagattctgttacagagtatcttttttctactacagaacatactgtagacagttattcagtggttaacttgtggaaata

SEQ ID NO: 423915 - DNA, 221 bp, Homo Sapiens
  misc_feature (91)..(91): n is a, c, g, or t
  misc_feature (94)..(94): n is a, c, g, or t
  misc_feature (137)..(137): n is a, c, g, or t
  misc_feature (145)..(145): n is a, c, g, or t
  misc_feature (159)..(159): n is a, c, g, or t
cagggagggaaagggttgtggttgggagctgggggctcagccagattcccctttcagtgatttctcaggcatgaggatgacctgccttggncantgcatctgaggaaatattgcaggggagaggcagggcagggctnggagactncctgagcagggatntcattgtacagtcagttagaggtctctttttaaagcagggtgatgtatggcaaaaaatgaaa

SEQ ID NO: 423916 - DNA, 248 bp, Homo Sapiens
ctggccttataatccaagtttaggattaatcttaccccaacttaatagacttccagacagttgcagttgtctacaagatttcctcctagtagggctttgggtgttggcaccgtttggctcattccactctccctgggtcttattgactttcagggagcctagaagagctggacaaaacctgcttctttgcagaaagagtcggggttccaaagatttcgttacgattttttaaagatcactctctcaaa

SEQ ID NO: 423917 - DNA, 280 bp, Homo Sapiens
  misc_feature (64)..(72): n is a, c, g, or t
  misc_feature (164)..(164): n is a, c, g, or t
acgaattcttagaacagagaagtagtactgattttatatgacatagtattgatcttagttatannnnnnnnncaaaaaaagtcagtgaatcacacaaaataaccttcaaatcacatgtgacttttgtagcatgttcagaaagggtcatctcaatcatgaagagnaacatttcattaaaaatatttaaggactgactcagttttcttaagagcctttcttaattatttgatattcctgtcattctctttggaagcacctctaatgttaccactctttccat

SEQ ID NO: 423918 - DNA, 221 bp, Homo Sapiens
  misc_feature (106)..(106): n is a, c, g, or t
  misc_feature (134)..(134): n is a, c, g, or t
  misc_feature (190)..(190): n is a, c, g, or t
ccccacaccgaggcccttcacctgctgtgtgtctgtttcaggcacatgcctcctttccatgtcacgtctgatttgtaaggaatttctgtccttagcattagcaatngctgagaagtttgcactgctgccttcantccttcactcttgagagggctctgccaagtcccacaggggtatcttggtgtcaccnggcattttcctgggagctcagacagctgaaa

SEQ ID NO: 423919 - DNA, 267 bp, Homo Sapiens
ataatttgagctccttgcagttggaattatatcatctttatttctttctgagcatctagaacagtggtctatcaaagaataggtgtttaataactacttgttcaatgaatcagtgaatttgtttccttatttaaatatttgttgccagccaatacaacatggaaggctctgtgcagggggctggtgtggatgcaaaggtgtatagggcacattcccactcggggttgggacagtttaaggcctgccggggagacagacacgcagctg

SEQ ID NO: 423920 - DNA, 285 bp, Homo Sapiens
aatgtcaaaggctatctgatctgaccatggcaatttggaaaaggcctaaaattcccccatgctgcatatttgatttctttagggtcaagacaataggaaaatgtaaggctttgcaggaacccaatggcagcagttctataaagctgctgtaggtgtgaaaggtacaagtgctatagaaacttttggcagaatattgagagacgctgtatctttctgctaacagaggtccaccatcattgcagcagatgtacaatcatcatctactttaccaaaactttcaagaaa

SEQ ID NO: 423921 - DNA, 253 bp, Homo Sapiens
gcttgtttggttttctgtatatgtatcactaattcacctccaaacttctactacatgtgtaagtctcaacacatcaggctatctattggttgtttatttcttgacaacacccctttggagccctgtcttcactcaccaatctggactaactggtgaatgcctacacagctattatcccaagatttctctttaagaattcccttcaccttatcctttgctggattccatgtctgggccaagctttcagggagat

SEQ ID NO: 423922 - DNA, 267 bp, Homo Sapiens
  misc_feature (34)..(34): n is a, c, g, or t
  misc_feature (185)..(185): n is a, c, g, or t
gtatacgtgtaactttctctttatattataaatnacaacatttacaaataaaggaatttatctcccatatttcaaatacatgctgtcaagtttggctaagtccccagaagtacacagtcaccctcatctgagacgtgtaggactgcaagggaatgtgtttgggggtttaggaagtcacttatggncacgtgaaggtggagatgcctgtttgatgtcccagcagagagctgaggagacaactggacacaggattgtagagctcagtgg

SEQ ID NO: 423923 - DNA, 238 bp, Homo Sapiens
  misc_feature (53)..(53): n is a, c, g, or t
  misc_feature (87)..(87): n is a, c, g, or t
gaatatgagacagattgtcctcacagagcctttgaagagtgtgacagtatttnagggccacgctgttgtcttagagtgaagtgaggngaacctgcactggtttggtagtcatgggaatggaaggaggaaagaaatgtgaaagctcatcggtggcagagtcaaaatggcttggtctttgtagtcaacgattaagtgagaaggaggaattactggctgacttagaagaagtaaaaaacgt

SEQ ID NO: 423924 - DNA, 299 bp, Homo Sapiens
gagaatagttagcaggcattcgtgtggctgatggtgctgtatccgtaaatgcagctcagcagacactgtcccagaaggtcaggttgtaggctttgtgtacctcctaccatattagctgccacttcacctttttcccaatttaggaggcatatctgagagtgatgttttataggggcaaccttgaaccttactcgcttgtttttaaaagtattaatcagccacaagtatttcttctgacatcctcagaattgattgcaacataccattttggccagacacagacactaaggtgcattcca

SEQ ID NO: 423925 - DNA, 201 bp, Homo Sapiens
  misc_feature (44)..(44): n is a, c, g, or t
  misc_feature (149)..(149): n is a, c, g, or t
caaatcacaagtggggaagcagaagagctcctttattgactggncttggacagagaaaacaaagcccactgggaagagccttaacatacgtttttttctcaaaattaaaattattcctttaatacacacttatgcattgtttgtaaatncctcacttaaaacagtaagtggtgaagagtttttaagtttttaagtgataga

SEQ ID NO: 423926 - DNA, 302 bp, Homo Sapiens
  misc_feature (199)..(199): n is a, c, g, or t
aacaattcaagtaaatcctgtagctattaccacttaaaatccgtagctcaagattcctgtttcaccaccttatacacttaagcaattatacttaagcctttttttagtcctaagtgaagaactacatcagaatcaggataagtattttgcctgggaaatttggctgcatatgaatggagaagacatttacatcctatgntctggcactttctgaaagatctaattaaacatgttgatgtgccaatttaatcaagatgagagatccctgctggtgtcaccctctagaacctgcacttggtgtt

SEQ ID NO: 423927 - DNA, 281 bp, Homo Sapiens
  misc_feature (42)..(42): n is a, c, g, or t
  misc_feature (44)..(44): n is a, c, g, or t
aacgtgttcctttccccattgcttgcttgtaccagctttgcnanagatctattggctgtaggtgtgcagctttatttctgtgttctctattgtgttccattggtctacgtgtctgtaattgtaccagtgccgtgctgttttggttactgtggtcttatagtttgaagccacatctgtgtgatgctgctggctttgttctttctgctttgggttgctttggctattcaggctctttctttggttccatctgaattttagaatagttgttttctaattctgtg

SEQ ID NO: 423928 - DNA, 121 bp, Homo Sapiens
  misc_feature (56)..(56): n is a, c, g, or t
ggtcatttggaaatcatccaatctggggtgggggcaaaaggaagcattgttaagantcactgggctgtggcctagttggccctcagaggtgaaggcagggtgggccctcactggggcagct

SEQ ID NO: 423929 - DNA, 260 bp, Homo Sapiens
  misc_feature (18)..(18): n is a, c, g, or t
  misc_feature (53)..(53): n is a, c, g, or t
  misc_feature (72)..(72): n is a, c, g, or t
  misc_feature (203)..(203): n is a, c, g, or t
  misc_feature (221)..(221): n is a, c, g, or t
caaatacctaatgcaggnaagaaaatacatagccatggtcccttcctcaaggnctttataattcagtgagangtaaagatgagtgcttaagtgtatgcacctgattattgtctcttcattgccgcataagtcggaaaaggggatcacttgcagcgaaaaatggccactagatggcaatatcaccccatagtcaccaaacaggnttacttgcatccctaatnatgttctaccagagggaatatagtacagacttttccaag

SEQ ID NO: 423930 - DNA, 155 bp, Homo Sapiens
ctccctgtatcccaccggagactaagttagcacagtatttaacaagcaacagtttgtgagggcaaggctaaggggtggcctgtcacatctccgtcctgaggaggacgctgattagagggaagataaaacagaatggatttcaactggacataagg

SEQ ID NO: 423931 - DNA, 249 bp, Homo Sapiens
  misc_feature (18)..(18): n is a, c, g, or t
  misc_feature (39)..(39): n is a, c, g, or t
  misc_feature (104)..(104): n is a, c, g, or t
ctccccatcaccccagtnccctttcctcccatatatttnaaagtgataaggctcaatgtaaacttcctccttcccaaacgtttagggcagttcctgccaaagtnccccattctacaaagtgatttagtactttaaccttgctccagacactctgacatctctgtttagtctctggtgtaaaaaggttcgtctctcatatttcttgaggttggggaaaggaaatggtcacagagtttaggtgagggtggg

SEQ ID NO: 423932 - DNA, 165 bp, Homo Sapiens
  misc_feature (64)..(123): n is a, c, g, or t
ccttcagctcctgatgagaacccagccagaaacaagatgagaacccagaaacaagattttcatnnnnnnnnnnnnnnnnnnnnnnnnnnnnnnnnnnnnnnnnnnnnnnnnnnnnnnnnnnnnttgagaagacacctgcctgagggtcttatagctaatggactg

SEQ ID NO: 423933 - DNA, 266 bp, Homo Sapiens
ataatgaacagaaatttatttggctcacttctggaggctgggaagtctaagattgaggttccacatcttgtgagggccttcctgttgagtcataacctggtggaagtcatcatgtggcaagagagagggctacagagagcaagaggaaactcactcctgagatatcaacattaatccattcatgaggctgaagccctcatgatgtaaacaccccccactaggccacacctgccaatatcgttacattgggaactaagtttccaaca

SEQ ID NO: 423934 - DNA, 311 bp, Homo Sapiens
ctgaggtttagagaggtgaagtcatttggtcagggttacacaggtagcaagtagaagagttatgtttagaacttggctccaaagccttagttctttttattctgctaactagagcttcatagaaattaatttccgtaaagaaatgacatagaatggtagcttcaggcaaccaggtaccatgctggggagttgacttgtacatctcatttcattttcataactaccctgcagctgtcatcccatccccgttttacagttgagggacctggggctccgagaagggagatctgagcatggcccacagctggtat

SEQ ID NO: 423935 - DNA, 271 bp, Homo Sapiens
  misc_feature (59)..(59): n is a, c, g, or t
  misc_feature (120)..(120): n is a, c, g, or t
  misc_feature (122)..(122): n is a, c, g, or t
  misc_feature (226)..(226): n is a, c, g, or t
ctgcctccacccccaagttcaggacccagatcactctctggagaaggcctcagcttctngccttggctttcaaggctctgcgtgatttggatactcgcttagctcttatttatatatatntnaaaagcatcagcagtttatctcatgcccactaaactatcctgcctccgtaccctttgttcatactttctgctctgtgtggaatgcccttctttcttcccctgtnctttctcttagacccaagggttctcagccttatttctgcctctcc

SEQ ID NO: 423936 - DNA, 293 bp, Homo Sapiens
aatgcttccaacattttctcagggtatcttctttggggagcagtctctgggaccgagatgatgtgcaggatggctactggagtttgctttggggcaaacactggtgaaagggaggggaaggcagctggattggtcagaaggagaagggttgctgtgatgtgggcttgaccctcagccagactctcagggaaccccaaaggggcgacaggtaaaggcagctcacctccagcacttcctgcaactgggacagcagatcttcctggaaggaggagctggatgctgcatattacttt

SEQ ID NO: 423937 - DNA, 220 bp, Homo Sapiens
  misc_feature (62)..(62): n is a, c, g, or t
  misc_feature (92)..(93): n is a, c, g, or t
  misc_feature (109)..(109): n is a, c, g, or t
  misc_feature (119)..(119): n is a, c, g, or t
  misc_feature (133)..(133): n is a, c, g, or t
tcgggtggactgagtaataaacaagtaagatgaagaggagcatacagcaggctgcatgtatntaatctccacatgtaaacgtttggtatctnngcaatgtgcataagcnctctactgangggcagggatgagntaaaacacaaaattatgtctcctctaccaccatttggcgccatgataaaatcaaattggaaactgtctacttcaaagctcattcccc

SEQ ID NO: 423938 - DNA, 171 bp, Homo Sapiens
agagaacagcaaaaaagttatcctcccttaagttcctccctcactcctcatatcagacacagcaagagaactcagctcaacaccaagaagtcctgcccttattcacaccttccttcctatagccctcatcctcacagaagcttctagcctctatcttcagcagttcttaag

SEQ ID NO: 423939 - DNA, 225 bp, Homo Sapiens
  misc_feature (32)..(32): n is a, c, g, or t
  misc_feature (51)..(51): n is a, c, g, or t
  misc_feature (70)..(70): n is a, c, g, or t
  misc_feature (98)..(98): n is a, c, g, or t
  misc_feature (152)..(152): n is a, c, g, or t
  misc_feature (179)..(179): n is a, c, g, or t
  misc_feature (184)..(184): n is a, c, g, or t
  misc_feature (198)..(198): n is a, c, g, or t
  misc_feature (201)..(201): n is a, c, g, or t
ctttattgatatataatagttgcacatatttngggggtatatatgatattncgatacttgtttacaaggngtaatgattaaatcagggtacttaaggnagccctcacctccaaccttaatccttcctttgtgttgggaacattacaattctnctctctaactattttgaaatatataangaatngtggtaaactatanttnccctaccatactaccgaacactgg

SEQ ID NO: 423940 - DNA, 142 bp, Homo Sapiens
  misc_feature (50)..(51): n is a, c, g, or t
  misc_feature (78)..(79): n is a, c, g, or t
ctttcaaatggataaacttagacaatttatcaatgcttccttacattttnncaccacgctgaactccaacaggttttnnttttaaggtaaaccaggtttttggtccttccctgtggagaagttactttcaagtcagtgaaag

SEQ ID NO: 423941 - DNA, 201 bp, Homo Sapiens
  misc_feature (147)..(147): n is a, c, g, or t
gatatgggaatttttgtaattttcctgtaagtcagaagttatatatacaattatggtataaaagactttcattactgagaacaagacagaatttcagtttcttttgaaacaagtctcagtccttatggaatctgagacagcaacagntagctttcgtttcacatagctgtgtctggggctccccaccgcagggccccgccc

SEQ ID NO: 423942 - DNA, 172 bp, Homo Sapiens
  misc_feature (23)..(23): n is a, c, g, or t
  misc_feature (96)..(96): n is a, c, g, or t
  misc_feature (143)..(143): n is a, c, g, or t
gtgtgtgagcacatatatttatnatttctcatcatttctgagacaggagatgggtattctggcttggggactcacatgaggtcacagttacatgtnggtattggtttggtcatatgaaggcttggtgggggctggaggatccnctgtgagatggctcaatcccttggctgga

SEQ ID NO: 423943 - DNA, 205 bp, Homo Sapiens
  misc_feature (140)..(140): n is a, c, g, or t
  misc_feature (158)..(158): n is a, c, g, or t
cacacttggcagtatttattgaggatttcaatacaccaggcatcattatcatgttatacatatttacagaaagtgtatggaaatggagtaagaaaaaatttcactgttactaaacagacctattagggtcattttgtaantaataataattataatangactctcgtaagtttccctgtccttgaatgctgtaaagaaacaaaac

SEQ ID NO: 423944 - DNA, 178 bp, Homo Sapiens
  misc_feature (39)..(39): n is a, c, g, or t
agtaacaaaagattttttcagtattaattatcatgaggncttaaactctgtaatctatataaaactcagagagaacctgtcttgagtagtttaaatctctaattaaatcagtatttctacctagcaacagagtagcaaaagtattaattcagtggttctcaataggggtaggggagca

SEQ ID NO: 423945 - DNA, 229 bp, Homo Sapiens
  misc_feature (69)..(69): n is a, c, g, or t
  misc_feature (88)..(88): n is a, c, g, or t
  misc_feature (90)..(90): n is a, c, g, or t
  misc_feature (197)..(197): n is a, c, g, or t
cgctggttgaaagtcaacaacaggtcacttcgattactggcaaagcagagtggtccaaaatgcagggcngagtcgaactcggttacangnctaccgtggaagtcccagatccggactgagccatcaatgccacctgtgacaaaaagtttcaggggaaggcagacatcaaatgaagtgatgtcacactcatgcaggcnttttgtctctctccacacaaagctctgttttg

SEQ ID NO: 423946 - DNA, 196 bp, Homo Sapiens
  misc_feature (56)..(56): n is a, c, g, or t
  misc_feature (91)..(91): n is a, c, g, or t
  misc_feature (94)..(94): n is a, c, g, or t
gctagaggaccacccccctagaacccttcttctaatatcttagaggttagaactgnttcacatacattcctccaccaaacactggcaaggnggntggactatccatgattggcttagggtaattaagattcaagttacatggcctcctaatatgcaaaaagacctggggctcttgataatctacatctttgacaca

SEQ ID NO: 423947 - DNA, 271 bp, Homo Sapiens
  misc_feature (94)..(94): n is a, c, g, or t
gaaggaagtaaaagcagagatttattttaaacaaaagtacactccacagtgggagcagggttgagcaagtggctcaagaacatctgtcacaganttttctgggttaaataccctctagaggtttcccattgcttcactctatgcaaatgacagcttcccattggttcactctatgcaaatgaaggtttctcattggttcactctatgcaaatgaaggtttcccactgcttcagtctatacaaatgaaggtttctcattggttcactctatg

SEQ ID NO: 423948 - DNA, 238 bp, Homo Sapiens
  misc_feature (102)..(102): n is a, c, g, or t
  misc_feature (127)..(127): n is a, c, g, or t
  misc_feature (146)..(146): n is a, c, g, or t
  misc_feature (149)..(149): n is a, c, g, or t
  misc_feature (160)..(160): n is a, c, g, or t
  misc_feature (172)..(172): n is a, c, g, or t
  misc_feature (185)..(185): n is a, c, g, or t
  misc_feature (190)..(190): n is a, c, g, or t
  misc_feature (217)..(217): n is a, c, g, or t
  misc_feature (227)..(227): n is a, c, g, or t
tgtatgtgctcagagctgcagaggatgcaaaagaggctgaactcaggccaaagtgctacacagcccggagcccaggacacagggagtgatgtctcaggcatnggccaggggaccctgggtccagctngggagatgatggccctggnctnttctatgtttncacaaggtattntctttatagccanccttncctttgcatctttacaggggggccctnaatggacctnacaggggcaaa

SEQ ID NO: 423949 - DNA, 229 bp, Homo Sapiens
  misc_feature (67)..(67): n is a, c, g, or t
  misc_feature (121)..(121): n is a, c, g, or t
  misc_feature (190)..(191): n is a, c, g, or t
  misc_feature (198)..(198): n is a, c, g, or t
cacagccacgcctaagaggtagtgagttacactgcccctccttaagcatgggatatctatgtaaatnatttggaattctcctggatgggacatttgtctcttttggatttactaattattncaatcatgtttggccatatggagtcatgaatacttattttatacttggtgttataatctgatactattnnaattatnttgttcgaattgttctagctttggccattgg

SEQ ID NO: 423950 - DNA, 215 bp, Homo Sapiens
  misc_feature (13)..(13): n is a, c, g, or t
  misc_feature (60)..(60): n is a, c, g, or t
  misc_feature (63)..(63): n is a, c, g, or t
  misc_feature (87)..(87): n is a, c, g, or t
  misc_feature (96)..(96): n is a, c, g, or t
  misc_feature (119)..(119): n is a, c, g, or t
  misc_feature (127)..(127): n is a, c, g, or t
  misc_feature (158)..(158): n is a, c, g, or t
  misc_feature (169)..(169): n is a, c, g, or t
gttataagacttntcagagaaacaatttagtaatatcttctgtaatacccatcttcattnttnatatgaaaaagcatagcctatganctgtcaccntgctcactcccacatccttaccncttatccntctcacatcgtcccattaacacattatccanctttggggggnaaaaatacactaaattttagacagagtcactttcactatggccaca

SEQ ID NO: 423951 - DNA, 190 bp, Homo Sapiens
  misc_feature (54)..(54): n is a, c, g, or t
  misc_feature (70)..(70): n is a, c, g, or t
  misc_feature (118)..(118): n is a, c, g, or t
  misc_feature (132)..(132): n is a, c, g, or t
  misc_feature (146)..(146): n is a, c, g, or t
  misc_feature (168)..(169): n is a, c, g, or t
ctgcgtctcatggtttgagtgccagatcatatgcagtaaagtagatcaccaagnagacttctaatgtatnttatcctaatccctggctaccagacagcacctccaaaaactcttgagncctaggggaacttnccatcctgaatggnaggacacaggcctgcctgacanngccacctgctgattgtagagt

SEQ ID NO: 423952 - DNA, 190 bp, Homo Sapiens
  misc_feature (12)..(12): n is a, c, g, or t
  misc_feature (78)..(79): n is a, c, g, or t
  misc_feature (93)..(93): n is a, c, g, or t
  misc_feature (116)..(116): n is a, c, g, or t
  misc_feature (143)..(143): n is a, c, g, or t
  misc_feature (157)..(157): n is a, c, g, or t
  misc_feature (176)..(176): n is a, c, g, or t
atattgaatatnttatttgtatttaacattaattagcattacatctaagagcaatatcagtaacatttatacattttnncacaggcacagagntcattggtcattctttatgcaangaagtaaatagaggattagaaaaggtnaatagttcactgtnatgttaaaaatatttatgncattgcattcattt

SEQ ID NO: 423953 - DNA, 265 bp, Homo Sapiens
  misc_feature (157)..(157): n is a, c, g, or t
caaaacgcatcgactcccggatattcaaagctgccctttcaaatccactttcagaccgcgctgacctgggccagccactggcggtcatggttgctggtgggggcgattagctgtgtagacccacaggtgcgtgggcctgggccgccggcgcctcctnaccaacgcggggagcctgcccagttcttctggagcctgaaatgcgtgcccttcttggttgcccgctctccacagtggggagggctcacgaggactaggtgacacaagc

SEQ ID NO: 423954 - DNA, 186 bp, Homo Sapiens
  misc_feature (102)..(102): n is a, c, g, or t
  misc_feature (161)..(161): n is a, c, g, or t
tctatacaggtgcatgccagtcccccggtaatgaaatgtaacaaaggaagcacttaagttcagtgagggaaatacagctttaaattacagattgtacccagngcactttataaacggtaatgtgtgataatgtattatccttacttctgtgaaattgtggnctgcaacttctgccggggccactta

SEQ ID NO: 423955 - DNA, 301 bp, Homo Sapiens
  misc_feature (118)..(118): n is a, c, g, or t
  misc_feature (256)..(256): n is a, c, g, or t
  misc_feature (269)..(269): n is a, c, g, or t
ggactttttagttaccagatgataacctcttctacgatattcccattaaaagcaataaaatcgtggccagaacctacctcaattctgcatttttgatgtgtgaatgggatcgtaagangaagttataaaaaagagaaaatatctttcacaagtatttctgcttgtaccatgtccgttacattgattcaaaacgtttaaactttaaagaaggtaatacatgcatatggtgaacaaattgtaaagggcagtaaagagntatcaaatgaganataaatgtctcccttcttatctcccatcccaa

SEQ ID NO: 423956 - DNA, 129 bp, Homo Sapiens
  misc_feature (67)..(77): n is a, c, g, or t
gtgaattgattgaaaaggcaagatgtctaggaaatttcaataggtggctgcttttagctactacggnnnnnnnnnnnaatttgaaggatgcatgcttatatgtattaataatgtatttttgcaaaaatt

SEQ ID NO: 423957 - DNA, 220 bp, Homo Sapiens
  misc_feature (37)..(37): n is a, c, g, or t
  misc_feature (82)..(82): n is a, c, g, or t
  misc_feature (87)..(87): n is a, c, g, or t
  misc_feature (94)..(94): n is a, c, g, or t
  misc_feature (103)..(103): n is a, c, g, or t
  misc_feature (129)..(129): n is a, c, g, or t
  misc_feature (166)..(166): n is a, c, g, or t
  misc_feature (169)..(169): n is a, c, g, or t
cagacagtaattcggtgaacactggtctacaaaacanctgaatggggaggaccctgcctccctcaccagccaccagtctctntctgncccactnctctccccngtcatttgctcctgccgcactggctngagaatcccagcattttcctgcagcaggctaggtctntgnctaccgttccctctgtctgggtccaggaatctcttcctggagccccctgcc

SEQ ID NO: 423958 - DNA, 185 bp, Homo Sapiens
  misc_feature (36)..(36): n is a, c, g, or t
  misc_feature (67)..(67): n is a, c, g, or t
  misc_feature (99)..(99): n is a, c, g, or t
  misc_feature (133)..(133): n is a, c, g, or t
  misc_feature (161)..(161): n is a, c, g, or t
  misc_feature (164)..(164): n is a, c, g, or t
aaatcccagcctcttaaaaataccccagatgttggnttgttcccacacaccccacatcttgtgaggngctctccatcttacagacagagaacaccaagntagagagaggctgggcgtcctgcgccaccaaagntgtaactaagtgggactagaaggcaggngtnttgaccgagaatcaagtggcc

SEQ ID NO: 423959 - DNA, 272 bp, Homo Sapiens
  misc_feature (21)..(21): n is a, c, g, or t
  misc_feature (215)..(215): n is a, c, g, or t
caggcccagtgggaacactgnaagctgactcccttttgggccacagggatggttttgtggctttgtctcctgacccacttacccaaggcaaccggatccccttgtgctccctttaattctggtgacttcctcgggctgggccctttcttcctgtgccaggagaagtggggggctctactttcttcctcccagtgctcggggggcatggagcggancagggtctgagcctgccggctcatccagcctctcttgctgccctagcggcctccaac

SEQ ID NO: 423960 - DNA, 222 bp, Homo Sapiens
  misc_feature (109)..(155): n is a, c, g, or t
ttttattattgatgttggaagttgaaactggccatatctaaatatattcattctgtttcttagtactaatgggatcttttcttagacctgggaaattttctcccattannnnnnnnnnnnnnnnnnnnnnnnnnnnnnnnnnnnnnnnnnnnnnnagaactttctagaacaaatctcaggtcccctagatgtttcttccataattgttactatgcttctcat

SEQ ID NO: 423961 - DNA, 205 bp, Homo Sapiens
  misc_feature (141)..(141): n is a, c, g, or t
tgttggagtagtttggaaaatacaatctcactggtggttgcctgtgttctggtgctttcgttgatattaattgtactatactgaccacaacttttgttgatgattttaataactatgaggtatgcatattacactattttnacaagtaagtgactaatggtaaactgtttgtttgtggcctccttgtgaagagagatctttcctc

SEQ ID NO: 423962 - DNA, 123 bp, Homo Sapiens
  misc_feature (79)..(79): n is a, c, g, or t
taggagagagacgggcatgttttgaagctactgtgggtgcatgttactataccaaaataccatgtacagtcctacacangtatccccgtttataaagctgaatttaaatcacatgtacaccca

SEQ ID NO: 423963 - DNA, 240 bp, Homo Sapiens
  misc_feature (31)..(31): n is a, c, g, or t
  misc_feature (212)..(212): n is a, c, g, or t
  misc_feature (215)..(215): n is a, c, g, or t
gattgtagcctgaagtataatgcattttttngctttggggtttattaaacatgacttctttgcttgattagaatgtagaaattagttgtttccctaaaaccttctgaaggaggcagtcagctacttttcccttacagagttaattttcttcagctgctaaactccatgacactcgtgatgagtcctcaaatcttagtaaaattgggtacaangantcagggaatatatatagtaagtaac

SEQ ID NO: 423964 - DNA, 284 bp, Homo Sapiens
aagtgagatccatggacagtttaattaggaagcttcgacttgttagaataacagaggaagtcccagttatctacctattccttaaaacacattttgtcaggctggaatgattcccgtagtaaaactcaacatccacacctgcataaacatcgcctcccaagtgactatttattactgagtcgacacaggatgtcaccagtgagcctcatctccagtccaatggaggagttgacttagaccttccttggacaggaagggtctcataagcaatgccagaacttcaa

SEQ ID NO: 423965 - DNA, 210 bp, Homo Sapiens
  misc_feature (112)..(112): n is a, c, g, or t
aatagtagcgagattagtcatgtgtggtacaaagaattgggatatttggctataagaaatacttttcataaaggaactgtggagtagcaagcatggatttggcatctttcgnctttaggctctagataacattgctattttcctctcaacagtttttatgggaaaggcaagttaagtgcagcagcgtgaagatgcctatctgggcttcct

SEQ ID NO: 423966 - DNA, 213 bp, Homo Sapiens
  misc_feature (82)..(145): n is a, c, g, or t
  misc_feature (147)..(147): n is a, c, g, or t
  misc_feature (160)..(160): n is a, c, g, or t
  misc_feature (179)..(179): n is a, c, g, or t
gcaggttgaaatgataatcatttacactgggtttaataaaacatatggttaaaataatttaaccttttttcctttctttacnnnnnnnnnnnnnnnnnnnnnnnnnnnnnnnnnnnnnnnnnnnnnnnnnnnnnnnnnnnnnnnnanccggatggttctnagacctgccagccggcagnttgggggcagcatcctcctggcagggcacagccg

SEQ ID NO: 423967 - DNA, 201 bp, Homo Sapiens
  misc_feature (17)..(17): n is a, c, g, or t
  misc_feature (28)..(28): n is a, c, g, or t
  misc_feature (39)..(39): n is a, c, g, or t
  misc_feature (112)..(112): n is a, c, g, or t
  misc_feature (135)..(135): n is a, c, g, or t
  misc_feature (174)..(174): n is a, c, g, or t
  misc_feature (186)..(186): n is a, c, g, or t
ctggagatcagccctgnggtctgcaggngtaccttgatntgaagagctgtgaccacctcagtggcatgtccaactaccacgctgcagaagtctgtgaggcgtggtcctcagncctttgacagttaaaccccaatnccagccgaccgcagccaatcaatcaggtctctggagatngggcccaggcantatatatatgtatat

SEQ ID NO: 423968 - DNA, 268 bp, Homo Sapiens
aaaattaaatttctctttattcaattgcctctgagtagtgctgtgatttccaagtgccaggtagttaggtgtacaaatatacataccacagaaacatacagtttttaaaaaaattaagaaactggctgcatctgacgacatcaagaaaaaagataattctgattcaagggcttctccagaagatggggtttcattggcatgacgctcataggatgacctgtcatttttgtactattttttctagaaccatagagggatgacagtaact

SEQ ID NO: 423969 - DNA, 214 bp, Homo Sapiens
  misc_feature (91)..(91): n is a, c, g, or t
ctttcttgcttccttaaaagtcattaatagctttctgatgacaattttaaaaagccacattttctagctacataggtctttcctaattttntttttctatttcacgggctcatagcaacacaccactgatcatactcttacaaatgatagccaaactttttttccatggaatgcagatgaaaaacttggccaataagagcacaagatgtactac

SEQ ID NO: 423970 - DNA, 263 bp, Homo Sapiens
  misc_feature (117)..(117): n is a, c, g, or t
  misc_feature (121)..(121): n is a, c, g, or t
agtttccaggccgctgtacaagcaccacaattgggtagttagataacagaattgtttgatagttataataaggtcagatgtctaaaccaaagtgttggcagggcgtccctctgaagnactnaaataaaatttccagtccttctaatttcttgtggtccttaacttgtggcagataactcatcttacatgagttcttcctgtgtgtgtatctgagtctatataagggctagtcatattggttggggccatctgctctgtaggcc

SEQ ID NO: 423971 - DNA, 200 bp, Homo Sapiens
  misc_feature (54)..(55): n is a, c, g, or t
  misc_feature (84)..(84): n is a, c, g, or t
  misc_feature (171)..(171): n is a, c, g, or t
atatactcttctaagaagagcttcttgaggtcagggatcatgtcttttgttttnncgtgcccagacctaggtcttagaagacgnctaataaacatcagttgaaaaaaatgactggatgatctttcactttttccacgcagaaaacacgtggcgacatcactgagaaacctnccggccaacagagggcgcgacgtccattt

SEQ ID NO: 423972 - DNA, 219 bp, Homo Sapiens
gataaaccatgccgcaataataaccttgtactagtcatttttaacatgtgaaagtatatctgcaagatacatttccagaaatgggattagccaatcatatgatattaagccaaccttttgatctctttgagctgcatttgttaactaataaattaagctcatatttacctcataggatcattattataatgaaataaccatataaacaattattgtaca

SEQ ID NO: 423973 - DNA, 305 bp, Homo Sapiens
  misc_feature (46)..(46): n is a, c, g, or t
acattttgtgttttatttttatagatttaggggtacaagtgcagtngtgttacatggatattttgcatagtgctgaagtctggccttctagtgtcaccatcacactaatactgtacattgtacccaataggtagtattccatccctcagccccctctcctcctcccatcttttggagtctctgatgtctattattccactctgtatgtccatgtacaccaattggttagctcccactcataagcgagaacatgtggtttttaagacttagtttcaaatgaacttagcttcaaaagctctttgaaa

SEQ ID NO: 423974 - DNA, 273 bp, Homo Sapiens
  misc_feature (164)..(164): n is a, c, g, or t
gtatgttgtttcatttaattcttaaataatcctttacagactcagagaggtgaagagagtagcacaggtagtatcagaattgggattcaaacctgacacatacactgagcactaagttaaaaccgggcactgggcagctgctgaggatgcgatggtgagtacancagactgcttgctctttttgatatctagaatcttacagctctgcttgctcatccttgtctgttgtcatttactagttgacatcttcgttgactacctagaagcagctgc

SEQ ID NO: 423975 - DNA, 277 bp, Homo Sapiens
  misc_feature (129)..(130): n is a, c, g, or t
  misc_feature (153)..(153): n is a, c, g, or t
  misc_feature (157)..(157): n is a, c, g, or t
  misc_feature (205)..(205): n is a, c, g, or t
aagcctgttaatattccagaggcttatgataaactatttaaattgtcattctggattctgattatatctcctacaaagaaagagtgtattgtttattgaactttttgtttgaatacatgtgcctatttnngcataaatgtaaaaatgtaattntaanataaacccctgaaaacttctggtaacattatccagttgaataattgtnctgttagtattctaaatattttaagaaaattgtatacatatctgtgacaattgtattcacaagccaaaccaa

SEQ ID NO: 423976 - DNA, 269 bp, Homo Sapiens
  misc_feature (58)..(67): n is a, c, g, or t
taaaaggaggcccgaagatgtcagggggattcaaggtggcaaaacacattggttgtannnnnnnnnnaaagctttattgaaatataattcacataccatacaattaagccatttacagtgaacaattcaatggttcttagtatattcacaaatacgtgcaccacagtcaatgttagaatattttcatcatttcgaaaagaaactctaaccctttggctatcactccttggcttccccactgccacatgtgccccatacttagcctcaaa

SEQ ID NO: 423977 - DNA, 227 bp, Homo Sapiens
  misc_feature (81)..(184): n is a, c, g, or t
gaccagagccaataccctttatgattttttttaaaacatacacattctacaaactaggaataaagaggaattcaacctgannnnnnnnnnnnnnnnnnnnnnnnnnnnnnnnnnnnnnnnnnnnnnnnnnnnnnnnnnnnnnnnnnnnnnnnnnnnnnnnnnnnnnnnnnnnnnnnnnnnnnnnttgtactggcaattgggctagggcaaatggggaagtaaaagaa

SEQ ID NO: 423978 - DNA, 299 bp, Homo Sapiens
  misc_feature (224)..(224): n is a, c, g, or t
gctaacagtttgagttgggtcatacaattgtatcatttcacatcagctactgactttgagtactgactttgaatgcttataaaatcttcctcaaatccaggtagtgtgcaggacatggtataacaagacaacggaaaattagcagagagagccttcattggaaacccagattgtatttttgccagtacaacaaatattatttttaaagtctctcactaataggntttttcaacataaatctattgagaaacaatgatgtcagagagttttaaagctatagtgaagtgtgttaaattttg

SEQ ID NO: 423979 - DNA, 211 bp, Homo Sapiens
  misc_feature (41)..(41): n is a, c, g, or t
  misc_feature (155)..(155): n is a, c, g, or t
  misc_feature (175)..(175): n is a, c, g, or t
cgtaatttcactggaaaggagtcatgagtcaaaactcactnggagggttactaagccagaaagcatcagagttgctgaattaagccagagccaagggacttgcctcaacatcccatcgtcagtgagaagtggccatgtcaccagtataagctgtnacctcacttttgcaaccatncgctctttctgttcatcctcccgtgtggctccgctg

SEQ ID NO: 423980 - DNA, 320 bp, Homo Sapiens
  misc_feature (109)..(109): n is a, c, g, or t
gcaggacataagatatcagtgacgttatcctttgttgagccatcctggtttgagtcaggatgagtgttgagagtttttggggagttgcccctgtgtcctatattatttnatcctcttaaattctgatggtctttggctccactgactccaggtaagttggggtgacagtgcagcatatttctattttctagttgtttctggccagacatggggaaggtgaagacatcttgttcatgcaaacggattgatggccattcctaatctgattttattagtgtattttaggaagtaaagtaagattcttgagcccagctgaactt

SEQ ID NO: 423981 - DNA, 239 bp, Homo Sapiens
  misc_feature (131)..(131): n is a, c, g, or t
ttattcagattattaaattcatgttagtcttattgtgatcataacagtaggaactgtacagatgattggtagtggctctcaaatgttaaaatacatcagaataacatgggaaacctgctgaaatgcagttnccagcagacttggttttgtcatagcaattggtatttttaacaagcattccaaggattctgatgcagatcgtatcctgaccacactttgagaaaccattatttagtttc

SEQ ID NO: 423982 - DNA, 163 bp, Homo Sapiens
  misc_feature (27)..(27): n is a, c, g, or t
  misc_feature (80)..(80): n is a, c, g, or t
  misc_feature (87)..(87): n is a, c, g, or t
  misc_feature (133)..(133): n is a, c, g, or t
ctgttttggagggagtcagggtttatnctagaaagaggtagaacattgagtgaggttaggtaacagggacagggcaaganagacgantaagtgatcgaaaactgggtaggagggcctggtcctaagacccctngttctcagccaccgcgggccctccaccatc

SEQ ID NO: 423983 - DNA, 239 bp, Homo Sapiens
  misc_feature (25)..(25): n is a, c, g, or t
  misc_feature (57)..(57): n is a, c, g, or t
gttccctgcaggctgtatcatttgnaaatattttctcccattccaaaggctgtctgntcactctgttaattatttctcttgctgtgcagaagctttttagtttagtcccatttgtctatatttgtttttgttgcctgtgctttgagatcttagtcaagaattctttgcctagaccagtatctagaagaagagttttctctaggttttcttctagtattttcatagtttcaggtcttcct

SEQ ID NO: 423984 - DNA, 301 bp, Homo Sapiens
aattcataatcatttattgtaaatcaagaggctcaaatctttgtgttcactttcataaactgcccagaccatcaaaggtatgcatatacaaaaagccgctaagtatctgaaaaatgtcacttttttatttttaagctacacctagtggaatgggagaaagatgtcactttacaaaaacagtatgtacaattcaaacattacaatgatagagttgtcaggtgtgccctggccaaacagtggaactacacaaagtcagtggcccaaaaagactattgaatttttactgtacatgcttaaaaat

SEQ ID NO: 423985 - DNA, 240 bp, Homo Sapiens
  misc_feature (89)..(89): n is a, c, g, or t
  misc_feature (103)..(103): n is a, c, g, or t
  misc_feature (168)..(168): n is a, c, g, or t
  misc_feature (179)..(179): n is a, c, g, or t
  misc_feature (200)..(200): n is a, c, g, or t
aagcagttagaaaatttatcagcaattgacatcactgtaatatacaagaacatggcccattttctagtaattcactgttaatatatttnacaaaagtacaggngcttgactactgggattaaaaaagttattcagaagagtcagactaactgtgacaaagttataggnaacattttttncctctttatgtatgcataagngtgatgtgatactgtctacgtaagtctaaaagtctttcca

SEQ ID NO: 423986 - DNA, 209 bp, Homo Sapiens
  misc_feature (25)..(25): n is a, c, g, or t
  misc_feature (35)..(35): n is a, c, g, or t
  misc_feature (39)..(39): n is a, c, g, or t
  misc_feature (47)..(47): n is a, c, g, or t
  misc_feature (73)..(74): n is a, c, g, or t
  misc_feature (155)..(155): n is a, c, g, or t
gccatatccacaatctgtttcatgntttccttgantggntctatcanaaatcctgtgaaatcatgtactacgnntggacacagttttctcccatagaaatcttttgtttagactttcatggcatttcctataataataatgacatcttcaacagngccatctttccagacttttgtgatgttttatctggattctattctacagcatta

SEQ ID NO: 423987 - DNA, 237 bp, Homo Sapiens
  misc_feature (67)..(67): n is a, c, g, or t
  misc_feature (158)..(158): n is a, c, g, or t
aggtcacagagtaagtcgctatagcaatcctagacctgaaacgatgttgcattgtttagtgtctgtngccattatctgaaatgatctaggatccacaatgtcagtgtcaggccaggagacctgggcattaaactatgcagcataggtcaccctttgtntacattgacatgttacccatgttatgaaccaaagattgcatctcccaagcaaactgagtccagtgcaaacatcacaggg

SEQ ID NO: 423988 - DNA, 222 bp, Homo Sapiens
  misc_feature (14)..(14): n is a, c, g, or t
  misc_feature (31)..(31): n is a, c, g, or t
  misc_feature (49)..(49): n is a, c, g, or t
  misc_feature (117)..(117): n is a, c, g, or t
  misc_feature (134)..(134): n is a, c, g, or t
  misc_feature (168)..(168): n is a, c, g, or t
gctcttttccaatngttacagtgaacctganttacttttataatcagangtaactcatatactttaaaaataactctgtgacttaaaggtgccttagatgaactacaagagcatgtngtaccaacagatatttnggttaaatacaatacagtgactgaaaggcatgtntttttaagagaattaacctggataaaggaaaattgatacagataataactgccc

SEQ ID NO: 423989 - DNA, 355 bp, Homo Sapiens
aagcacttgggttttaaaaaaaggcacttgaaggagatggtttattctcctcctgtacacacatatgtacataccttgtcaaatgttacttctcttccttattctccctgtgctagaaacgttctccaggtaattgctttttgaaaccgaggttgagcattgcccagcctaaatatgaatatctctaccagtagggaatgaatacttcttgatagccagttttaaaagtaagttgttaatagaaaatactgagcatggcataattctttgtctagagccaggaggacataactctgtgttattctagttgaaacttttcctctaacctaacagtgatcaacagccttctatccta

SEQ ID NO: 423990 - DNA, 350 bp, Homo Sapiens
  misc_feature (40)..(40): n is a, c, g, or t
  misc_feature (95)..(95): n is a, c, g, or t
  misc_feature (146)..(146): n is a, c, g, or t
gtctctccgtctttcccttttatgtcttccatcacagggngttctgcatctccgttgcagaacaaccctgtagacttttagggttttgagttccnagaggagcatctcaaagcctttccaaatccaatgatgtcagaccttaaagntcacggggcccagggctggcaaatccatggcctcactttgctgcccacctttccgggtctgtcatggaaactgagaacagggcacatccctgtctggagtcttggaatctctacatcattgcaggtgatacccctaggaaactggaacttaagatacaatttatctacctttcctaatttactctgaaagcaaaagttctagat

SEQ ID NO: 423991 - DNA, 328 bp, Homo Sapiens
  misc_feature (46)..(46): n is a, c, g, or t
  misc_feature (98)..(98): n is a, c, g, or t
  misc_feature (107)..(107): n is a, c, g, or t
  misc_feature (240)..(240): n is a, c, g, or t
  misc_feature (267)..(267): n is a, c, g, or t
gccaaaataagggtctggcctaggaggcagcagcctgaggaaaggnaggccctgaagtcagttttcaaagggctgacccttggcctattatgtttctnatacatctntttaagcaagcggctcctaagactacactaaggtttcttccatcccctagcagctcacagttgacaattcccagttctctcagcaccagtgatgcctgcccttaagacacattgctgttgatcagtgcttgantactgacggctaattctgataaatttntcaggcttatttccttaatctacattggctcacattgtcccctaacacatccctgttaact

SEQ ID NO: 423992 - DNA, 303 bp, Homo Sapiens
  misc_feature (19)..(19): n is a, c, g, or t
  misc_feature (65)..(65): n is a, c, g, or t
  misc_feature (112)..(112): n is a, c, g, or t
  misc_feature (163)..(163): n is a, c, g, or t
  misc_feature (272)..(272): n is a, c, g, or t
gctgtgatatctgaaattnccaaaggatattcagtatctgaaataaaaaggcaaagctgaatatnctgctctctacagcagagggagctgctgtggctggacagtatctganccaagcagatcttaaaactttgtaggtgttgagaaatggtggatgcatggnctggcaccgtctgtggagccatgattatgtaggtgagacttgctcattatcttgtagtgttttaaaatgtcttcacatttctaaaggcaacttgcttaatgcatttttnaatttaaattttttatgttgtacagtttatt

SEQ ID NO: 423993 - DNA, 105 bp, Homo Sapiens
  misc_feature (60)..(60): n is a, c, g, or t
ggctttctatgtgtaaaagacaccactcatcaatatatgatatcgcagctctactctgtnaggtatacacatttatatagaagagaaagaggggattatgtgagc

SEQ ID NO: 423994 - DNA, 220 bp, Homo Sapiens
  misc_feature (52)..(52): n is a, c, g, or t
  misc_feature (116)..(116): n is a, c, g, or t
  misc_feature (163)..(163): n is a, c, g, or t
tgtcaaatcacgttgcatacacagggtttaataatgatctgacacacttttnccttgataaaattgaaaggaaatagggcctatatgttatttactgacacctcatttatattttnaggaaactagaagtccttaaacgtctaaaacaagtgtattgaatgtncatttaagcagtctatcagttgtaaatgtttacatttaaagttaattgtttattgaa

SEQ ID NO: 423995 - DNA, 295 bp, Homo Sapiens
  misc_feature (62)..(62): n is a, c, g, or t
  misc_feature (85)..(85): n is a, c, g, or t
  misc_feature (106)..(106): n is a, c, g, or t
  misc_feature (144)..(144): n is a, c, g, or t
  misc_feature (189)..(189): n is a, c, g, or t
  misc_feature (259)..(259): n is a, c, g, or t
cctcctccctagcccaagatgaccatttgattaagtcacatcccagagcagcaaactgaggncagggtcaggctctatccaaagngtccctggttacctccaaggncacttgcagtgaagtagtaagaaagggaacggaaaggnagggggacatgacacataaagccagagccctccctaccctcaggntggggaccaggcaatgactaccacgttagcttcataaccttaagccccttgaccatccacatcccaaggntgactctcccccaacccccaaggtatgaccttgacc

SEQ ID NO: 423996 - DNA, 263 bp, Homo Sapiens
  misc_feature (58)..(68): n is a, c, g, or t
  misc_feature (79)..(144): n is a, c, g, or t
  misc_feature (164)..(164): n is a, c, g, or t
aacatttatacaataatattattttaatcaagaatttcttaaaatttcatcacggacnnnnnnnnnnngagagagtctnnnnnnnnnnnnnnnnnnnnnnnnnnnnnnnnnnnnnnnnnnnnnnnnnnnnnnnnnnnnnnnnnngtccaagcgaccctcccgtntcagcctccgaagtagctgagaccacaggcacccgccactgcccggataatctttgcatttctaatagagatggagtttcaccatgttggccaaactcc

SEQ ID NO: 423997 - DNA, 103 bp, Homo Sapiens
aattaaagtaaaagaatttaagtctttatttctaaactgatgcatgaggaccccagtgagcaatattccccaaggcaaatcaaccaaaagcaaaactgttttg

SEQ ID NO: 423998 - DNA, 296 bp, Homo Sapiens
  misc_feature (146)..(146): n is a, c, g, or t
  misc_feature (155)..(155): n is a, c, g, or t
  misc_feature (198)..(198): n is a, c, g, or t
  misc_feature (208)..(208): n is a, c, g, or t
aaggaaataaagtctccaaatgatgctgttgcatagttaagaaatatgatcttcctactgcccagaaagagaatatgaggcgaaatcaatgaagagagaaatttcagttatgtttcttgcccttgctctccagagcatcattcagngttattttnctttattctgagacaattttattttgtcctcaaatcctctggntagcatttanatatgtggttgagtctgtaatcctagagatacttggctaaaactaatacctgctggttagtcctgaagttaaagttacggtttcctaa

SEQ ID NO: 423999 - DNA, 233 bp, Homo Sapiens
  misc_feature (21)..(21): n is a, c, g, or t
  misc_feature (34)..(34): n is a, c, g, or t
  misc_feature (62)..(62): n is a, c, g, or t
  misc_feature (86)..(86): n is a, c, g, or t
  misc_feature (108)..(108): n is a, c, g, or t
  misc_feature (110)..(110): n is a, c, g, or t
  misc_feature (157)..(157): n is a, c, g, or t
  misc_feature (166)..(166): n is a, c, g, or t
  misc_feature (202)..(202): n is a, c, g, or t
gaaggcttgattaagggaggntttatttgatgtnaacttaccattccatagactataaagancattataaaaaaatcctctaaagngacacatgccccaaatgaccangncataagcaaaccttttaaattactcatctttcatatgtgtgtttgtncccctactnttatcactgtgtcttctgtcttttgtctacctatgngaactgcacactatctgtggcaatattgtgc

SEQ ID NO: 424000 - DNA, 146 bp, Homo Sapiens
  misc_feature (35)..(36): n is a, c, g, or t
  misc_feature (41)..(41): n is a, c, g, or t
  misc_feature (90)..(90): n is a, c, g, or t
ggaaattcaaattggcagagggtaggtatattttnnttctnagacagcaccgcttagttttacaatccagggatttacataaaagaaagntggtcagttattacgcatgatacataacaactatttttgggccaagactaacagtg

SEQ ID NO: 424001 - DNA, 199 bp, Homo Sapiens
  misc_feature (184)..(184): n is a, c, g, or t
aagacaagcaaagagataatgcagcaagccagctcatgtggtggccagagggtttggtgcaagagcatctgtagtaaagtgtggccagtgatggccatttctctaggctcaactgtctcccataagagactttagccctacgggaactgttgggcctaatttctgcaggatggtcttggaaatnagaagaagctggtcc

SEQ ID NO: 424002 - DNA, 174 bp, Homo Sapiens
  misc_feature (67)..(67): n is a, c, g, or t
  misc_feature (106)..(106): n is a, c, g, or t
  misc_feature (128)..(128): n is a, c, g, or t
  misc_feature (149)..(149): n is a, c, g, or t
gaccctggagaatctcatgattatgtgtcttgaggatgaccttctcctggggtatcttactggggtnctccacatttcctgcatttgaatgttggcctctctaggntggggaagttctcatggatgtnatcctgaaatacgtatttcangttgttttcagtctccccatcactt

SEQ ID NO: 424003 - DNA, 260 bp, Homo Sapiens
ccaactgggcgttggggagttaaccaagaagcacgaaaagaagtaacatggtggatttggctcttgacatgtgcttggtttctagccttcctcttagtataggacgcatctccaaaatgttgccagtaaagcaaaccgaagtgtcaccggcacctagctgtagaatgaattcacactagcccctggctgagaagcactgttttgaaaaagtgcattagacgattctgttcatatttatgcagtgcctctgagacatagtg

SEQ ID NO: 424004 - DNA, 311 bp, Homo Sapiens
  misc_feature (22)..(22): n is a, c, g, or t
  misc_feature (45)..(45): n is a, c, g, or t
  misc_feature (48)..(48): n is a, c, g, or t
  misc_feature (50)..(50): n is a, c, g, or t
  misc_feature (70)..(70): n is a, c, g, or t
  misc_feature (74)..(74): n is a, c, g, or t
  misc_feature (77)..(77): n is a, c, g, or t
  misc_feature (80)..(80): n is a, c, g, or t
  misc_feature (121)..(121): n is a, c, g, or t
  misc_feature (174)..(174): n is a, c, g, or t
  misc_feature (189)..(189): n is a, c, g, or t
  misc_feature (250)..(250): n is a, c, g, or t
tttcattaagggagtccactgnggttctgatcacctgctgtctgnctntnaccataaatcatattttgantgtntantantctgtgactgtattggcaaaacaaagtcaaatatatgaganatttttaaaagatgtaagccattttaatactctagttactctaattctaaggntcgctattccacagnggccactactctgctttagaagagtttcattatacctccctggcaatgtaagacataaggnatccagagtggtttttacatccattgcatttacccaaatacaccatcggagggcagcacac

SEQ ID NO: 424005 - DNA, 160 bp, Homo Sapiens
  misc_feature (86)..(86): n is a, c, g, or t
  misc_feature (125)..(125): n is a, c, g, or t
ccctctcacaaccaacacacacatgacctgtcccctggcacccccaaatttaagagtggattgcaaatcttttggagaccatggcnctgctacatgtagaaaaacctgttctgctattcctgggnccacaataaacccagaaattatgttttgagttact

SEQ ID NO: 424006 - DNA, 340 bp, Homo Sapiens
  misc_feature (136)..(136): n is a, c, g, or t
  misc_feature (145)..(145): n is a, c, g, or t
  misc_feature (168)..(168): n is a, c, g, or t
  misc_feature (185)..(185): n is a, c, g, or t
tggcacgaggtggcacgaggtatgttactatgaaatgttacagcttagtttcatgcatatggctggtgtgatccagttacttattttaaaaagagagttgatttcctttgtttatatgctggcagtgaaaaacagnatgacagtncgacttaagaatgagggcttgtnctcagtacagaaacagnagtagcctagatcaagaagtgcggaccaccgctttgtacaatggtctccaaactttggtcacttcatcaggaaatagtatgagcacttctctccatacatagttatttgtaaagtatacatgcttctgctattgtactctaaaacgtgctgtatt

SEQ ID NO: 424007 - DNA, 298 bp, Homo Sapiens
  misc_feature (206)..(206): n is a, c, g, or t
  misc_feature (214)..(214): n is a, c, g, or t
  misc_feature (257)..(257): n is a, c, g, or t
gtcctaagtgaatgggtatgtagtgtttcaaatacccatcttatgccaagagcgaaagaaaggtgccacttaatgataaactcataattgaactttgcaagttttgaagcagtcagactgtagtcaaagggctagggatttcagcctaaaggaatacagaatcccaagtgggaggggctctgcttgagcaggtactgatactaggnccaagtgntggaatgtggcctagatattgatgatctcctgcatcattattncttatagctgccattggctcagaacttgctcagtgtgcctg

SEQ ID NO: 424008 - DNA, 180 bp, Homo Sapiens
  misc_feature (20)..(20): n is a, c, g, or t
  misc_feature (62)..(62): n is a, c, g, or t
  misc_feature (65)..(65): n is a, c, g, or t
  misc_feature (76)..(76): n is a, c, g, or t
  misc_feature (114)..(116): n is a, c, g, or t
  misc_feature (161)..(161): n is a, c, g, or t
accagccagaaacagttttnattctcaacaaagtaactacatcagtaacaggtatactcttngtntctccataatngaggtttctattgtacaggctacttaaaaaataatttnnnttaagatttttgggttctgaaatttcaggacacctaatggctgtncttgaataacacaagtatt

SEQ ID NO: 424009 - DNA, 322 bp, Homo Sapiens
  misc_feature (204)..(204): n is a, c, g, or t
  misc_feature (237)..(237): n is a, c, g, or t
gcaaagtttaggcttccagcctgacttcagttgatggattgtcaaaagaagggatctattatccctttattcttggaaccaccagtccctgccccaaacccttaaacccctagagagcactgcctcgtcctctagcctggggctcacacaacagtctgccactcaggctgctaggagattctccaatagcaggctcagcacctnaaactgcccaccacctctcctactgctcctctnccacccaccacccaaactcctcagtcctgtcatgtagcagagttccagtaactcaggaaaatggagaccaaggtcattccttaag

SEQ ID NO: 424010 - DNA, 262 bp, Homo Sapiens
  misc_feature (13)..(13): n is a, c, g, or t
  misc_feature (105)..(105): n is a, c, g, or t
  misc_feature (112)..(112): n is a, c, g, or t
  misc_feature (139)..(139): n is a, c, g, or t
  misc_feature (204)..(204): n is a, c, g, or t
acaacataccgcncaagctatgttgcataaagtttggaaggaatttcataacgtggttctctgaaactgtggaaacgaatgactttcaggattttacaggatggnatctgtnctattgtgttgaaaatcactgttacangacataaatttaactggaagaattatgtgtttgcatagtcactgttctgctgttccacatttttnaggagttatacatcacctttagttctgcaaaatggacagtggtatgagccaaaactca

SEQ ID NO: 424011 - DNA, 347 bp, Homo Sapiens
  misc_feature (78)..(78): n is a, c, g, or t
attttcaacacgagtaatataaaggtatctcaatctatatattaatatatactcttttaataaagaattgcccttggnctccagtgtttgtttgctcattcttatatttggcaaacatgtgtggatacatctattatgtgttaagtgcagtacaagggactgggcacatgaggatgtgcaagacagagttccccatttttaaggagttgatgttctcataaaggagaaaaaattaaaatggcacatgcagaaaaatagaaaaagtggtactgtagatatgagcacttaggaggatacctaagccagattgcagattttgtattttaatgttgttttttctttttcca

SEQ ID NO: 424012 - DNA, 273 bp, Homo Sapiens
  misc_feature (180)..(180): n is a, c, g, or t
caggctatttagatcctgcatcagacaggtcatcagaaaacatgaagctaaatgcagtaaagaattactctcttgaactcttgaaaatatcaaaaacatgaagctaaatgcagtaaagaattagtctcttgaactcttgaaaatatcattttcttatagaaatggtttaaaaatttcttntttattatttctaattttccttcagaaaattgtgagttttaacctacaacacatacactccaaggtaatgccactctaatgctgtctagttga

SEQ ID NO: 424013 - DNA, 360 bp, Homo Sapiens
agtctatattggtctgcacaaataaactaaaatgctttttaagttgttttatgatctatatagaagagatattgacaaacttctcctgcttagaaaataaaagggacacttggaattaacaaagggggttggtagatttaccattgaggttgatgaacttaatatatcatctggtaaaacaagcgtcaggaaatatccatcattcaaatgttttggctgacagcaaaatgctcaaggactaatcccacagctgaaatgtaggggaaaatttcccctacatttggctccttctggctcctacttggtctacacttttggaaggactgctgagattgtatccttggagtcagggcgagagtg

SEQ ID NO: 424014 - DNA, 161 bp, Homo Sapiens
  misc_feature (65)..(65): n is a, c, g, or t
acaaggaagttacctaactgtatctggcatcatcagagaataataaagtctcataaataactganttctttaagacaaacaatgtttttacctctgagggaaaaagctcctcctgttatataaccttttcgaatgaactttttaatgtatcccatattcct

SEQ ID NO: 424015 - DNA, 209 bp, Homo Sapiens
  misc_feature (58)..(58): n is a, c, g, or t
  misc_feature (113)..(113): n is a, c, g, or t
gtgcgcacctcgtatccacgctgcagtagttcggcgatcgcccagcgtgcgatgaatncgctaccgcccgtcaccagcacagtctcgctcatgcgactccctcaataattggnggttgtttctccgctttagggagcatagcaccaagcggagaaacaacctccgtttatttagcgtgatctcaggattagctggcaccatggtccaat

SEQ ID NO: 424016 - DNA, 320 bp, Homo Sapiens
  misc_feature (16)..(16): n is a, c, g, or t
  misc_feature (194)..(194): n is a, c, g, or t
attgcgcgtaattttntgaacaccccgcccagccatctgttcccggccgaattcgccaagcgggcaaaaactctggcgacgaccgagggcatcgaggtcgaggtgctcgacgagaaggaactggccaaggccggctacgcggcatcatcggagtcggcaagggctcctcacgcccaccgcggctggtgcgcctnacctaccggggcgccaagggcaagaaggccaagaaggtggcgctcgtgggcaagggcatcaccttcgacaccggtggtatctcgatcaagcccgcgggcggcatggagaacatgacctccgatatg

SEQ ID NO: 424017 - DNA, 313 bp, Homo Sapiens
  misc_feature (164)..(164): n is a, c, g, or t
aaagagaaatgtagactttactaaatatttcatagaggagacctaggaggaggttgacacagcacactgctcagcagatgacttaaaattttcccttagccatttttgttctctcaagtccctttcatccataccaccactgctgatttgttctttcttttttncttttaaatcttttctagctttccttctgacaaactttgctggagtcctactccttttctctccttcttgagaaaaatgcaaattttgctccatgttttggtatagcagggaagcttccatctttttttactgaagcataacatcaggg

SEQ ID NO: 424018 - DNA, 295 bp, Homo Sapiens
  misc_feature (59)..(59): n is a, c, g, or t
  misc_feature (100)..(160): n is a, c, g, or t
aaatggttatgccaatggcagaattagccatggtccatagtgactaattctgtttatgnttattagtcttatatgcttgtattcataattcaaagtcctnnnnnnnnnnnnnnnnnnnnnnnnnnnnnnnnnnnnnnnnnnnnnnnnnnnnnnnnnnnnngtttcagaactttgagctcaaagagagctacatgttcaagtgagctctgtgagacaaggcaaaatgccttcctcataatatcttaagccaggaatatgttctttgaatttacgacttcttaaaataggagtcaat

SEQ ID NO: 424019 - DNA, 368 bp, Homo Sapiens
  misc_feature (41)..(41): n is a, c, g, or t
gctatatttcacagacagcacaggtggggtttgtgtatttncccggaaaccctctgtctggggagatacagcctgacctgaccgggtcccccactgagcaggaggccgggtcgctgggaaggaggacaaacctgtattccatgactgggtctgtctcggagctggtaagcacatgtccgctctgtgatgagccctggtgggctccatccagaccctccttgtgatgtttttgtagattttctgcccttctgggtccaggcccccttcttctgctctggcaaaagtgtcttactcataatgataatgacaacgagaattcccacacctggcatttgtaaagcactttgctatttagaaacaaaaatttt

SEQ ID NO: 424020 - DNA, 270 bp, Homo Sapiens
ctgttccttgctgcaccaagcacccaggatgctgcctggtgctcaataagagatccctaaataatcattggttgaataaatggacataaggggtgctcaataagtgatggcttccattgttattctaaagtgtcctgagacagaaagcatttgaagttcatggttgttgagaaaggaaaggttcaaaagcaagtaatgtccagggttggcatggggctgtctgtctgccaggtgatgaagggtaccagggaaagctgggcttatctagac

SEQ ID NO: 424021 - DNA, 361 bp, Homo Sapiens
taaaaaacgggtttcgactctccagctcttccaggccaatgtggatttctagcttcttgagaatggttgatttagcttcccaagacctcagtggttttatgaaataccgcctcatttctccagaatgatttctacttaacaaaacacctccatgcactgtttaccgtgctcattgtgggaactgctctgatggggggatcagtccccatgatgtcacctcatgactcctgggtcacacagccgctatagatggtggcttgtctgcagaaagggtcccagttgagttttgttttgttcaatttcagtaaccatgcttgtatcacagtggggcccagtggctcctaaggtgagccttctcatt

SEQ ID NO: 424022 - DNA, 178 bp, Homo Sapiens
  misc_feature (128)..(128): n is a, c, g, or t
  misc_feature (159)..(159): n is a, c, g, or t
ttcatgctgaagaggaagatgtaaaggtgcacttgtgtagaaaaggtgaggaagcaagtgtcctatagagatacccaaacaccagcatttgttttattataaaccatcatatagattaaaataatctntaattgtgggcttgtgctattttaattatgnaataaggaatgtcttaagg

SEQ ID NO: 424023 - DNA, 294 bp, Homo Sapiens
gactagtgaagcattaacagaaatataatgtgcataaagcatttaagaagtcaaattaacttgatttaacttgacattctcagtcatttaagaaaaagtgttcatcccaaaatacactcgtaaatgtgactagcaaagagacctatttctatcaactcaactgtgttacagtcggatacaacttttactacaaaacatgtaaactggatacagtttccaaaggaatcacgttccacctacaggggaatttagctttaaaagtacagaatgaatgtttaataaatgccccataat

SEQ ID NO: 424024 - DNA, 269 bp, Homo Sapiens
  misc_feature (73)..(73): n is a, c, g, or t
atatataaggagatattttaatcaagagcacaaacaagaatatacaaaatgagaactgaaacagaatcttggntagcatccagggcttcatgctgattccatgacatggcagagtattattgtggtgatccttaatttaaaggggcaactgctgtccctaaagtgacactttgataaggaaatagtaacaagtctatccatatacatgattaaagatttctatcatttacatttcatagctgtgagctgaccattttcatgaaaatatt

SEQ ID NO: 424025 - DNA, 310 bp, Homo Sapiens
gggaaggaatgtttctcttatgttttctcctatatgcccccagattatttgattattgagtaatagttcacttttaagacttgaaagtagaaagcagaaaagttaggtgatttacccaaggtgacatagtttgtagagctacctacaaatgggactactccaatttggtgatttcctcatgcctgtaattttgtgaagtttctgttggtaaggagatcgacgccttagcacttgattcactgactcctgtatttaggaattttgtaacagcagatggattaatgaaaatcatgcagtaagtctataggaa

SEQ ID NO: 424026 - DNA, 299 bp, Homo Sapiens
atgagtgtcaccaacaattaaccagagctgctccctcccagtacaccatcccattctatgctccttctctgattctaagctagagtatttgtttccatctatcatcatgtttttctattgtttttcttgtaatagaaaaatattctatctctatcaagtatttgatctctacctaaaataaaaatagatggctagagctgcctgtttcttacacctggcccactaaggcatttcagccacctgccagaaggcatagaatttgaacagacactcagatgtatgcttcctaaatctgtttg

SEQ ID NO: 424027 - DNA, 103 bp, Homo Sapiens
tcaggaaaatctgtgaaatactttgaaaagagaacgaaagaaagattagtggatgtcctatctagcttatacttctggattatctctgcattgcattgtcttt

SEQ ID NO: 424028 - DNA, 157 bp, Homo Sapiens
aacctgttatatagtctcctgaatagttagccatggtgccttgatttaatcttatgtcattgttctcaaatgccatgatttctctttaatagtagttgtcattatgtaagggtaagttattgcccatttaattgtaattataagaagaggtgccagc

SEQ ID NO: 424029 - DNA, 209 bp, Homo Sapiens
  misc_feature (56)..(56): n is a, c, g, or t
  misc_feature (105)..(105): n is a, c, g, or t
  misc_feature (115)..(115): n is a, c, g, or t
  misc_feature (124)..(124): n is a, c, g, or t
aagtggtatattgtgaactttaaacaagcagcctactcaaaacaagtatggatgantttaaagaaaaggcataaattgaactaccagcagacctgaatggaaagnttattaatgntcatttttncagtgataataaacaagcttcaggaaatgaagcttcagggaaagggaactttttatgaagctataccccctacctcactatagaa

SEQ ID NO: 424030 - DNA, 319 bp, Homo Sapiens
acaattgtcagcagaaccccatcaggcatttgtcttctcactgagccttgcagcaaaccacacagctgtctataacctatctgttcccagattcaagaacacaagctgctcatcagttgggtgcaggatccactctagtacaaaagctgtgtgtctcaaggcataattccttatgattacttcatagctctgcttttgtcttgagacaaaagaaatttccttcaattcctacttttgctgagatattgttttttgaaaagcaattaaatcttgtcaatcacttttcccacctctttgagatacttacatggcttttctt

SEQ ID NO: 424031 - DNA, 365 bp, Homo Sapiens
cacgttgcaattcttttattaagctctcagcgctgtaggaaacacgtgttcttagacaaactgtattcaaaattggcaaagccataaacactgactttttaaaactacacaataggatatggggtgtaagaggagttacatgtgttcccgctcccaccaccacctccccacttggtgggtttagggtggaccacaagactccccagagggcaatttgaggtggaataaatggaggcagtggtttttgtactctggttttgtgtatgaattattgatttgccctttagttaaccccgcttttctccgcctggtgtcccacccaggaccatctttcttcccatctggactggtagtggctggggcaa

SEQ ID NO: 424032 - DNA, 359 bp, Homo Sapiens
  misc_feature (111)..(111): n is a, c, g, or t
cactgggaaaacagattatgacaggaccacagaccacaatataaaaacttggcagttctttggtgtgatatattttaattagtatttgcaaataatcagagttacttgtgnacataaacgtgtgtttcacaactatggccagatgcaaccttttggtctgtttcaggaaaagacctattattccactaacaattatgctgccttagaaacataatgggagtgtaattgaagaaagcatgtctcagaaggttttgatatgcagaactggaagctattgtaattcctacatacatttccattagctatgccttatgtaatgtgagtgcagatttttacaacttagagttcccatcagtggt

SEQ ID NO: 424033 - DNA, 189 bp, Homo Sapiens
  misc_feature (73)..(73): n is a, c, g, or t
  misc_feature (78)..(78): n is a, c, g, or t
  misc_feature (84)..(84): n is a, c, g, or t
acttttggcagattttcttagagctgactcagtagcacaagggtgagtgttgggactgagatccacaggctgnctgtnagactnagcatatccctttacgattctggagctacactttgggagctctaaaataagaggaagtgcaccaaatagtttcttaggttcctccagtgcgcacggcgcgcattg

SEQ ID NO: 424034 - DNA, 239 bp, Homo Sapiens
  misc_feature (133)..(133): n is a, c, g, or t
  misc_feature (198)..(198): n is a, c, g, or t
atttggtttttaaaaatattttatgttgaatgttagctggaactggagatccactttacccccacagctctggttcagcttgacccttatgttgtgcaatgctttgtgtttgggttggtatttcctgggactngtcaggtgatgcacttcagcatgaggcctgtgtagtagctgaagagtagtgacccaaggtgtctntcagtgataagaggagagaagaagcccgtttagctctggac

SEQ ID NO: 424035 - DNA, 341 bp, Homo Sapiens
  misc_feature (37)..(37): n is a, c, g, or t
  misc_feature (185)..(185): n is a, c, g, or t
  misc_feature (245)..(245): n is a, c, g, or t
tggcacgagggctgaagctgctgattggcaaagaagntgagtcaccgaagagtgataatcccaggcagtacagaatgagctcagctgaggttgtgcaatgggttgtgaatgacgatgaagttgtggatcacctctggttctgagacactctgttcttggtgttcagttggacaaaacccaaactnttttcctccaggtagctcacatcacaaagggacagtgtgggcctggagaagctaactctnagaggctcccttccatgaggaagacaactcatggtggtagtgggtccctcaaagagatcacaagagacttccccagtaactttcttcctaagcata

SEQ ID NO: 424036 - DNA, 236 bp, Homo Sapiens
  misc_feature (111)..(111): n is a, c, g, or t
  misc_feature (195)..(195): n is a, c, g, or t
  misc_feature (226)..(226): n is a, c, g, or t
aaaataagtgtacttaataggtttaaacaaaaaggaagtttgaaaatagaagaaaggaacaagagtctataaaaaacaactgagtagatttgaaatcaaaatacttctttntttttcttcccagctagatattatgtccttgaagacacagggatcaggctaaacactatatgttatcgtttgtcaattgaaggnagttagaaacaaagtactcaattttttttgnaacccagcag

SEQ ID NO: 424037 - DNA, 101 bp, Homo Sapiens
attgctaatcagctcaaaactcagaagagagactggtagagcaatcttagagcaaggcgtagttgaaggctaaataaacttggaggaccaaatggaccagg

SEQ ID NO: 424038 - DNA, 318 bp, Homo Sapiens
  misc_feature (24)..(24): n is a, c, g, or t
  misc_feature (32)..(32): n is a, c, g, or t
  misc_feature (36)..(36): n is a, c, g, or t
  misc_feature (79)..(79): n is a, c, g, or t
taacttccagagattctgaaattnaggtgaancagnttgtaactttaaactcatgcacgatgttctccttccatatgtnaactcctacataaatcagaccacttcacagagtctgtccctgccgatgccagtccacactggcaactggtaaactaaaggaatacctcacaatgtggcactcaactctacatcctctggtagtccccttgctctccaacaaggcttgtgctttccacatttccatgagcagagctgggtatacagacggtttgtaatgttgagcttcacatgcctaatcatttaactgttctttatggt

SEQ ID NO: 424039 - DNA, 330 bp, Homo Sapiens
ggactcaaaaaagctttattctagtcataaaaccaagatatgttctgaaataaatacaacgtaagactatatggggagcactatgtattacataagttaacatactgtattttttagatcagctgaactaaggaatatgcttagtaatgcagtcaatttacattctggctcaggtttcttgtctcattgcagacaggtaacaagggcttctcagactaagcccagtccatgggctacactttatcactggtctaaagtgtaatgagagaaagaggtaaggtggcatgagatgtggttatacaggtaggcagggaaccatacaaagcccaa

SEQ ID NO: 424040 - DNA, 374 bp, Homo Sapiens
  misc_feature (271)..(271): n is a, c, g, or t
  misc_feature (294)..(294): n is a, c, g, or t
aatttccttgcaatgtattattcttattcttaattctctacattggaatttggctttacgtcgttagcaaatttataaagggttataaagctatgattcgtgagtctaaaatcaaatgcaaaattttatttattatgtaaaccaaaatgtcatttgcaagttttctcattagaagttatccttgcaaagatagaaaaagaagaattaatttgtgtaaacaagcacaaattaacatatttgttaataaataggtttatctactaataaaccnatttctagacacattcaaattgntaatgatttttagaaatgttaaggttccaaggagtcttacaagtgtatgcccttgatttcctgaaggaaaccactttctt

SEQ ID NO: 424041 - DNA, 366 bp, Homo Sapiens
aattacttctccattagaggacttgttcagagtccagatatatcttagtttcatccaaaatggaatctgtaattcagttccttattctccttgtttgggagtgacttctgactaacagaaatggatagaaaactgcccttcatttctccttccttcaactttttttgggtttacttctacgttctttttctagtaacaaatacctactcaacaccaactggccccagacactatttcagatgactgggatacatcagtgagcaaaacaggtaaaaccctgcccctgttgagctcacactagcaagtcccactactctttcccctatgatccatgaaatatttaaatgccttctctggcttccaggc

SEQ ID NO: 424042 - DNA, 339 bp, Homo Sapiens
  misc_feature (79)..(79): n is a, c, g, or t
  misc_feature (121)..(121): n is a, c, g, or t
  misc_feature (123)..(123): n is a, c, g, or t
  misc_feature (143)..(143): n is a, c, g, or t
  misc_feature (258)..(258): n is a, c, g, or t
  misc_feature (267)..(267): n is a, c, g, or t
ctgaactctttcagcaagggcaatggctcaatgtgattcggtgctggagctcagctgggactcagtaaatctgcacgtnctctgctggtcagaacatgtttcctggagagcattgcttttntntctagaagttcgttacctcntgcatgatagtgggatattgagatgtgggttctaagatccacagactcatacttttgtgaactttggaatgtggtagggtacactgaaccaagtcagaaaatagtgaaatatttncttgcctcnttcagttcatcactaagaaagtgtgtaggcagagaaaacttacttatggtttgaagaaccacaattgttttt

SEQ ID NO: 424043 - DNA, 318 bp, Homo Sapiens
  misc_feature (101)..(101): n is a, c, g, or t
  misc_feature (225)..(225): n is a, c, g, or t
cagtatttccaacaagcatttatttgtatggaaatacatattcagaaaggccattggggtcagataaatatgtcctagtgcaaacatacacatgtattttncaatagtagagatagaggactatttgagagctataaaaggaagtggaggaagaaagcgaacccagccagatttgttttatttcctgtactccataccactgataaatggagaggcaaatatganctgagctgatgagtggataccaatggcaagtctactttcatcttgaggttttgaaatttgcactgcttagacacagctctgtggcaggttgaa

SEQ ID NO: 424044 - DNA, 349 bp, Homo Sapiens
  misc_feature (65)..(65): n is a, c, g, or t
  misc_feature (80)..(81): n is a, c, g, or t
  misc_feature (123)..(123): n is a, c, g, or t
  misc_feature (128)..(128): n is a, c, g, or t
ggagactagtctgtctcagactgatgctgttctcactgatttgaatatttctgggaaattggatnctacagtcacaaatnngaacagtaagcctatagaagtttttcagggagtaaatatttnctatngcagtgtcctgaattggttctcccttgcaagactgaactgtaggaacttagtcctagtttatgatacagccaagtaacatagtcacatgggaaaaagagcttgagtcagatttcttaatgtgtgttgttaacttggtagaacattgagaattatttaagtcagagaacgatctgttactggggcagaaattctcaaccttttcagttctccaaaatttaag

SEQ ID NO: 424045 - DNA, 320 bp, Homo Sapiens
  misc_feature (75)..(75): n is a, c, g, or t
  misc_feature (226)..(226): n is a, c, g, or t
cgctgcctccgtgaaccgctggcatgaagcgcggcctccgccttgacactaagtcaatgggcccgcctacttctncctcgcggcgtcccaggcagatagctggttattcaggtttcgttggaagaaatacgttctcgtccccctgaaaggcccagtccagtcaggtgatggactcctccctgaaactgcacgaggtcacctctcctatccccgtattccgtttggntccttatgccaacgtgttaggaaggccccctctggttgggttttgtactgtctctagcatttgacactttaattatttaaacaccaccaaatga

SEQ ID NO: 424046 - DNA, 250 bp, Homo Sapiens
  misc_feature (135)..(135): n is a, c, g, or t
  misc_feature (192)..(192): n is a, c, g, or t
  misc_feature (205)..(205): n is a, c, g, or t
  misc_feature (224)..(224): n is a, c, g, or t
cagaacaaggagcaattttattttaaaacccaacttgaacaggatagatagacctgtgatctcatgtcggagcagaggtgacagttcctgtcccacagcaccatgcctgccgacaccttcaccacccggctcctntcctcacacccatgggcccatgtgacctcacatttggaggggtctggcagtcacagntgcaagctacctnttcccgacaccagtccccngggctggtgaccctccctcacatcca

SEQ ID NO: 424047 - DNA, 294 bp, Homo Sapiens
  misc_feature (176)..(176): n is a, c, g, or t
ccatacaggcatacgtcaggttttgttccagaccaccacaacaaaagtattgcaataaaacgagtcacactaactttgtggtgtcccagtgcatataagttatgtttacactgcactatactgtagtctattaagtgtgtaacagcactatgtctaaagaaatgtatataccttantttaaaaatacttgactgccaaaaaaggctaagggtcatctgagccctcagcaagttgttatctttttgctggcagaaggtcttctcttgacgttgatggctgctgagtgatcagggt

SEQ ID NO: 424048 - DNA, 160 bp, Homo Sapiens
  misc_feature (32)..(32): n is a, c, g, or t
  misc_feature (90)..(90): n is a, c, g, or t
  misc_feature (95)..(95): n is a, c, g, or t
caagacctgagctgaactgctttagtattttnagttgcttttataccaacttggtacatttttattgcatttaacattcctatgtaagtnattgnagtattaatgtttgtggctttttcatgctgaggatgtaaggtaatacatagtatacatactgtat

SEQ ID NO: 424049 - DNA, 313 bp, Homo Sapiens
aattcctcaaggatgagtttatttcacatgtcacccagcacgcaactgaacacatcacagaaaccaaatacttactaaattagtgtgcattgctttacaaggaaaagtcaataaaatggcatagtgaatatatcattggacttgaagtcagtgttcatctgaaaatgggaacaataatcatgacaataccattcagataatcatattctgaaaattaaatacattgtattacaatgagtttgtaaattctacagtaatgttatctataatactttccaaaagactgctctctgatctaatacaatagaaattt

SEQ ID NO: 424050 - DNA, 329 bp, Homo Sapiens
aagagatgaggtctcactatattgcccaggctggtttcaaactcctgggttcaagtgatcttcccgcctctgcctcctgaagtgctaggattataggcgagagcactgtgcccagccattgtaatacagtcttttgtttgaaatgcaaatgttagtgggccaaaaggacagtgttattaatatccctattctatgaagatgtctgttctaaaactgttttagtgatgctctataacagaatcaactatatccattaatcccatggtgttgataaatgaactagtccagctcttcccagtggttaatagatgttaacagcactgtaaatc

SEQ ID NO: 424051 - DNA, 305 bp, Homo Sapiens
  misc_feature (88)..(88): n is a, c, g, or t
  misc_feature (199)..(199): n is a, c, g, or t
aagttggtgcagttatggtcccataggaactgctagacttgggcttttctctggcacagaccaatttatcaaacagcaaagccatggnttttggagccaactgaaactggaatcaaatttaccgacccctggcaaatggaacacccatgtgtcactttgagagcctagtgcactgtttctaaactgtccaaacccacgngcttatgcagccttgtgttctctgctgggctaagagtggaacatccacctgcacatccatttgaagtggacctttcagcatttgggaacctccttcatattcccaa

SEQ ID NO: 424052 - DNA, 290 bp, Homo Sapiens
  misc_feature (168)..(168): n is a, c, g, or t
  misc_feature (197)..(197): n is a, c, g, or t
  misc_feature (268)..(268): n is a, c, g, or t
gtcacccatgtctggtctcattcctgttgcagtgaacttcgagttccacagactttgcatgctggcttctctaaccctgtgtgctgcgtgtgcctgtttctcatctcttattctttttaaaattcatgcttaactactgtgggagaataactgtaaacagctttaatnaaatcatacttataaaaaactattttctnatattccactctatgcttttggtattgttgatctttacaaattaaatggtctttgataatggatctatttngtattgccttattaagaccaaa

SEQ ID NO: 424053 - DNA, 326 bp, Homo Sapiens
  misc_feature (79)..(111): n is a, c, g, or t
agtaatggggatttattttagtctcaggggaggcatcatagaaaaaaaccctcagccagaagttaggacattgtgattnnnnnnnnnnnnnnnnnnnnnnnnnnnnnnnnnctaggcctctgcaggctctggttgtttcatttgcaaaataaaacccagaccgggtcatctttcagttcccttccagctctattattttatgatttgctcttagtctttatgagccatgtatgatttatcagtctccctgatgcactcaactccaatgatgcaaaagcattgtaaagagctgaattttgactatgttttcacaatgtcagaataac

SEQ ID NO: 424054 - DNA, 319 bp, Homo Sapiens
  misc_feature (175)..(175): n is a, c, g, or t
  misc_feature (263)..(263): n is a, c, g, or t
ccagcttgtaattcccactgcccaagaatcaatgcactgcatctattctaggtatcatgccagctgttcaaaggatggaatacatgatatattagccaagcaatggtatgttaaaaaaagaacggttactacaacagcttggaaaaagtgttaaaactggtttatcatgatagtnctagtttttgaacaaaatataatctaccaaatgcaaatcaggctagtcctatgttcaaagctctttagcaagtagagttgctgagagnattttgaatgagttattatccagctacagaaggggattacagtcaagtagcttcaa

SEQ ID NO: 424055 - DNA, 319 bp, Homo Sapiens
  misc_feature (52)..(52): n is a, c, g, or t
ctgggcttcgatggaaaaggttgccaagcctggtctagagtctaagcatgtnagggaaacttggaaagccttgtactgattttcacatataccttattttagagcctttatttgtcatatgcccacaaatattggcaatctgtgtgtacatgccggccataacttgtaaacatagaaccaaattctgccctgtggacaaactttcctttgatttcatgtgttgataatttgagtaacgtgtatgcatattgtttaactaaaatttaattttggctcatgtatcataatacatttccaatggaaactttcaaattaatgt

SEQ ID NO: 424056 - DNA, 235 bp, Homo Sapiens
  misc_feature (62)..(62): n is a, c, g, or t
  misc_feature (212)..(212): n is a, c, g, or t
  misc_feature (223)..(223): n is a, c, g, or t
atattatggtagataactggatagtactttttaactttctgagtctgtacagtctaatcttnctgaatgtttgggctgtttaatttctttaaagatgataaatattagccggtcatccatcatgctctatctataggctataccattcatattttgggcaatgctgtattataaaacacatgtaaacatgtatgtaacccatgtttaacccngcgtagttgtngcatgtggttgt

SEQ ID NO: 424057 - DNA, 299 bp, Homo Sapiens
  misc_feature (86)..(86): n is a, c, g, or t
tggcacgaggcaaaatattttataatgcacagcaagctttatccaccaatgctgtaagtggacctgttctttgctccaaagggagncatatctctgtttccccaggcttttccctaatacgagcatccttgaaaagatagtctgtaacaaagacagtcaggatttctgctcacaagcctttcagaaatgcaagagacacatgaagaattgtctctcaacagtatgtcttatagagaacttgctttcattgcagtttatttcctcaataattttactgatctttattgctagtgcttcca

SEQ ID NO: 424058 - DNA, 361 bp, Homo Sapiens
  misc_feature (150)..(151): n is a, c, g, or t
gggactgccattcacagataaatagaacactgtaatacaactgaataaggagaatgtttagagaaagatagtctgactaatgataagcatttatgttgcttaaaataatttattattaaaaggtatccatgaatcaattctgtacttggnnattcacttacacactttaaaataccattcaagatttcagacagaaccattacccattttcttctgcacatgagaatgcttaagaacatgctagtctcaaaccacaaaagagtttgcagtttgaagcctcatctgagttatccaagacagcagccacttgctctatgtgtctatttaagtttaaattggattaaaattaaattaaattgaa

SEQ ID NO: 424059 - DNA, 370 bp, Homo Sapiens
  misc_feature (147)..(147): n is a, c, g, or t
aactgttaaactgtcctgtaatttacagatgtggtcatcaggcactggttttcattttgcaaatctgatttgcttgtgcctagagtggttaagagcagatcatcagttttatagttcagcagatttataccggaatttgtgatcgcnctcatatctaatagtattcacaaggtggcagtatttctgaattcggaagaataaagctgagagatgccaagtttgcagattttcattaaagaaatttaaagagaagattggataaaagatgacgagatcaaggataggtagaaataattatttaatttacatttgataaggttcttattagttaccctcagttttctaacttcattctttaccttcatactaa

SEQ ID NO: 424060 - DNA, 190 bp, Homo Sapiens
  misc_feature (110)..(110): n is a, c, g, or t
  misc_feature (120)..(120): n is a, c, g, or t
  misc_feature (166)..(166): n is a, c, g, or t
attagtgtccagtggaagggtttacagccatagtgaggttcccccattgctcagtaccagaagtttgagtacggtcgtttaaaaaatacttatctgaccacagtggaaanttaaacaggngtgaaggcaaaggagtagaaaaactacaactttgtctccccctgtnttaaaattgtaagcctaagcaaga

SEQ ID NO: 424061 - DNA, 291 bp, Homo Sapiens
ggccactcttacctctgtgataggctatgatgtaaccttagagcataaaagcaataagcgaagtagtaaagagagatctttgaaataagtattgttgaaagagactaggatgatgcatgttttaacactgatcccaaagcatcactctgctttcgaaaataacatcattcaagccttgctatctcttgattggatgatgagtggtggcaatggttttctccatctctcttcctgtgctaaagattaaatgtggccatagcagtggatcagtgcacactgcacatgagtgct

SEQ ID NO: 424062 - DNA, 303 bp, Homo Sapiens
gctttatatgagcttttatatttcacagaatggtgactttgcatatgccctggtgcattgtgggagctgctattgtcacgactaagacatttcttttggggtatccatctagccccagcctcgaaaggatggaagcagggcctccttgcaggaggtcatgttgtccattcgtctgctttcatacaagctggtccaaagaaagagttctctttcgtttggaacatctgttgggttggaagtccttccccaaatctatctgagtccttcttgctgcagagaaagccttcctgtgacctcatcctt

SEQ ID NO: 424063 - DNA, 216 bp, Homo Sapiens
  misc_feature (140)..(140): n is a, c, g, or t
tcacacgagttgcctggcccataggggggtcttatgtgggtgagggaggggggctcctgttgagcagtgagtggatgagtcagggcagctctttcctctagccatcagcaacctctgccagacctttgcacggaggcttnggggaaacccatcaaggccacagtcctggacaggacctgggagagtgggtaagagagggtgcaaggacaggtgcct

SEQ ID NO: 424064 - DNA, 180 bp, Homo Sapiens
caggtgacaggtggggccacaaacctcaaggcaggagtgcgggaggaagcacagcacctgggaccactggcagacccgtcccctgcctcggagatgcctgtccctcccgctgagatcaccgcccgcctgccctagcactgacgcactgaccacgttgctgtcctcagggcaacctgtctc

SEQ ID NO: 424065 - DNA, 214 bp, Homo Sapiens
  misc_feature (63)..(63): n is a, c, g, or t
taggaaatggctattttgagcaatatgcaggaaagagatattcatttggtgttgaaaaatagntcatatttttatgaaaaactacactctccagaccattgtagcaaacctcctgacattgagattggaggacatttcagggccaaagttgctaaagaaaaattctctgtttcaaactcaaaaattacggtgtttcagatagcatgtgcctcaa

SEQ ID NO: 424066 - DNA, 291 bp, Homo Sapiens
  misc_feature (31)..(31): n is a, c, g, or t
  misc_feature (100)..(100): n is a, c, g, or t
aaacacaaatatctttaatcaaatcatgggnttcacttaacctgagaaatgccacctttcactcaaacagaattattatttgcaaatccacagtggtctncccttgttgtctcatcttaaagacgggacggggagttttgacgtactgtgacatttccttgacattccttatttccaggaaaacctcatgtcactgtctcgagacactagcttgcacctttgcaactgcttgtaatattcagacagggcactgaagacgaagcctgggctccgtttgggaaggagagttac

SEQ ID NO: 424067 - DNA, 290 bp, Homo Sapiens
  misc_feature (48)..(48): n is a, c, g, or t
  misc_feature (267)..(267): n is a, c, g, or t
agcttataggtctcctgttgcagtggaagaagtcgtctcctctggaanttcaaaaccttaggcctgtctatacttactttgggtacatttacattacgttatagtttgagaatcaccaaggtgaaattttaacattaaaactaaccccaaggcacctggtagaagcagcacagtataaatttctgcttacattctcaattgagacctaacagtgctcccactgaaagagtccaactaaacttgaacccctgtgctgactttgcaaantgagaccctcaatggctttagat

SEQ ID NO: 424068 - DNA, 174 bp, Homo Sapiens
gtattactcttttaggatgaatcttactgtgacctctctgtccttgtgagaaagggtctttatttctccttttgacagttcatctagttccttttggtatactattcaaccgtctgtttttataaggaaaattcttaaggttttttcacaaacactggtaacattggatgtaat

SEQ ID NO: 424069 - DNA, 326 bp, Homo Sapiens
  misc_feature (142)..(142): n is a, c, g, or t
ctgagcaggtttcaacagtgggcttaaagtattcagtaaactgagctataaacagatatgctgtcatccaggctttgtttttccgtttatagagcacaggcagagtagattcagcataattcttaagggccctaggattttnagaatggtaaatgagcttctgcttaccatcaccagctgaattagccctaaagggagagttaacttgtcctttgcagctttgaagccaggcattgacttctcttctctagctatgaaagtccttggtggcatcttctttcaatagaaggcagtttcatctacactgaaaatctgttgtttagtgt

SEQ ID NO: 424070 - DNA, 270 bp, Homo Sapiens
  misc_feature (91)..(91): n is a, c, g, or t
  misc_feature (99)..(99): n is a, c, g, or t
tgcacagttcattctaacaggaacaaaaggctcaaggggggcaagaaatgaggctgtatggaaagagattcaatgtaagcactttataaantagattantttctgattcaatgaagcatttcttgatcattgtgtacaaggcactacatgcatcatggaaaattcattaggatgcattgccagcactttgcagaactgatattattcagcctcaagctttccagtggccaaagggaaatgctgactgcttttcatatatttgagtcaaag

SEQ ID NO: 424071 - DNA, 289 bp, Homo Sapiens
  misc_feature (54)..(54): n is a, c, g, or t
  misc_feature (273)..(273): n is a, c, g, or t
ttatctctgacctttcttcctcttccctcaacccacagtctatgcaacaaggtncagccagatgaagcctgtagccaggtagaactgtggtaatatcacctcctgactttgatccgttttatctctaagcatttcacaacctggtagcaaatcctgggttaatcttacaagggtgtttacattggttgacagaaatgggaatacctccatataacctgtcatggacttggtatcctggcttcagagattctccagggtcctcggatcaaaggnctgaaaaaaatggcac

SEQ ID NO: 424072 - DNA, 212 bp, Homo Sapiens
  misc_feature (192)..(192): n is a, c, g, or t
actgttagagctcctttttactttactaccattagaacttactacttaatgaattaataagaaattgcacatatgtccattttccaattttaaatatttagacaactgtatacattgaatttagttggttgttagattcaattaaattttaaaagttttggtgactatctttcaaaatgattgatttctttngtttgtttgtccttttgaga

SEQ ID NO: 424073 - DNA, 328 bp, Homo Sapiens
  misc_feature (76)..(76): n is a, c, g, or t
  misc_feature (221)..(221): n is a, c, g, or t
ggagcaattgacattcgctgaggattggcaaagaagcttttcaaatgtaacctggacagtagtactctagtagtcntcacagcaaaccatttagcaaatggtgacgctaccatcacagcttcacaaacaaggaaataatcaagctgacaatgcttcttgaaaaccccaaagctcgggttggtagagcacaccgggtttcttcttcagagctttatttgcgncactgtattcaataaattaattttgacactgattttctactttctactttttgattgttctcatttgtttccacttcatactatgattgttaaaaagtacgcacatg

SEQ ID NO: 424074 - DNA, 298 bp, Homo Sapiens
  misc_feature (13)..(13): n is a, c, g, or t
  misc_feature (56)..(56): n is a, c, g, or t
  misc_feature (118)..(118): n is a, c, g, or t
  misc_feature (122)..(122): n is a, c, g, or t
aagcaagggagtnttgtgatcagagttctattttaggaagagagtactgccaacantgttaagaaatggattagagagaagcaagactgtaagtagaaagacacataagacttttgantctntcaaggtgaaggtgtcaaattgacattcagaaccaggtgaggggtgggcaggcagttttaggtctcacttcattttcttagcccaagctatagaaagggttgagattgtatgaggagatgagagagcaagaagaaaaggctataatggaaccatggagaagccagaagagtggtgt

SEQ ID NO: 424075 - DNA, 285 bp, Homo Sapiens
  misc_feature (106)..(106): n is a, c, g, or t
  misc_feature (108)..(108): n is a, c, g, or t
  misc_feature (261)..(261): n is a, c, g, or t
gtttgtttatttaaataaggaatgaatgttgccttgaatctcaaaaatgataacttatttccagtctggtaggcagagtaaaataagtcacatgtttttgaatttnanctgagagtttcattctgttttgaatttttaaacatgaccttcagagagtgaaaagttcaaacaaattcatttaatctcagcccaacagttagatattaatatacctccaataattttactaatactaatcctgtgtatttctttgtaaaaagnaataaacttctttatatatatacg

SEQ ID NO: 424076 - DNA, 174 bp, Homo Sapiens
taaatagaaagcagcatttaagaaatatctgagctcctatgatttttttcctccaaaactgcctcttcttttcattaagtatcttctcattaaataccactattcatccatcttattaagtgcaggccccattctaggtgccaagaacacaatgcacatcaaagggagccgggg

SEQ ID NO: 424077 - DNA, 309 bp, Homo Sapiens
  misc_feature (133)..(133): n is a, c, g, or t
gcccatgtaggtgtttatctgggtctcattgttcactccatgacaatccagattttttctcagtgggtagcagaggatagagagaagagtggaagcacttcgtattatatcacaataaaatccactgaaccantacccttcaacttgctgaaaaccattagacaggaccccaagccccaagagtctgtctaaaaatgtaaccccttccaaatgtctcctgctcttctcatgggagctcttagttcaggacacctgagatttcctgtcaaaggaattagcttaagggggtgctcaaggcaggaggacacg

SEQ ID NO: 424078 - DNA, 271 bp, Homo Sapiens
cttttcagtctttatttgattggccccatctgcattatttcatactggttgcaattgtcccttctttctttggggaccacacattcctggtccttttccttcttcctgatgattccttcttagtcaattttgttggtccttttatcagcttacagcctttgtattcctaaatgttctattctttgattactatttcttttatttacatgttcttcctgtcgtagttcatccactcccatggctttaggagcatgattccaaatcttagttt

SEQ ID NO: 424079 - DNA, 285 bp, Homo Sapiens
  misc_feature (45)..(45): n is a, c, g, or t
  misc_feature (99)..(99): n is a, c, g, or t
  misc_feature (133)..(133): n is a, c, g, or t
ccactgcccaccaactgtaatgcctgactcagtgagaaccctctnacttgctctatgtttacccagtgattgccaggaccaggtgagaacaagcttgtnaccgttttctattactctattaggaacgatcttnatctcatctttctcttctttaacctgtaggtgttcacattggtaggaatgcaccactgaaatcatcttgaggatgcctgaggtccacatggccagctaggttctcctgttatcagggaaggcagcttgaggcttttgcagctctactccaac

SEQ ID NO: 424080 - DNA, 360 bp, Homo Sapiens
  misc_feature (168)..(168): n is a, c, g, or t
gctggatccatcaatccgggttaccaggatctgttttctagttgtggcttcattttcagacaagttgtttccatatgatagcctcatagaaggtactaccagcttagtcctagcaagaaaaaagagtacttactcttcaatatttgcagcagaagtcccaggtctgtncttatgagggcagtttgagtcacttgctcttctctgaacgtggagaaggcactgtttagatgatggaggttggattcaggtgcatcccctggaatggggtttggcattagcttcacgtggtctagaataaaggggttctccaaaggaaaattagggtaggaatgctgagtaagcagaacaaacagatgtcta

SEQ ID NO: 424081 - DNA, 266 bp, Homo Sapiens
  misc_feature (22)..(22): n is a, c, g, or t
  misc_feature (53)..(53): n is a, c, g, or t
  misc_feature (89)..(89): n is a, c, g, or t
  misc_feature (133)..(133): n is a, c, g, or t
  misc_feature (165)..(165): n is a, c, g, or t
  misc_feature (183)..(183): n is a, c, g, or t
  misc_feature (186)..(186): n is a, c, g, or t
  misc_feature (197)..(197): n is a, c, g, or t
  misc_feature (204)..(204): n is a, c, g, or t
  misc_feature (230)..(230): n is a, c, g, or t
ctgggaatcagttgattcctantaatctataattacagtgagcaacataattntaaatattaaactaacaagtactgggaaaacctgtntctactttctgtggtttgcttatcaaattaatcctacaattttnatcccgttatacagttctcaaggtacacagantgactcaaaatgaactanggntatcatacctngtatggnattggtccacagcttgcaaacttaangcccatgggccaagtcttgtccatataggtggctgg

SEQ ID NO: 424082 - DNA, 226 bp, Homo Sapiens
  misc_feature (27)..(27): n is a, c, g, or t
  misc_feature (29)..(29): n is a, c, g, or t
  misc_feature (58)..(58): n is a, c, g, or t
  misc_feature (86)..(86): n is a, c, g, or t
  misc_feature (108)..(108): n is a, c, g, or t
  misc_feature (120)..(121): n is a, c, g, or t
  misc_feature (153)..(153): n is a, c, g, or t
  misc_feature (195)..(195): n is a, c, g, or t
atgtaatcttaacccactgcagccttnanttcgcagcctcaagtgttcctcccacctnagcctcccaaatagctaggactacaggnatgccccaccacaccctgctantttttgtatttnnggtagagcagggttttgccatgttgcccaggntggtctttaactcctgaccttgaacagtctgcctgccccaanttcccaaagtgctgaggtaacaggcatgagc

SEQ ID NO: 424083 - DNA, 358 bp, Homo Sapiens
  misc_feature (186)..(186): n is a, c, g, or t
  misc_feature (299)..(299): n is a, c, g, or t
  misc_feature (326)..(326): n is a, c, g, or t
aatattttgtattaagacatgatttaaaatgtctttctacccttatctcctctaaactgcaactgaagttcaattcttcatcattagtattttaactctggcaaaggttatagaaagaaaaatggaaatatggtaggcctgtggtattcttaaaagctaagtcattagaactatgcagatccccangtttaaaagtacaattacagcaccagtagttagctttctagctgggggagaagacaggagatttttcttccacagatgtttattttgcttcctgataggtactgcagcaaagncatgttgatgtgtagatgcatgacttnctcactaagctgctgcacaccagctttgcctg

SEQ ID NO: 424084 - DNA, 339 bp, Homo Sapiens
tgtttaagctactcccagtcaatttcaaataaacagtagcagagttcgtttaagacgactgccattgctaacacagctgaatgaaatcagaggtctctttgtgggctcccagtagatccaggccctgtaggaccagttcacttgtccactgtagctaagtagatcatacaaaagggccaaatgaacagatctaccagataggaatatgatgaagtggcctgtggagaccgctgccacagtcactgtgtcatgccttctgtataccccagcccaattctaaaggagctttgcaagctgactcatctcacagtattgctgtgtttaatcataattggtctc

SEQ ID NO: 424085 - DNA, 165 bp, Homo Sapiens
gatagtctttagaaaataaaatctgtgacactttaatcatttcattaagactgaagaaattaggagagactgaggataagtggttttccattttttttccctgggtcagccttggatacaggtgaattgactgaatggtgctagtaaaatggaagtaaaatcaca

SEQ ID NO: 424086 - DNA, 315 bp, Homo Sapiens
  misc_feature (77)..(77): n is a, c, g, or t
gtttgccctttagctaactgtctgcaagtgccagtaacctccgcttggtcagagggtcagctccagtttgaggctgnagcctgggacccagaagagcagtatctcagggcagcataaatggtttgcatctatcctagcgggacctcaccgatgctatgtcctaactactgagctacccatccagatttgacgagagatagtcacaaagaagtgtgcatttaccccacggccctgctgttttcccctgtagttctttaaaacatccatgggcattagaaggttctgtgatagctttacttatctaacaaagctgga

SEQ ID NO: 424087 - DNA, 250 bp, Homo Sapiens
tacaattaattttgtgccaaccttgctacattaaagttagggaaggcagctgtcatcagattttcaggtaattttaagattaatgactacagacaagtttagtagtagtcatttatttaatagtcaatgagacccctttcagaaaaccgtattgcaacatgcaatctattttaataaatatacacttagaatatggctgtatatacacatacctacacagccctacacatatacaaacttacacaaatat

SEQ ID NO: 424088 - DNA, 354 bp, Homo Sapiens
aaagttttaaggtatatgaagtgtattatgacaggtagctataaaggcgtataagtgtattattatttaaggtgtataagtgtattatgaaagaggtatattatgacaggtagctataaagaaatcggttttttgataggaggctgccaaagaaagaatctcacatttccattccgtgtacaggatgtttccatttcaacctttgggtcccacagtgtgacacagcaagccccacgccagggaaccagcacaggttgtggagcgacagagcctgcattctgagtctcaggcccacttccagctgtccccttagtcacatcacctcacctttcagaactctggtttctttgcatc

SEQ ID NO: 424089 - DNA, 257 bp, Homo Sapiens
  misc_feature (24)..(24): n is a, c, g, or t
  misc_feature (35)..(35): n is a, c, g, or t
  misc_feature (54)..(54): n is a, c, g, or t
  misc_feature (71)..(71): n is a, c, g, or t
  misc_feature (94)..(94): n is a, c, g, or t
  misc_feature (133)..(133): n is a, c, g, or t
  misc_feature (144)..(144): n is a, c, g, or t
  misc_feature (212)..(212): n is a, c, g, or t
  misc_feature (235)..(235): n is a, c, g, or t
gtagagacagggttttgccatgtngtcgtccaggntggtctcgaactcctaggntcaggcaatcctcctgnttcagcctcccagagtgccgggnttataagcatgagccaccatgcctggcctcagtaggggnttcttaaagangacacatatgcagtgagtggcttggattttgaaagaggtgtgtgtgaaggccaggggtggtggcccantcccctcctgtgtgcccactttnattcagaaccatcccatttatt

SEQ ID NO: 424090 - DNA, 172 bp, Homo Sapiens
gcatgcttggccatgcttatgtctctaagaactcatcattagtattttcagtttgtagaaaacatacagaaaaacttctgaaaacattactggttctgctgtttacattagggaaagattatctgttgatggttatattggtgtttgagtgttttaatgataactgagatgg

SEQ ID NO: 424091 - DNA, 290 bp, Homo Sapiens
  misc_feature (46)..(46): n is a, c, g, or t
  misc_feature (160)..(160): n is a, c, g, or t
  misc_feature (187)..(187): n is a, c, g, or t
  misc_feature (191)..(191): n is a, c, g, or t
caaggtacttctagagtttcattcacttttgtaggataatgtaagnttaaactaagggctgacatagccgtagaaaaatgttcttaaactttacagcaaacatgagtggaaacattcctactaaaaagaggttttctcgtaatcgaagggctgttacagntttatcactaacagcttattataattnctgntttctaaatgctctcaaatgtaggtattaaaaacatagcattctttccttcaacttgctaaatccaacaaagttgaagctatgaaaaagccatcactga

SEQ ID NO: 424092 - DNA, 276 bp, Homo Sapiens
  misc_feature (46)..(46): n is a, c, g, or t
  misc_feature (68)..(68): n is a, c, g, or t
  misc_feature (165)..(165): n is a, c, g, or t
  misc_feature (215)..(215): n is a, c, g, or t
  misc_feature (230)..(230): n is a, c, g, or t
gtcataattaaaattttatttcacattaagtcagtatctcatacantagacaagacattgagtcatgntgatggtcagagaatctacagacactaaacaatgaagttggtcaaatgacaagaaagccattttaagtcaacattataaattggcaagcaagacaantcaaagttgggccttacagttcttgcacatgcagtagtccagcaagactntaagtccaaaatgtntccaaaagaaccatcacagtttagagatttgatgtattttaatgcc

SEQ ID NO: 424093 - DNA, 341 bp, Homo Sapiens
ggaagcttttcctatattcccatcttgataatttgatgcggttgtgacttgggtgtcacattgacaacccttttgtagccatcctctccttcactgggaattcatttgttagtccttggtattctaaatattatgtagcatctcagggaatttttcttgcggtccatgctaggtaatgcttttccatgttctcttctcacctacgctggatggagtttgagtgcatgtctggcagtgagtgtcatttctcagttctggttcaagctgataccctagtgtcatcattcttgatgactcagcaggtattacaggcatgtagggaaacctgactcttggtaact

SEQ ID NO: 424094 - DNA, 359 bp, Homo Sapiens
cattagcacaaggagactctctcctgatgacagaggtggatctccagtgaaaggaaccaagtgaaggtaaaggggtacaaggctttgtaaccatagttactttaagtctaagattttaaagctattgtttccattatgaaagatgcattaacattcctttatgtctactcttggaaaccttgttatcatgactagcctatttacttacttatctcttaagaggtggttaggcttaattaattcttaaacattaaccttgaagatatattctggagggtgggagaagggttttactctttgaaaatgggatggagtaaactcagtgaaatgctcaaattctgagagtagcagaaacttta

SEQ ID NO: 424095 - DNA, 264 bp, Homo Sapiens
  misc_feature (52)..(52): n is a, c, g, or t
  misc_feature (84)..(84): n is a, c, g, or t
  misc_feature (238)..(238): n is a, c, g, or t
attatccgtatgcttttattataaatacatttccatatgtaaaaattactgntttgtcaggccttttacacagatttcaaaggntcagactagcttaatataactataatacaccccttttgatcttattattttgccctgaatgttacattcagcatcaaatcatttttggcagtgcttagaataaagagggagtatcttccatgaaatattatttccagaatacatttaccctggntcttcattcattcattttcagttgta

SEQ ID NO: 424096 - DNA, 319 bp, Homo Sapiens
gactaaataaacttttaaatgcatggaaatttgagtatttttaaatatatagagattataaacaagtttcttaaagacaagttaataggaatatataataactcataatttcaagagccacgactttaaaagtagctgctcttctgaaaaataagcaaacctttatccattgtattttattacaagatactatagaattttaaggtataaaggattataaagtttacctagttcatcctcttttgtatattcaaaatatattcaaataccttgcagaaattcatcatacaactagtttagtttccaattgcttatttct

SEQ ID NO: 424097 - DNA, 234 bp, Homo Sapiens
  misc_feature (44)..(44): n is a, c, g, or t
  misc_feature (62)..(62): n is a, c, g, or t
  misc_feature (80)..(80): n is a, c, g, or t
  misc_feature (96)..(96): n is a, c, g, or t
  misc_feature (106)..(106): n is a, c, g, or t
  misc_feature (165)..(165): n is a, c, g, or t
  misc_feature (208)..(208): n is a, c, g, or t
  misc_feature (218)..(218): n is a, c, g, or t
agctagatgggtgatatggcaactcaggattctacctgaatcancatagtaaagtatttggngtgctggggtagtttttnaacccattctgctttnctttcctttncctgacacttacctcttgcaatccaagcgaagagagaagactggctgctgtttctctgncccttttccctgcagatctgtcccaactactccatcccaacantcccatctgncccacgtcaagaggct

SEQ ID NO: 424098 - DNA, 329 bp, Homo Sapiens
  misc_feature (68)..(68): n is a, c, g, or t
  misc_feature (165)..(165): n is a, c, g, or t
  misc_feature (284)..(284): n is a, c, g, or t
aaaaaagatggtaaaaggtacatgaatcaccatggactgcactgggcaagccattttagtgctgcaantacgcagatacattcctctcacatatgtacagtgttttctcctctacagagtgtgtcttcactcgagctccaccagtcccctgtgtccaggtgaggnaggcattgttgttctggtttcattgacccagacctgcacttggccatatggccagccaaaggtggggctggttccttttcctcagcctatgctcattctgtagaacacaaatgcctgtngtcctctgatatttcactaaagtcttctccatctgaatcttactc

SEQ ID NO: 424099 - DNA, 191 bp, Homo Sapiens
  misc_feature (64)..(64): n is a, c, g, or t
  misc_feature (144)..(144): n is a, c, g, or t
  misc_feature (151)..(151): n is a, c, g, or t
attgaaaaaagtttatttcaaaaacttcagcaaaattctgtacctacattgctttgcaagagtnctgctttaaataattgcacattattataggtatggtttatgcaagaaagatgatgcagcacaacttggtctcatttaccngtctgangttgaaagaaaatggttatggttaacatgttaaactttat

SEQ ID NO: 424100 - DNA, 276 bp, Homo Sapiens
  misc_feature (154)..(154): n is a, c, g, or t
aacaggcaaaagattttaatacatggaaaggtgaaatcattccagtaagtacaaaaactggatggaggatgcttattaagctgtattaaaaatttttttaaattatactttaagttcagatacatgtgcagaacgtgccggtttgttacctagntatacatgtaccttggtggtgagctgcacccatcaacctgtcatctacattaggtatttctcctaatattatccctcccctagtcccccaccccacaacaggccccggcgtgtgatgttcgt

SEQ ID NO: 424101 - DNA, 298 bp, Homo Sapiens
  misc_feature (104)..(105): n is a, c, g, or t
  misc_feature (142)..(142): n is a, c, g, or t
  misc_feature (154)..(154): n is a, c, g, or t
  misc_feature (184)..(184): n is a, c, g, or t
  misc_feature (238)..(238): n is a, c, g, or t
  misc_feature (248)..(248): n is a, c, g, or t
gtttccaaatggcatggaaagtcaagacgacttctggattcatggacatctggtcactggaggccttggctggtggtactcgtagacaatcagaatgcgacatnngctttgttcaagcagagattctgagtcaaatcactcntctggcccgtgngtaccaggatggggcctgtcttagctgggncccactttacatctttgtgacttttgtcagctcacccccagcctggtgccagcncagtatcagntgtagggaaatctggtaacatttgtactagctaacacgtgtccagtgctt

SEQ ID NO: 424102 - DNA, 331 bp, Homo Sapiens
  misc_feature (70)..(70): n is a, c, g, or t
  misc_feature (93)..(93): n is a, c, g, or t
  misc_feature (120)..(120): n is a, c, g, or t
  misc_feature (191)..(191): n is a, c, g, or t
gactgctctgggtacaggggacatagccatggacagaacagacttctccaaaggcccttaaggccagggnactggggctgcttactccatctncagagtttgtggttagactgaccaggngctcaggtctggacgggaagccccgcactgcaataaggaactgtggctgctctttcttctcacatccaggnctgggactagcttctcagccccagagacaaaagggtacttcccaaacccaccccactcagtgacactgggccatctctgagaacacagcaagtccctgtggccccagcccactgccatagcgctgtctgccagaatccac

SEQ ID NO: 424103 - DNA, 182 bp, Homo Sapiens
  misc_feature (56)..(56): n is a, c, g, or t
cagggttttctctgcaaatctttattgtcctcatcagaactcaacaaacaactgcnattagctaccctttacaagctcagaaatagggacagagaaagctttggattctgaaaatattaccaagtcaggcagtgacggggtcagatacgggccctgtcacctctcatccttggctcgtctgt

SEQ ID NO: 424104 - DNA, 321 bp, Homo Sapiens
  misc_feature (294)..(294): n is a, c, g, or t
ggcccaaacatagatggtgcatctcatcaacattctaatatagagtaatgatcactggctctaaacaaactttgcaaccaaacagaaacttcgtatctgctaatctcacgttgctccccaagaaaaatctaactggatgttctggaaaagtagtggaaaagttaattgtttgcagaaagttaacttttacctgaagtgacaaaataaagtggttacccaaaggggtaaaacctagcgttggagtttatcttatgggtgtagtagatttgccttaaactcaaagatttgttttgntgggttaatgggtgtccagtggatctt

SEQ ID NO: 424105 - DNA, 319 bp, Homo Sapiens
atttatcatggatgccataatagtgggcttttccttcagatcagaacattttaaatttaaaagaaggagtcttgcttcaccacttttgagctcaggctttttttggaaactcattcaattgcccagcactgtgatcacctagagggcatatgcacactcaaagcatggaccctgagctgtcaccaggtgcagtgctatctaccatccaccagtggtgccagtgttgaatgatgggggaaggcttgagttcttttattaggctgggtggcagttaccaacgtcttcatttcagcttaaattcacatggattctttagcag

SEQ ID NO: 424106 - DNA, 149 bp, Homo Sapiens
  misc_feature (89)..(89): n is a, c, g, or t
  misc_feature (100)..(100): n is a, c, g, or t
attgcaaaaccaaacactgaccggctatcttaggcataaaagggattttaaggaaactcagataatcaacagggggccagaagaggggntttgggaaatnagcaggaacaatttagccagcctgaccttctcctgtagcaggaggccat

SEQ ID NO: 424107 - DNA, 364 bp, Homo Sapiens
gttaaataaacattggcttcaacttaaaagtcagtagatacattcatccctaacaagagtcagctttcctttgaagttttgaatccagtcattgatttcttttctctagttatgaaagtcctagatggcattcttttccaatagaaggctgttggttctgcgttgaaaatctgtcatttagtgtagccaccttcatcagtgatcttagctagatcttctggataacttgctgcagcttctacatcagcatttgctgtttcaccttgcacttttatgttatggaaatgacttcttcccttaaacatgatgaaccaacctctgctagcttcaagcttttcttctctcacctctttcagccatcaaa

SEQ ID NO: 424108 - DNA, 235 bp, Homo Sapiens
  misc_feature (20)..(20): n is a, c, g, or t
  misc_feature (49)..(50): n is a, c, g, or t
  misc_feature (75)..(75): n is a, c, g, or t
  misc_feature (89)..(89): n is a, c, g, or t
  misc_feature (191)..(191): n is a, c, g, or t
  misc_feature (194)..(194): n is a, c, g, or t
gtctttaatatatcctgcanttttactcatcttacattagcaaatattnnttgtccagaaaacaggcaaaagttncaccaatatctttncttgcatctggagatttgtgatcagctgctggcatctcagtttctgaaaatccttttaaaataggacaaatgcataggagagctaaaaggatgttgcattanttngaaacctattcatatgggaaacacttgaaaatattggctga

SEQ ID NO: 424109 - DNA, 307 bp, Homo Sapiens
  misc_feature (39)..(39): n is a, c, g, or t
  misc_feature (50)..(50): n is a, c, g, or t
  misc_feature (100)..(100): n is a, c, g, or t
cgatgaagtaactgaatgtggaatagaaagagacttaanctgtataaaanatacttccatttcctgtaaccatttacggaaaacaggaagtttctcattnctagagagtgaacctggaagaggcagtcctttcagatagtctgagatatatggccaaaaaaatatctgcggcagtgacatagcaggctacctggaacaatgcagtggcagtttgacgtgacctttctcagtatagctagctggggtgaatcatatgctagtgttctcatctggttgaattttttacatccggaaatgtgattctttc

SEQ ID NO: 424110 - DNA, 272 bp, Homo Sapiens
  misc_feature (48)..(48): n is a, c, g, or t
  misc_feature (83)..(83): n is a, c, g, or t
  misc_feature (99)..(99): n is a, c, g, or t
  misc_feature (102)..(102): n is a, c, g, or t
  misc_feature (138)..(138): n is a, c, g, or t
  misc_feature (146)..(146): n is a, c, g, or t
  misc_feature (164)..(164): n is a, c, g, or t
  misc_feature (188)..(188): n is a, c, g, or t
  misc_feature (207)..(207): n is a, c, g, or t
  misc_feature (219)..(219): n is a, c, g, or t
  misc_feature (253)..(253): n is a, c, g, or t
ccaagtactattattttattaactttaagaacatgttttacataaaancaggcaacatcaaaaaagctcagttgataaatgancataatatatcacagntgntttcattccacattaacctacatgtatcagcttaanctgaaggnttagggggaaaaattggntctcattccacctttaattaaggncacaaattgtttgaaagtnatttcattaggnttctgaaaatcaaagtttaacctatgccatctgntccatgcagcaagtgataa

SEQ ID NO: 424111 - DNA, 304 bp, Homo Sapiens
aaggtcttagttctctttattagaattgtttctatttgccaaagtaactcaagcacttggaacaaattaaacaatacagggatagataaagagaaatgtagcatcagtctcctcccaggcctactcctcccccaagccaggtacccagggctgcccagtgcaggggcgttggcagaggcagttggtacacagtaccctagttagtcctgaaagctacgcattcgaggctcagagagatgaggcaatttgcccaaggacccacagatggagacaggctgggggtggggcagggtttcagtcacct

SEQ ID NO: 424112 - DNA, 141 bp, Homo Sapiens
  misc_feature (41)..(41): n is a, c, g, or t
ctataagtgggcttgagctcgaccgcgcgcctgtggaagtnctttctctactcgaaaaagggaaagcatttccttgagtttgcgttttaagggaaacttacagcattgacactttatttaaaatattcactactgctgtag

SEQ ID NO: 424113 - DNA, 314 bp, Homo Sapiens
  misc_feature (48)..(48): n is a, c, g, or t
  misc_feature (61)..(61): n is a, c, g, or t
  misc_feature (122)..(122): n is a, c, g, or t
  misc_feature (161)..(161): n is a, c, g, or t
  misc_feature (201)..(201): n is a, c, g, or t
gaatttttaaggtggcaacatgttttcttaaaaacaggtgagcctgtnagctctgctcctnagggagaggtagcttggtcaagagggcagccccaggccctgcagtacagctggtgattttnagcccagagccctggaaccttggatggggagtgtgtgtnagggctgtgcgtggtagaatggcaaaagtggggctaagtntggcccagcgtggctggtgtggacatctggggttgctgtcaaccccggggcaagcagcggaaggtcccaggtgaacggcaggtccccagaggtctgtttctcctctggacctt

SEQ ID NO: 424114 - DNA, 182 bp, Homo Sapiens
  misc_feature (49)..(49): n is a, c, g, or t
  misc_feature (54)..(54): n is a, c, g, or t
  misc_feature (95)..(95): n is a, c, g, or t
  misc_feature (113)..(113): n is a, c, g, or t
  misc_feature (133)..(133): n is a, c, g, or t
  misc_feature (141)..(141): n is a, c, g, or t
  misc_feature (150)..(150): n is a, c, g, or t
  misc_feature (154)..(154): n is a, c, g, or t
agtgaatgtcttatatttcattaaaagttttgatattatatgtgaacancagtnctgataaagcaatatctagataaaggctattacttaccttnctcaaattgatagatttnctccttgtaacaagctctgntataaaanatgataatnggtngaaaacttttacacattcaaaactaaat

SEQ ID NO: 424115 - DNA, 294 bp, Homo Sapiens
gtccaatcctcaatgcacagggcttagttcaaaatctaagctgtttctgtagtaagcagccaaatgggaaagatcccttcgttttgaatttgatgagaatgggcttggaaatccacacccaccggcttgcacggaagaggactcagcctcttcctaatggttcaacattcaattcctgaggaaagtgctgatagtattagttccctacatttccctaagactcccatccaacccctagtgctactgaagagggtttgggaaagcaattggagttccttagcttggatatatata

SEQ ID NO: 424116 - DNA, 285 bp, Homo Sapiens
aacttgagaaatttaccttcttacattgcagaaatcactactttaagaacaacctaagaaaaattactatgaaatattttcttcaaagtatatttatcccctctctagagaacttccttttgactgtgttaaaaagattttttctaatttgtggtcatcagtcaattttctaagtacttgaagaggtgttaatgtaatttatatcattagaattttaatattatgcacaattactttatttttagtattgtcaccaatttttaaattaacaatccatccttattg

SEQ ID NO: 424117 - DNA, 368 bp, Homo Sapiens
  misc_feature (316)..(316): n is a, c, g, or t
gtcctaatcaacagaatgttttgtgttccttccacttcacgttcagagcccacgtcatgccacttcctaaaagaccattagaccatccccttttcctccatcctccactgtagccttagccagagaaaagatccagctcacttctggtccaaaaaatgtcaacgtttggaaaatggctcatctacactacagaacacagccagatgacactgctaaagggtactgtaagaaaacacaaggtccaaagtatgctgaattggtttcataagtctaactcattggccagtgactgaaaaaccagggtatcaggattttntgggggccaatagccatgacccttgagctttcatagttcatgaaccactttg

SEQ ID NO: 424118 - DNA, 133 bp, Homo Sapiens
tattattcttgggctaaattgataagctatttagatcactgcagaaacttgtctctgtctattcaatatcaaatgcacaaaattacagttttgggcttaagaggctaacacaaatgacatagtaggtgcctgt

SEQ ID NO: 424119 - DNA, 188 bp, Homo Sapiens
  misc_feature (100)..(100): n is a, c, g, or t
  misc_feature (141)..(142): n is a, c, g, or t
ggagatcaaacaagatttattcaatttggtcaaagcaagaagttgggagagcaagatgtctcaaatccatcttaacaaaaagaggaagcagtgagttttnaggtagctaaggagtaaaggagaggcagtttcagggaagtnngggggaaaagtctgcgtttctttattctcaggtaacatcttgagca

SEQ ID NO: 424120 - DNA, 289 bp, Homo Sapiens
  misc_feature (12)..(12): n is a, c, g, or t
ccagactgaganttgtcagtctacagtatgataccccaagtatctctcatgagtttgatatttttgtgataccttattcttcactcttagtaggtttatttcaataaagtaaggctttgcttatatgggagggcagtgcattaagctaatgcaaattatagttgataaactaccttctcatgtatcgctgaatgccagggagcatttttgttgggggcagtgctggcgggagttttgatggaagtaatagtagagagatggagagtacacaagacctagaggagggttg

SEQ ID NO: 424121 - DNA, 215 bp, Homo Sapiens
  misc_feature (39)..(39): n is a, c, g, or t
  misc_feature (132)..(132): n is a, c, g, or t
ctggttgtgtgaaattgatgtttattcacaaggtatttnctctgtttgttgaaaacacttattttaaatgttgtcctaagggggaaaggccggtaaagtcggaagaaatgcttaaaagccactaatgtaagngcacatttttcctttaaaaagttaattaactaaggtttgctaaattcaaggcctcatagggaaatacaactgaaactctaaaa

SEQ ID NO: 424122 - DNA, 151 bp, Homo Sapiens
tagtcagatactaatggacacttaaaattgaaaacctgttaagaagtgcactgtacattttctttgtttgcttaaaagcagcttcctagaagctgtctagttctacctcgtgttaatcttttcacatcctacagagttttacagactttta

SEQ ID NO: 424123 - DNA, 165 bp, Homo Sapiens
  misc_feature (27)..(27): n is a, c, g, or t
  misc_feature (45)..(45): n is a, c, g, or t
  misc_feature (57)..(57): n is a, c, g, or t
  misc_feature (120)..(120): n is a, c, g, or t
gtcgtgcaggtagagtaagcagacttntgaactgagagatgtggnctgagaggaaanaaggatgacttccaggcatttggcttgagctactgcatgggtggtggccttgcttactgacanggggaaaactgaggaaagaagaatggaaaggggctgaaaaaccaa

SEQ ID NO: 424124 - DNA, 267 bp, Homo Sapiens
  misc_feature (248)..(248): n is a, c, g, or t
aagtgttcattaaattttagtcttgttactgcaattatttcatcaagtgaacaaaggagggcttcacagtgggccctgaatctaggtgctaagtgccctgaatccaagcagtataactgacaggaaagtgctttgtcagagagggaaggcaagagaaggggaggaaggcaggaggtgaagcctgacccgggaggcagaaggggttagtaagaagaaagagacccaggaatgcaagagcaagacagaancaggcaggaagagaaaaga

SEQ ID NO: 424125 - DNA, 319 bp, Homo Sapiens
  misc_feature (11)..(11): n is a, c, g, or t
  misc_feature (35)..(35): n is a, c, g, or t
  misc_feature (254)..(254): n is a, c, g, or t
aagaaacaaanctctgtgaggtttgcttgtgaggngggtggacatgactttcgggcaagaaatattcccctagcactggcaattatatggttattttctcagggccactatcagtttaatgagtctctttctgtaaaagtttcatagcccagaggttttctcccttgttcccaagtttgctgtaacaacccatgtctctcagataaccattctagatctagcagcaacttgactatttcctgccctcctaggancacacctgagacttcaatctgtctttgtcaagtgaaccaacattcagaaggcttaaagagctcat

SEQ ID NO: 424126 - DNA, 205 bp, Homo Sapiens
  misc_feature (23)..(23): n is a, c, g, or t
  misc_feature (33)..(33): n is a, c, g, or t
  misc_feature (156)..(156): n is a, c, g, or t
agttctccaaagcaagccctcangatgtatttnttcattcaatgagtcattctattacataagttatgtgtagaataaatacttgaaactcttcctagagtgccatcacataccatttgtacatagtaaaataccagcaagcgttaatcataccgnctacatgtgtgaaacattctctgggctgtagtaaactttttgcattacc

SEQ ID NO: 424127 - DNA, 360 bp, Homo Sapiens
caggggagtattttatatcaaaacgaagagcagtttatgggaaagaaagcagcatgtttttatttgaattattcaccctcatgatcctgaacttgttttcatcatgatgtgagtgtactaactaggtaatgaaagttaatgaatattaacttagggaactttgaatgctgagcagccccttagtcccacctggtagtttcaggtgcatttatttttcctaagtccactctgttacatgaatcagacttcctcatttgttcttgcttgactgtagattgattatcgatccagggaaacaaaactagggaaattacctgtaaattataataacttggttaattaattctctccagaaacaca

SEQ ID NO: 424128 - DNA, 189 bp, Homo Sapiens
cttcaccaatgtaggatagcctttattacctgcatattatagacaagggaaacaacttcatgcaggcaattacctctccaaggacatcaaataaattcacagaaaagctgtattcaaatacaggctttgtcaaatcccaagcaacaatcttgatttagagatggctttggagccagcggcctgagttca

SEQ ID NO: 424129 - DNA, 309 bp, Homo Sapiens
  misc_feature (97)..(97): n is a, c, g, or t
  misc_feature (206)..(215): n is a, c, g, or t
caagaattcactcaacactttgaaatgataagaaattagagctctttagtctcatctacctatattttgaccaactcaattgtaaaacccttgagantaatacatatgtgctgcttttataatttttacattaacagtgatttatataaatactcaatacatttcaataaatacttaacattaatgctcaggctttatgtcccaannnnnnnnnnagacaaaaagtaaacattgggtcatatttattatacacttttttgtcaggtttaaactaaaatacaatctcatttgaaatttaataaagtattt

SEQ ID NO: 424130 - DNA, 232 bp, Homo Sapiens
  misc_feature (47)..(47): n is a, c, g, or t
  misc_feature (58)..(58): n is a, c, g, or t
  misc_feature (77)..(77): n is a, c, g, or t
  misc_feature (184)..(184): n is a, c, g, or t
tattggaaaccatgcacaatgaaatcttcaggaactcttcacttctnaagtgcctganagctcatcttggacactgntcatcacaaaagaaatattaaagagctgcccagcaagactgaaaataatgtcctgttcatgagaacagtggggctcagcggcaggcgaccttgtcaacttgcctttnatgcactcaagcacgttgtgtggcctctcatctgtgaatggtgggtgt

SEQ ID NO: 424131 - DNA, 292 bp, Homo Sapiens
  misc_feature (24)..(24): n is a, c, g, or t
gctattatgaaatatatatttggncttcaaccccatttcctgacatacaactcctaaaatccttagaaacaccaaagtgtgatgtcgttttgtttattaatgagttgactgatgtctggcagcccctaggtagcttcaggatgggggctggtgaccagaaagaacaaggggaggattagagagttgggactttcagcccacctccaacttccggggaggggagaggggctgaaggttaagccgatcaccaatggccaatggtttaatcagtgattcctttgcaatggagcct

SEQ ID NO: 424132 - DNA, 308 bp, Homo Sapiens
  misc_feature (74)..(74): n is a, c, g, or t
tgtttgttttcctcctgagatcaaacacttggtgcttattcctgatgtatactctgagaccagctcttaccttntgagtggcagctacccctccctcccaattttagatcctatttttacacatctctatagatatcacctttatttcatgactcacaatattaaatggtacagacttcagtttaaccactggtgtggtaacagcagtagttgctaagtaccaccttcccattgctgtttgagggctaatttgcaaagacatttgaatctcccagtgaagatgtctggggaattttggccagttgtct

SEQ ID NO: 424133 - DNA, 270 bp, Homo Sapiens
  misc_feature (66)..(66): n is a, c, g, or t
gactattgcttagaatttgatgcataagctgtatgtttttcaagcactcctagaaggaaacacttncagggtaagcctctcagaagaaggctcacatcttacctctgatcttcccctaaataatcaccagcaggtgaccatctctttgcagcctttctactaaggagccaaggcaagagtattactcagatattgaaaatggatctcagctgtgcccctcgccttttctcccacgactcgtcatctgtgatgtttccaccagctttattt

SEQ ID NO: 424134 - DNA, 304 bp, Homo Sapiens
  misc_feature (12)..(12): n is a, c, g, or t
  misc_feature (44)..(44): n is a, c, g, or t
aaattttcctgncactgtttatttagtgcatacacatataaaanctttaataaaagctgtatacatttactcattcgaacattgagagttgagatcaaactggatgataaccagaggtttacttacttcacctctaaagaggttctgtgacctaagcctcatagaaaaagctggctgatagcagagtgaaataaatcacaaaacccttcaaaacctattgattctagcagaattgctagatctctagcagaagtataaataacatggacactttcaagtttgtacaatgaattcagaaatcttt

SEQ ID NO: 424135 - DNA, 257 bp, Homo Sapiens
  misc_feature (141)..(141): n is a, c, g, or t
  misc_feature (184)..(184): n is a, c, g, or t
  misc_feature (200)..(200): n is a, c, g, or t
ctttgacacatctttactaccacagatagcattagaaatatatcatgataccatcacagtcctctgagaatgagagctgtcatgaaagaaacatatcttcagtatgataacatacacaccagcattttcacactattaggnaattctacaaaaatcagatttatccttttatgccatattttangtacatgccacatggngtgagaggacagtgctagacattgatggtatagacatagaaaagttctaattcctgt

SEQ ID NO: 424136 - DNA, 295 bp, Homo Sapiens
  misc_feature (49)..(49): n is a, c, g, or t
  misc_feature (60)..(60): n is a, c, g, or t
  misc_feature (92)..(92): n is a, c, g, or t
  misc_feature (104)..(104): n is a, c, g, or t
gatgttttgcacctctttacgtgcttattggcctaaggaagtacttgtncaaatattttncctcttaaaattcagtcatctacttcttttgntataggtttttnattgggaaataattgtagattacaggaagactcaaaggcacaggagggaggtccaggtccagagcactcttcagctgggcttcccagtgttaacatcttgcataactgtagtacattattgaaaccaggaaattgacattagcacaatccatagagctgattcagatttcattagttatacagatactcat

SEQ ID NO: 424137 - DNA, 312 bp, Homo Sapiens
  misc_feature (206)..(206): n is a, c, g, or t
  misc_feature (257)..(257): n is a, c, g, or t
ctatagttattatgaatgcctagtaattccaaaaggaacatgtttgtataataacactcagtacaaagtctgtaatccaggaagtgaccagcccgacgtgtgctatgacccctctgaacctcccatttccatagtttttgaaatcagattaaggactgaagactagtgaggactcataaatgatacaagtaaagtattagccagancagaagaaaaaggggtgcccaaacgcataatcttataatttgacgcttgtnctgtcattaatagaaataagctaggagcaggatgtggctcttttaattgggaaaa

SEQ ID NO: 424138 - DNA, 304 bp, Homo Sapiens
  misc_feature (236)..(236): n is a, c, g, or t
aaaaacacttttaaattctttattttggaatcgttataattgacaggaagttacaatgatagtatagggaggtcctttggactctttacccagtttcccccaatggttttgtttcagtacaattttaacagctttattgagatataattaacattccatagaccacatattttaagtgtacaatttgataagtttagaaattacatatacctgtgaaaccatcaccacaattaagntaataaacacagccgtcatccccaaatcattcctccttccccttggtacttcttcccatcctcctctt

SEQ ID NO: 424139 - DNA, 274 bp, Homo Sapiens
  misc_feature (224)..(224): n is a, c, g, or t
  misc_feature (253)..(253): n is a, c, g, or t
gcagtgtttgactgtctctgtttcttgtctcacgtcacaaaacaagactgaatttggatttctgaacgcgactgtgttttcctcgggagtaatgaaattagggctccatttccttcgctgttcccaagggaaaggtcctgcttaaacaggtgctttgtgagtggaaacgtggccagagtgcggcgggtgctttgtgagtggaaatgtggccagagttcggcggntgctttgtgagtggaaacgtggccttctntggaagccctggggaggggct

SEQ ID NO: 424140 - DNA, 350 bp, Homo Sapiens
  misc_feature (25)..(25): n is a, c, g, or t
  misc_feature (120)..(120): n is a, c, g, or t
  misc_feature (122)..(122): n is a, c, g, or t
tgtatgtgggcttggtgtccacatnaatgtgcgtgaatactcctacccacagactgctactgtgccaatatagaggttcataagaaagataaaagagaaccagcagaaccccaggttctncntctccttcctccctttgcccagataaaggtgtacagtgtttgtggtgaggctgctggacactgctgttttgggcttttctagagagaatgcaaacatgcaaaaacagtgtggtagtgtaggcagaacaagatctagaatcagaagacctggagtcgaatctcagctccaacacccactggatgaacgtggacaagctgcttgatctctcagatcctcgatttcttcat

SEQ ID NO: 424141 - DNA, 218 bp, Homo Sapiens
  misc_feature (114)..(114): n is a, c, g, or t
  misc_feature (125)..(125): n is a, c, g, or t
  misc_feature (186)..(186): n is a, c, g, or t
  misc_feature (201)..(201): n is a, c, g, or t
ctttatactactctgtatttacaagagatatttctcaatcttagtgtctattcacatactgaaaaccaagtatcttccaaacactgaataatgtattctatgtctaatacagangaattcaagangcttattatacatgctaaatgacaagtactctaaagatctaatacttgacatagaatatgngattaaaagcatgcnccattaccaccaataaa

SEQ ID NO: 424142 - DNA, 294 bp, Homo Sapiens
  misc_feature (148)..(148): n is a, c, g, or t
ctgagcagtaggtctcaaaagtgggcttaaaatattcagtaaaccatgctgtaaacatatgcactatcattcaggctttgttgttttatttatagagcacaggcagagtaaatttagcataccttttaagggacctaggatatttggngtgctaaaatgagcactggcttcaactggaagtcaccagctacatcagcccctaacaagacagcctgttctttgaagccaggtattgacttctttttagttatgaaagttgtagatggcctcttcttccagtaaaaggctgttttg

SEQ ID NO: 424143 - DNA, 320 bp, Homo Sapiens
  misc_feature (62)..(62): n is a, c, g, or t
  misc_feature (131)..(131): n is a, c, g, or t
gtttggtcagagaaaatgactggtctgttgctatcagcctcagttactatgttttatttttnatttttcttactagtgcattacagttaaatagaattttattgaagaagttattgggctgaaggcagatnactgtaaagcagcccccatcactggcatctggtctcagtgtgataaatgctcaagaggagaagaaccttcacagggccaggaagtgatgatgtaggttccctacctgccggaagggccacatctctgcccgcaaaagcagatgtggaagttgcccctctgttctccagtctctctcttagaagcagtta

SEQ ID NO: 424144 - DNA, 244 bp, Homo Sapiens
  misc_feature (24)..(24): n is a, c, g, or t
  misc_feature (195)..(195): n is a, c, g, or t
  misc_feature (204)..(204): n is a, c, g, or t
aaaaaggtttattagtggattttnctctccagaaatatcacacaaaggaagaaattcagagatcctgaaatatcataccaattattaaggtgatggtttgtatttctccacactttccctgcgagcatcccaaatacctggtgacaagccaaatgccaacccaattagcaagagcaggacaaacaagtgcctgantggccagangactggctggtgtcaccctggtggagactagagcaagagc

SEQ ID NO: 424145 - DNA, 153 bp, Homo Sapiens
  misc_feature (53)..(53): n is a, c, g, or t
  misc_feature (76)..(76): n is a, c, g, or t
  misc_feature (88)..(88): n is a, c, g, or t
  misc_feature (119)..(119): n is a, c, g, or t
  misc_feature (121)..(121): n is a, c, g, or t
  misc_feature (132)..(132): n is a, c, g, or t
ctttgaacaatgtcattggtagtttgatagaaatagcattgaatctgtaaatngctttgggcaatatggccatttnaacaatactggnacttcctatccatgagcatggaatgtttttncnatttgtttgtnatctctgatttctttcaacag

SEQ ID NO: 424146 - DNA, 316 bp, Homo Sapiens
  misc_feature (42)..(42): n is a, c, g, or t
  misc_feature (47)..(47): n is a, c, g, or t
  misc_feature (70)..(70): n is a, c, g, or t
  misc_feature (83)..(83): n is a, c, g, or t
  misc_feature (95)..(95): n is a, c, g, or t
gacaatgaacacactgaaacacagaaagtttgagtgcctcanttganttagccaccagctccttttcagntttggaatttggntccacgtttgtntccctgcaaagcctgcactcttccccaggtatcaggctgcctggttccaatctatgcagtggggatgcaaagaagagtgagacagccttgctttactcactgactaatgggaaagaaggacgtgagagcacattattatgcctgacatggtaagtggcattgagccaggacagcataggagtgattgactccaggcagaaatgggccaggagggccacact

SEQ ID NO: 424147 - DNA, 294 bp, Homo Sapiens
  misc_feature (111)..(111): n is a, c, g, or t
agaacagtccttatgctggatttctttatcctgaaatagcagtcaactgcagacctcaatctatggtatatactaagcaattcaactctttcttgtaatgtcatgactctnctctgcttcttgggagcacttacagtatcaccagtggcacttcatataggtcccatggtgttactcaaggtttatggtattgcactaaacatgatgaataatatgccgtaactgtgagagatcactttttactgtgaatgcaacttactggaatgataaactgctcagtcagagatgattagc

SEQ ID NO: 424148 - DNA, 251 bp, Homo Sapiens
  misc_feature (77)..(77): n is a, c, g, or t
gatcagtggtttttcagaattttttaaagcttgtgaaatacttatttgtaaatagcatcttatgaggaaccttgatntgtgacaaaacagatgctttgatttgagagcagaagacctgcagcccctgactgctcacctttccagggacccctgaacattggcctagagggtagtgtacagtcacttcttcagtgataacttactgagtgtgattcaacaaaactgctttggtttatgggtgaaacataatt

SEQ ID NO: 424149 - DNA, 321 bp, Homo Sapiens
aattctcagcagccacattggagccagggatggcacagtgcaggaccttgagaatgtccttatcctgtagcacaaaggattagctgccacttcccaacagattggctacttggtcatggtggtttgcagccagatgatgatgtagccattaagagtgagtgccattgtacgattcctgatactagtgttgagacatgaaattttcctgctctgtaagcaaacaatattgaacataaaaagtgacacataatactctagaagcttaaatgttgtcccaatcacttttctctacatttcagcatgattgcctgtatatatttt

SEQ ID NO: 424150 - DNA, 149 bp, Homo Sapiens
  misc_feature (52)..(52): n is a, c, g, or t
  misc_feature (135)..(135): n is a, c, g, or t
aataaaagagtatctcaccattgagtataattgacattggtttctgtctgcncccttcttttagttctctgtcctcactccctttggagaactgatcctccctcactgcaactcaccattgagtataattgacantggtttctgtctgc

SEQ ID NO: 424151 - DNA, 188 bp, Homo Sapiens
  misc_feature (44)..(44): n is a, c, g, or t
  misc_feature (74)..(74): n is a, c, g, or t
  misc_feature (154)..(154): n is a, c, g, or t
  misc_feature (173)..(173): n is a, c, g, or t
gcccagctgattcctaggcacattagaagttggaatgcattgcnctagggcaactctgtgtcacagtgacaaancaggcctgaaaaaatcaagcggcttgcctaggctcacatggtcaattcatttcatgagcagacacatatcattctttgantcacagttgtttgcaagcnggtgtctgccaatgg

SEQ ID NO: 424152 - DNA, 194 bp, Homo Sapiens
  misc_feature (98)..(98): n is a, c, g, or t
aacaagttgttctcaatttacttccttttaatgttctaacaagttattgctgaggtggctgaagactatggtctgcagcagattatatcatggaagtnttaggaccatgcatgagaaagctggcaaaggaacaaggaacagagtctatgggagacatcatgattgcagaggtcatcctcattcataactcaagc

SEQ ID NO: 424153 - DNA, 307 bp, Homo Sapiens
  misc_feature (78)..(78): n is a, c, g, or t
agaacttgctctcttcctgcacccagggctttaggaatcagcccgttgcttctctgtagcaagcatgaggagcctctnatgatcccagtcttgggtgactcactgtctctctgttgtgtctcaaggaagggaggtgcagcagcatcctggcagtcagtggtgacatgcggagagcccacgggtccaggcgtcctggtggtattttggaagggccaaatctctggctttagcactttggaaacttgttgatcttccttggtcttctacggctattcattgcttctggggaatggtgacttgtgaattt

SEQ ID NO: 424154 - DNA, 298 bp, Homo Sapiens
gcttcagcacatgaatttggggtgggaagaaggtacaacgtttagtccataacaagtgagcaggtctaatctccttgtcaattctacctcccctgggtaaatagactaatggtatttgctagaaggaagagggttgtctttgggcccttagtaggatatctgactaaggattacctataatagatagaaccagaatttataagggatggcttcctggaaaatggcatatagtgtttgcagtgctggggtataaaatggagatgttttataattgaagcattaccaactgtatgaggaa

SEQ ID NO: 424155 - DNA, 277 bp, Homo Sapiens
  misc_feature (13)..(13): n is a, c, g, or t
  misc_feature (74)..(74): n is a, c, g, or t
  misc_feature (164)..(164): n is a, c, g, or t
  misc_feature (193)..(193): n is a, c, g, or t
cacatggtgaggnaggaaagcaaggagaggtcaggggaggtgccaggctgtttgtaatgaccagctgtcctggnaactagtagagtaagaactcattactataaggacagcaccatgccattcgtgcaggatcatccctatgacccaaacacctcctactagtnccgagctccaacactgggggtcgaatttnaacataaggtttggagagttaaatatccaaactatagcactacccttaatggcaactcaggctgatataaagtagcattccctg

SEQ ID NO: 424156 - DNA, 265 bp, Homo Sapiens
  misc_feature (104)..(104): n is a, c, g, or t
gggtagtagagttagagattccatcctcttgaaagcacagttgccccgggaagagtaaaagggagcagaaggcgtaacatggcacggctgttttcactgttgtncaccttttgtatccttacgaatatgaagatgtactaagttgtgtgttttgcgtgcatatataattttaagctacttgagttgtaggtccctccagtctgtgattcagtttgagatgggactgtatgggaattaacagtgccttgtcttcttaaggagtgat

SEQ ID NO: 424157 - DNA, 170 bp, Homo Sapiens
aaacactttacttttttttaaaacaatccttgctctctggagatattttctcacattttgttacaaattttgtgtagaagcatagccacagtggattttttctggctctttttctttctctgagacgttaatgtccagtagagcaaagctagaagggtatatatatatat

SEQ ID NO: 424158 - DNA, 256 bp, Homo Sapiens
ggggcatgtataagtcacagtggtgggacgtgtggttttgaagggtgggaaggctgcagagtgagtaatcaagggaacagatgtgaattattgattagagctgttgggaaggaaggttgttacagtaactaggggcaaggaggcatggagaacaagcaagttgagtttgagaacaaagaacaagaaagttaagactaaacctttgaagaggaattttattgtattttacaatttcccccttttaatttttataatt

SEQ ID NO: 424159 - DNA, 212 bp, Homo Sapiens
  misc_feature (61)..(61): n is a, c, g, or t
  misc_feature (75)..(75): n is a, c, g, or t
  misc_feature (91)..(91): n is a, c, g, or t
  misc_feature (101)..(101): n is a, c, g, or t
  misc_feature (129)..(129): n is a, c, g, or t
  misc_feature (148)..(148): n is a, c, g, or t
  misc_feature (167)..(167): n is a, c, g, or t
gtcttttgactttcaagtttatttagacacaactggagtcccacgggtggtacctgatganttcaaagcccaagntcaaatagctgcaggntttaaatcantatttccacgggtaactattaataaaantgtagattagatagataantcacatctattataatcantattagtttattaattacaccagaaatgctgtcaaagaaatagcc

SEQ ID NO: 424160 - DNA, 186 bp, Homo Sapiens
  misc_feature (42)..(42): n is a, c, g, or t
  misc_feature (45)..(45): n is a, c, g, or t
  misc_feature (65)..(65): n is a, c, g, or t
  misc_feature (85)..(85): n is a, c, g, or t
  misc_feature (128)..(128): n is a, c, g, or t
  misc_feature (132)..(132): n is a, c, g, or t
  misc_feature (158)..(158): n is a, c, g, or t
  misc_feature (161)..(161): n is a, c, g, or t
accatggatatgactaagtttccataaacaacaaatatgtgngtnacacctaatatctgtctctncattagagcagttacaaatnccttttgggaaacgctcttggcaatactcaaccagtccaattnaggntattatataaaagtaatacaactganttncatctaaaatactgggcattttatg

SEQ ID NO: 424161 - DNA, 348 bp, Homo Sapiens
  misc_feature (69)..(69): n is a, c, g, or t
  misc_feature (129)..(129): n is a, c, g, or t
ggtcaaaggtgggaaagaccagagtgaacaacggccatttacgttctgaacatttactcagtctttcanttggtgtgactgacaagctgaagtgcaatggcaaatagagacagcagagagtgcacaatnactaatgtgggactgttagccaaggagtggagaggtatgtgtgggaaagaaaccactctatttcagcagtggaagtgagagaagaccacatccactctcttgaaccaaatcaaatagctcatgaatgacactttggctttatttcaaaataatttttatgcaagtattgagttcacaagactgtcacctgggacaagaggcaatgaagatgtcatttct

SEQ ID NO: 424162 - DNA, 296 bp, Homo Sapiens
  misc_feature (147)..(147): n is a, c, g, or t
tatagagcacaggcagagtacatttagcaaaattcttaaggaccctaggatttttggaattgtaaatgagcattggcttcaactttaagtcaccagctgcagtacccctaacaagatagcctgtcctttgaagcttggaagccaggnattgattcccgttctacagctatgaaaatcctagatggcatcttctttgaatataaggctattttatgtacactgaaaatctgttgtttagtgtttagtgcatccatcttatctagatcttctggataacttacagcttcatcttgcac

SEQ ID NO: 424163 - DNA, 226 bp, Homo Sapiens
  misc_feature (25)..(25): n is a, c, g, or t
  misc_feature (172)..(172): n is a, c, g, or t
  misc_feature (189)..(189): n is a, c, g, or t
caaatcagaaaggttctcatttttnaaggacaatggaattgacctagcgtaatgcaaacatcccacacctccattaaacctctgctccgcctcacctggaaatgatggacaagactgatggaccccgggtactcaagtcagacagaaatgaacaggagattaaactgcaggnttaacccccaggcaggnttagctctgtgccactggggatcatcaaatacatctt

SEQ ID NO: 424164 - DNA, 318 bp, Homo Sapiens
caaaatgtgaaaatccctagaaagcaatagccttcgaggtaccttgcactgaatttcccaccccagcccttccacccgatgggaggctgtaacttgggcactggggtgactttttccatgcccttgtcatctccagggtgggaggcaggccccacttcccctcccctatcccccacttcccattgttgttgccccacccctaatctccagactgaacccagatggagatctgagtgccaaaacaattcttgatgtaactttgtacatatcttctactaccgttgggggctcttggggttagaggtgggggcggctctg

SEQ ID NO: 424165 - DNA, 243 bp, Homo Sapiens
  misc_feature (63)..(63): n is a, c, g, or t
  misc_feature (72)..(72): n is a, c, g, or t
  misc_feature (75)..(75): n is a, c, g, or t
  misc_feature (83)..(83): n is a, c, g, or t
  misc_feature (121)..(121): n is a, c, g, or t
  misc_feature (163)..(163): n is a, c, g, or t
  misc_feature (184)..(184): n is a, c, g, or t
aaacaagcatagggttttattaggggacttacatacagaagagagagcccagtagtgatgggntagacaggnganccaacttntgtacagaagcagttcagtgtcatcgggctagacaagntatccaccttatgtacagtccagtgacccagtggctgcaggntttttgcagaaaaaccacaanttcatgcaaacagcgtgaaatttatatagcatttttacttaacactctccccttattaa

SEQ ID NO: 424166 - DNA, 286 bp, Homo Sapiens
actttgttgaaaagactaggtaaggatttattatttctcaaccccagttccccatatgaaattcccagctctgcccgtaatttatcattgttaaatcacttattgtcaaactccattcacatgcatctcagggggcaaaaagtagagttctaaggcctgcatgcccttctttttctttctctatcccagggtaacgcaacacagtcacgagaaccccaatggatttgggtttgagtcctgaccccatcactcagtgactgtgtactagggctaaatacgtaatgtc

SEQ ID NO: 424167 - DNA, 309 bp, Homo Sapiens
  misc_feature (153)..(153): n is a, c, g, or t
aactggctctaatctctgtgccaccagctgccattgtctcgaagttcatttgcaaacaacagaaaccaactgtggctgggttaagtgggaagtttattaaacaatattggataggtcacatggtcaccaggctaagcggctccctagccaggnccaagatcccatgtcattctccagtactcccaggttcataccccaggacttacaccacagacacccccaatgctgggcactgtcactgggaccactgcctctgctcttttggaaactaaatgtagggggttctacttgtcaccaaaaggggtttta

SEQ ID NO: 424168 - DNA, 266 bp, Homo Sapiens
  misc_feature (60)..(60): n is a, c, g, or t
  misc_feature (98)..(98): n is a, c, g, or t
aaatactgttttgttgtgaattgaacagtgaggggctgggacagtgactgggggcatcancatagtcaatgcttagagcctcaaaaggttgtaatctngctctggggaggagtgaggctgagctgagtctcccacggtctttagaatgtgtcctggcaggaggactgagaacaggctggtcaggactggagtcagctaatgggcagacagggaccagagactcttgctgggggaaatgcggctttatgcaagtatctcgggctggg

SEQ ID NO: 424169 - DNA, 296 bp, Homo Sapiens
  misc_feature (71)..(71): n is a, c, g, or t
taaatgctaaacaatctatctgatatattctctaaaaacatacagaatataaaatcatggttaggaatttnagctttagagctagacagaacttgactgaatcttagctctgctaagagctgtgactttgggcatgataattgacctcactagactcagcttccgcatctataaaatggataatgatagaataatgagtgatggtggtaagaatgaaatgagctagtatctgcggcacctaggacagaacctggcatgtaataaacactcagtagacattacctgctggtgtggta

SEQ ID NO: 424170 - DNA, 329 bp, Homo Sapiens
  misc_feature (79)..(79): n is a, c, g, or t
  misc_feature (91)..(91): n is a, c, g, or t
  misc_feature (247)..(247): n is a, c, g, or t
gagatagagtcttgatcattgttgattttattactgaatgtattattgcattgcgttttatgaatatactataattttnaaatcaattatnctattaatgaacacttggtagtttctagtctttgactcttacctataaagctttctaaatatccttgtacaagtagttttgtaaacatgtatttccactctttagtaaatacctagctgcattatggtgctttgtaggaaactaccagatactttnccaaaatggttgaaaatcttatacactaccagtatattaagagtttatgttgctgcacttcctccacaactttagttgtcat

SEQ ID NO: 424171 - DNA, 277 bp, Homo Sapiens
gtccagacagatgaaggcaggaaggattagttttgatcatgcctgctgggtgtatgagtcacattctacctggtaattatttttgacatttgacagttctaggcacaaccttttgcagctctgaaatcttggcaggccatttatttttgaagcttcatattttccttttcacaggatatacctatttgggtaccctgttcaaattaaggtagagatttttgaagagtcacaagcccggaggaaaatgtagagtttcaggaaagaactcatcacttag

SEQ ID NO: 424172 - DNA, 283 bp, Homo Sapiens
  misc_feature (70)..(70): n is a, c, g, or t
  misc_feature (75)..(75): n is a, c, g, or t
ccaccacccctgcagaaccctggtgaaagaaaggagccaatctccatgccaccctggcctgccccatggnagccnttctcggcccttttctccaactaaaaacagtaatcgtccctaggtgatttgtcattctttttaacatggattttttttagttttaccccacccaaagcaccatgcttcatgctggaaggaataatgaagaggaaagagaaaccagaaatggtccctgctccctggaagctgtagtcgatggggggaagggtagataaatcaggcgagg

SEQ ID NO: 424173 - DNA, 279 bp, Homo Sapiens
  misc_feature (21)..(21): n is a, c, g, or t
  misc_feature (50)..(50): n is a, c, g, or t
  misc_feature (57)..(57): n is a, c, g, or t
  misc_feature (66)..(66): n is a, c, g, or t
  misc_feature (92)..(92): n is a, c, g, or t
  misc_feature (210)..(210): n is a, c, g, or t
  misc_feature (254)..(254): n is a, c, g, or t
cctcatctctgtgtgtgtgtncacttacatatactggctggcaactttanccgtgtnatttttttncccccaaatcctgtactgtagttttnaaaaagcactattaacatacagttgaagtcacagcaaaagccagtttgtcttctttgtgctcaataaaacccagctgaaactctttcacctccacttactattgattttcctattgtnctctacaggcgggtgtatctcactcactcatcagactgcctttnattctgtgaacctctctgaccgcat

SEQ ID NO: 424174 - DNA, 330 bp, Homo Sapiens
  misc_feature (66)..(66): n is a, c, g, or t
acttcaaataatgaccttttttctacctaacaattactgagcattcaactctgtgctgcgtgtgtnctgacccttcacacacaccacctcactaatcctcacagtccttgaaggtggggactagtgtcacacgtggccattgggaacatcacacagatcaaaggctgggctcaaggtcacattgcctaaacacacattcatgtgacgtgagaaccttaactcttgccctcccagtgacacttccttctctgggtttccattccgccttgcagagagcattctgacttactgtagccttctgtgtgtgtgtctcccctctctactgtgagc

SEQ ID NO: 424175 - DNA, 258 bp, Homo Sapiens
  misc_feature (94)..(94): n is a, c, g, or t
cagaatctcagttcatggctaaggccaggttgtgatctaagactactaacatgtcctgatcggaagttatcggccccctgctttgttgcctgtnctggctgtgagcttgcagggcagggccatgtttattacttgtgtacaccccaagggcatcgttctgtatgaacttgtagtcacttatacttgaaaaaatgttggcttgaaaaaagagccacgctttgtttttagaacactttttctcttaaaaaagataaaact

SEQ ID NO: 424176 - DNA, 351 bp, Homo Sapiens
  misc_feature (90)..(90): n is a, c, g, or t
  misc_feature (103)..(103): n is a, c, g, or t
aaaaccaaaggttctttcactgctctgactccatccacaagggtacaccacgagggtactttctaccaccaacttgcagaaaactagagnatgtgaccagagntcatgttttgatcccaagatgggtttccccattgggtctctttcattagcctccctgactactgacaaagttgcacagttttcaccaccatgagaaacaatctgtgtatagatgtgtaaatttccagtgtgtatttttatatggcttaagggtaaatcaggtaataaggcaagctcacttccctgaccacacctttaatcagaagtctaaggaacagactgtttaacctgtttccagtggtttcaggg

SEQ ID NO: 424177 - DNA, 330 bp, Homo Sapiens
ggccttcgtcttacaaaaaaggttgtcaaccaataaatcagggcatggaatgttttccggagtcttgacctcgatttgtaacttggtgcagaagtctagattgtaatcttaattcagtttctaatttgctgtgtagccaggagcaagtcttttagcaccacccggttttctctgctatgacttgcttaccccacagaattactgagccttaaataaggtaatgaatgtaaactagctgaagaaacatgaagcaagtgcaaagcatcagtagaagtgttatgtgtacattttgaattctaaataacccaagaagtaacttagccatatata

SEQ ID NO: 424178 - DNA, 283 bp, Homo Sapiens
ctttctaaaatacaaatattttattccaatgttttgacattctaatggctcagaagaacaatttatatgtccttgtagctgtgctcctctttgagatgtgacctgcaacagggctcaattgctttactattagttctccatttccatgcttcatttccttcatgtagctcgggctggagaaaaatcagcatgttctgatgagtttaatactatgaggcagtatgatggacctgaatttagtggagattggagctccaaaataaatacaacaccatgtgtcaaa

SEQ ID NO: 424179 - DNA, 316 bp, Homo Sapiens
  misc_feature (12)..(12): n is a, c, g, or t
  misc_feature (90)..(90): n is a, c, g, or t
gattcccgtagnccacttcctttagatggagccatgttcttgggcaagtaactgggaaaaagagaaacagagccagacccagaaattggntcattgtagaagttgattgaaatgcattgcttgattgcctgagccttggtctcagtgaaagagtgacagagccactcatcccaacaaaaggaccctgacgcccagtgtggtgctgtatggacaaaggcccaaagtcagggcggactaagaaaatctagttactaaccattgccttgcatctgaaatctacagcttgcaatctagttgtcaaattgttgttagcatt

SEQ ID NO: 424180 - DNA, 262 bp, Homo Sapiens
  misc_feature (81)..(81): n is a, c, g, or t
  misc_feature (190)..(190): n is a, c, g, or t
catttcaaaacttctcccttcaaatcaccacatagagaacaacacgccctggaaagggattcatgactaattatctatggnggacacgggttttatatcaggggctactagtggagcaacaggacaccaccagtagagaaaggagactgatgcacttaacacttacaggtgggaaggaaacaagattttnccttatgcctcttggtgcacaatcaagtgtatacatggtctatcacacttcaaaatcacgttgaatgccagt

SEQ ID NO: 424181 - DNA, 269 bp, Homo Sapiens
  misc_feature (154)..(154): n is a, c, g, or t
  misc_feature (194)..(194): n is a, c, g, or t
  misc_feature (241)..(241): n is a, c, g, or t
gccagagcccagaagctgggactacagttaggagggctgctggcagggctgtgccaagaaggacatgggcactgctggcgatgtccctgaagctagacgggagaagacgctggctttaccaccagtgtctcctgttggccatgttgaccagganccaggagttaggggcggggggcctctatgagacagtgcanggcactgatgagtgtggctgagctgtcactcacctggccagcccttnaggacagctggggctcctcacggcaggc

SEQ ID NO: 424182 - DNA, 302 bp, Homo Sapiens
  misc_feature (32)..(32): n is a, c, g, or t
  misc_feature (98)..(98): n is a, c, g, or t
catgagttttagagactatcatctggcttgtnaatgtccagggaacaactgcagtcagtgaagttaggttaacttccagctgccgggagattgcactncgggaaatcggggaggtgttcagtgagagcgtactgggaggggctggcttcaggatttggatttgtgctgagtgatttgagagagagttctgtttaccttggattgtgggctttcaggacacaggacattctgtgattgaatattttactactttttatccaggaggcaggggagtaggggcacggagtgaggctagagctgtc

SEQ ID NO: 424183 - DNA, 334 bp, Homo Sapiens
  misc_feature (71)..(71): n is a, c, g, or t
  misc_feature (143)..(190): n is a, c, g, or t
cagaacagagtatttggttggaaggaagtttgagattccagggtgtaatcatgggattctgaggttctaangttgaatgattttaagctgcacagatgctgcaacatcttgtcctgtacaactttttaagttttgtgggaagnnnnnnnnnnnnnnnnnnnnnnnnnnnnnnnnnnnnnnnnnnnnnnnngtgtgaagatcattaaagtcaacatgatcaagaaaatgtgagaccagagtgttatgaattaaattattccaatatgtcaatagaagttgagatgaaaaggaatcaggtacccaacactcaggcattacttaggtatcccaaatc

SEQ ID NO: 424184 - DNA, 311 bp, Homo Sapiens
  misc_feature (70)..(70): n is a, c, g, or t
  misc_feature (281)..(281): n is a, c, g, or t
gagtatcacctctatggaactaataaaccttcctagaatccgtttttgaataatgtctggctcacaagancattttcatcaaataattttaactctttttgccaagagatgtaagcaaatatgtgaaactgatcaagagaagtgaaaagctctgtacagtcaaatagaagttagcaactggcaaattagctcaaggtcagattttaaaaatagaattcagaatcatgacactcagaagtgatttgtaatttcacgagtagagacatcctgatattgcatangggatgttttccttttctaagagcagccct

SEQ ID NO: 424185 - DNA, 308 bp, Homo Sapiens
  misc_feature (60)..(72): n is a, c, g, or t
  misc_feature (162)..(162): n is a, c, g, or t
  misc_feature (190)..(190): n is a, c, g, or t
  misc_feature (223)..(223): n is a, c, g, or t
  misc_feature (240)..(248): n is a, c, g, or t
  misc_feature (257)..(257): n is a, c, g, or t
  misc_feature (259)..(259): n is a, c, g, or t
  misc_feature (293)..(293): n is a, c, g, or t
ttttgacctgctcaattaaaaataaacactggcgtttataatgaaaaggtttttttgtcnnnnnnnnnnnnntcaagagaatttattttgtgatagtaataattttcaagaccttcagtcattcctatgtctatgttgctatctttattttaaaacttaganccctgatctaactcccttctcaagtgangatactgtgtagattcaagaattataatgtagngtaataggcctttaagnnnnnnnnnaatctgttngnaataaagagcatgatttaattattgttgaattancaattaaaatgaatc

SEQ ID NO: 424186 - DNA, 313 bp, Homo Sapiens
  misc_feature (22)..(22): n is a, c, g, or t
  misc_feature (67)..(67): n is a, c, g, or t
  misc_feature (74)..(74): n is a, c, g, or t
  misc_feature (116)..(116): n is a, c, g, or t
  misc_feature (128)..(128): n is a, c, g, or t
  misc_feature (193)..(193): n is a, c, g, or t
  misc_feature (224)..(224): n is a, c, g, or t
atttgataaagtgaagtttatncttttaaacaaaactgaaatagtcacttcataattcacctttttnatatggncagattctttacagcatgtctttttaaagctaaataaaattncaatgggctttncagctgtggagacatgttccagatggttataaggggctgtcctccaggttatctcaccatcagtncaccctaataagcagcatatgtgtgtatggnctctattgccagttattggcaaacaaggatgttctacaacattgaggaactatttctcaggaaatgaatgggtaaatcaagattcagac

SEQ ID NO: 424187 - DNA, 287 bp, Homo Sapiens
  misc_feature (22)..(22): n is a, c, g, or t
  misc_feature (46)..(46): n is a, c, g, or t
  misc_feature (70)..(70): n is a, c, g, or t
  misc_feature (132)..(132): n is a, c, g, or t
  misc_feature (251)..(251): n is a, c, g, or t
tttaatgccataatattatatnagcatatgccgtaacatttaaaantgcccatcctctccagcttcagtncaagcaggagtggggaaggccatagactaagcccaccttcaaggtcacacttccatattttncacagagaagaaaatgcagtctcccatccaggtcctcagacccacacaccagcccaccactctcattccagatgccctaagcctgggtctggacacatgtggtcaatacacatcctggntcttacaaatccaatggtggccagcagtagaactga

SEQ ID NO: 424188 - DNA, 359 bp, Homo Sapiens
  misc_feature (235)..(235): n is a, c, g, or t
gtgtgatgggttggctttcaaactagtgtttctcgcactgttagaagttattgtccaagtggaaaggatgcagaggctggaattttccagtgggatagaagagcaggctaattaggaaggaatattccagggaatgcaaggtgcaactgcgatattgctccatccctggacctgagggagacaaagaaagttcttaaagggctgcagatgctgtcctctgaaggtcttctctggntcgctggcctactttggaaacatgcaggccattgagtgccatggggctgcccatcagtctgatccacacgaaaggctctgtgcatttcaagagcaggctggtagctcgccattcctggggagga

SEQ ID NO: 424189 - DNA, 330 bp, Homo Sapiens
  misc_feature (45)..(45): n is a, c, g, or t
atgggacttcaggaataatttattcaatgctaaataaggtgaggngtggcaagtctaaaatacataccctctatgtacattctaatcttgttcattctctacaggtacaacaatatacacattcactcacccaactcaccatttcctggcagctaaaatgacaggatcttctctacaacttatccccacccccatcagtcatacccaccttctggaagtcagatccttcaggtgattgcctactggccacaagggcacccatcatttccgtggcctctgtggtttctatccctgcctttctgggggcagaaatgtctgctgcagtccttc

SEQ ID NO: 424190 - DNA, 350 bp, Homo Sapiens
  misc_feature (157)..(158): n is a, c, g, or t
aaaacgggcactgtctgggggaaatgattcaacaaaccttatttatctggttgttcgtccctggtgtctgggcttaccgggttcttcaccttggagatggttatagggaaggatagaggagcaagtgtttaaagatctacttgttaatattcttctnntattactgtgtacgcatccgccctgccccattctattgacctgagcacctggcattctaaagtatctctgttaactcccccagttggtctggccaaggagtactcggcacgcttggttccagaaacagaataccctgccggctggtgatggtaaaggtagaggcggggttttgtaggggcacagctggcagg

SEQ ID NO: 424191 - DNA, 296 bp, Homo Sapiens
  misc_feature (75)..(75): n is a, c, g, or t
  misc_feature (95)..(95): n is a, c, g, or t
  misc_feature (169)..(169): n is a, c, g, or t
  misc_feature (244)..(244): n is a, c, g, or t
ggggttccagctgaattttctgtcccgaggttgagttagaaatcagcttttgtttgctttacaatttctcgtggnttcagtcaaacagtggtgtnaaatgtggtatcattgacatctgtggtagccttcgttctctgaagtctatcagcaatatccatgctgataattnagtctaaatgattgcccagccacaagctggacagtgaacactgttttctcagttgggttgggtgctcctcagggngtcccactatgccaagcagatgaagcacagtttgccattcactgagaaggag

SEQ ID NO: 424192 - DNA, 333 bp, Homo Sapiens
  misc_feature (204)..(204): n is a, c, g, or t
acaagttttattttagccttaaaaaatatcatttcacttgatccacttaccacataccagacacttagccttttcccacctctgtgataatagtggacagatatgggtgactcaaagttagcttcctttttgtggttctggcctctttggccaactattttctttggagttactaatgagaagccaaactgattgacatgagtnctgtcctctctttccccaagtccaccctctggccagaggtactaatgagctttgtcatcagtgttaggtggatcaggagacaggagacacccacatgacccacagaccagatcattagcatcaaatata

SEQ ID NO: 424193 - DNA, 188 bp, Homo Sapiens
  misc_feature (22)..(22): n is a, c, g, or t
  misc_feature (71)..(71): n is a, c, g, or t
  misc_feature (78)..(79): n is a, c, g, or t
  misc_feature (175)..(175): n is a, c, g, or t
cgtccccgcgcacggccggggnggagcacgggagtggcgagcttcaggtccaccggctgccaccgaaagangggaccnnaagacaggagaggtcgctcagccaagagccccggggaggcggtggtgtctcggcggggtcagcaacggtctctggggggtcccctgcagcgcgcancggtttccgcctc

SEQ ID NO: 424194 - DNA, 307 bp, Homo Sapiens
  misc_feature (60)..(60): n is a, c, g, or t
  misc_feature (91)..(91): n is a, c, g, or t
aggttaacatgacatagctagaaaaacacgctatatttcaaatatagcagttaagactgntgggaaagtaaacattttttaaaattcatgntaagttccccaccggttattgacaggtttatggttttacgttagtaaatattgatttattaagtatatactctttatagaatacaatacagccctaaagtctgagtggaaagcagaaggagaattacaaaagaaatgaaaaataagcatcttccaatgaagcacttaattatgtatgtatgttgtaggcaaaatgaaaaatttaatatggacactt

SEQ ID NO: 424195 - DNA, 287 bp, Homo Sapiens
  misc_feature (195)..(195): n is a, c, g, or t
gagtaagagggcctacactttatcattttaatgctaagtagtaatggagtgggaataaagtatccaaattgagagataattaatagtcagttttggataattgtttactcaatcagcagataatgaaggagcataccagtttccttcccataggccagggaggatatgctggtggataataggacagggcttttnctctcccagagctctctaacgggataagcccgagataggctacactagttgaataggaaagataggatcttggtagaaagagactctatcga

SEQ ID NO: 424196 - DNA, 200 bp, Homo Sapiens
  misc_feature (136)..(136): n is a, c, g, or t
gctccttaaggaaaagtcagcaatttaaatcaaaattaaagcttgaatctctaaaactggctaacctcatctggaacatgtggctcccgcttgcacctaagatcaccttctccattgtctaccaggctagcgtgancacacctgttcagttttccaactatcagctaagagaaagacttcattaatatttggaggataca

SEQ ID NO: 424197 - DNA, 254 bp, Homo Sapiens
  misc_feature (21)..(21): n is a, c, g, or t
  misc_feature (72)..(72): n is a, c, g, or t
  misc_feature (107)..(107): n is a, c, g, or t
  misc_feature (112)..(112): n is a, c, g, or t
  misc_feature (128)..(128): n is a, c, g, or t
  misc_feature (181)..(181): n is a, c, g, or t
  misc_feature (215)..(215): n is a, c, g, or t
  misc_feature (225)..(225): n is a, c, g, or t
agttatttatttttgtctgtnctatttcaaaaggcttgtcttcaagttgcagaattcttttttctgcatggnctaaatctgttgttgcagctcctgatagtattttnaattncattaattaaattctncagctctaagatttctgattggttatgggttatatccatctctctgttaaatncctcattcatatcatgaattattttcctgatttngttgaatttnctacctatattctcttgtatctcactgac

SEQ ID NO: 424198 - DNA, 290 bp, Homo Sapiens
  misc_feature (77)..(78): n is a, c, g, or t
  misc_feature (163)..(163): n is a, c, g, or t
  misc_feature (170)..(170): n is a, c, g, or t
  misc_feature (275)..(275): n is a, c, g, or t
cgaaacaaaaagcaagttcataccgctgcattctgttctcttgttctgacggttaattcactggacatcaaattttnnttgccctagttttccccaaaagaagacaaaagcaaaaatagttatattaatgttgaatgtgctttgaagtcacttgataagaggngctatgnatagcaacttactgtgttactacattgcctttttggcattggttgatttataattttggtaaaggatcctaaaaccctgtattctttttctgtgccccataatgnccaaaaaagataaag

SEQ ID NO: 424199 - DNA, 337 bp, Homo Sapiens
  misc_feature (31)..(31): n is a, c, g, or t
acttagctcagcgggtgtattatagtttgtnatggctgccatgatgaagtatcacagactgggcagcttaaacaactgaaatttatttttcacaattcttgagtctagaagtcccaagtcaagatgttggcaaagtcagcttctttggaggcctctgtccttgccctatagatggtcatcttcttcctatgtctttacgtggtcctccctttgtctgtgtgcttcttatgaggacatcagtcatcttggatgaagtcttcccatatgacctcattttactttaattacctcttcaaaggccttacctcctaaaacaatcacatgctgaggtactagt

SEQ ID NO: 424200 - DNA, 201 bp, Homo Sapiens
  misc_feature (27)..(27): n is a, c, g, or t
  misc_feature (69)..(69): n is a, c, g, or t
  misc_feature (158)..(158): n is a, c, g, or t
  misc_feature (160)..(160): n is a, c, g, or t
  misc_feature (177)..(177): n is a, c, g, or t
acagcagtgctcagaccagtgttcatncctactccatgggagggggcaggaatgccgagatgggaagtnaggccaggcgggggtggaaggacaccagcccgggagccagcactaactgcatcagggcctgggggtaatctggttactgcatcctcagntnctgcagtggttagactngtgcccactgggtggggggaggag

SEQ ID NO: 424201 - DNA, 269 bp, Homo Sapiens
  misc_feature (14)..(14): n is a, c, g, or t
  misc_feature (26)..(26): n is a, c, g, or t
  misc_feature (43)..(43): n is a, c, g, or t
  misc_feature (62)..(62): n is a, c, g, or t
  misc_feature (83)..(83): n is a, c, g, or t
  misc_feature (132)..(132): n is a, c, g, or t
  misc_feature (166)..(166): n is a, c, g, or t
  misc_feature (170)..(170): n is a, c, g, or t
  misc_feature (183)..(183): n is a, c, g, or t
  misc_feature (227)..(227): n is a, c, g, or t
  misc_feature (239)..(239): n is a, c, g, or t
gcagactctatttnattgctccagtnttcatattgtaaatcantcacatggtagcaaatttnttgctagcaaatttgtctctnagttctttacacttgatatttggagtggccatccaccatcctacatggnccaaaaatccaaattacaaactctgagcaccagnttcncaaactgtatttnaggattgcaagctatctgctatcctgctgtgacctcaagtggantgtgttttaaantaaactcgtcgtctttataaaactgtcttc

SEQ ID NO: 424202 - DNA, 197 bp, Homo Sapiens
  misc_feature (25)..(25): n is a, c, g, or t
  misc_feature (28)..(28): n is a, c, g, or t
  misc_feature (68)..(68): n is a, c, g, or t
  misc_feature (144)..(144): n is a, c, g, or t
gtgtttgtttctgagaaattctgtnatnctgtttcttgtctaattcctggttagtgctatgtcctttnccacaattcatcatcaaaactgttgagtctatgtcttgtcttgaaccactcccggttacaactgtgtaggcaaganagcaccctatgtaaaaggcatggcttcagctgtgtccctttccacagagaggt

SEQ ID NO: 424203 - DNA, 272 bp, Homo Sapiens
  misc_feature (98)..(98): n is a, c, g, or t
gattcaaagcacttgaaagtaaagacaatatcatgaggtcgaaaaaacttcaaaaggatattaggtaagagaaaatgtgaatgaaagcagtgaatttntgcctctcctcgtatttagggtacttaaaattactaaaaaatactgtctttttaccatacagctagatggcctgtattattcttaatgtggccaaaggagtgaagactgattagggttttagaatttggaactgtagtcacataaaggcatcttttgcatttcttaaaccagta

SEQ ID NO: 424204 - DNA, 275 bp, Homo Sapiens
  misc_feature (36)..(36): n is a, c, g, or t
  misc_feature (127)..(127): n is a, c, g, or t
  misc_feature (131)..(131): n is a, c, g, or t
  misc_feature (157)..(157): n is a, c, g, or t
tgttggttctgtgggatccggtcctcaccactgccngcgccagagggcgcactggcgtgcagacaggccgtggtgctgttcggagacgtcgctgggactcgccgaagctccaggcccagagaagagncgtnacgctgccccgaatcttcacctgcantcctgagcatccctggctggcgctaagtccaaccacatggagacttcagatctcggaaggcatcgaggggagccaggctgacctccgcctgtcctgtgcggtctaccactgtatgaag

SEQ ID NO: 424205 - DNA, 207 bp, Homo Sapiens
  misc_feature (81)..(81): n is a, c, g, or t
  misc_feature (99)..(99): n is a, c, g, or t
  misc_feature (116)..(116): n is a, c, g, or t
  misc_feature (125)..(125): n is a, c, g, or t
  misc_feature (162)..(162): n is a, c, g, or t
gggctgtgtgggtaatccgcaaccagtggggagagggtgagtacgacccgaggacagtggcaggtgaagagtacttcggantatggactctgaactccnttggagatgttggcagncagccacgnacactaaataccacagtgtcatcctcagataaagatncctgcggtaaagcatcctggacgtggtgtgggctgggtcacaatc

SEQ ID NO: 424206 - DNA, 262 bp, Homo Sapiens
  misc_feature (17)..(17): n is a, c, g, or t
  misc_feature (175)..(175): n is a, c, g, or t
  misc_feature (199)..(199): n is a, c, g, or t
  misc_feature (220)..(220): n is a, c, g, or t
  misc_feature (239)..(239): n is a, c, g, or t
ggtggttgtcgggtgcngggttttcgggtctatagccccggggtaaaaggagcactgcggatacatggagtacacttctgaagggctcaatgccaggaagctcccgtcctaaacagcgtttcgttcttgctgggccatggaagcagcgagagaaggagtgccctcacagcaccangtaccctctttcatcaaccatccntggtatgtggccagattcgcntctcaagttggcgtggcanggtggtgccaggtttgagtactt

SEQ ID NO: 424207 - DNA, 239 bp, Homo Sapiens
  misc_feature (22)..(22): n is a, c, g, or t
  misc_feature (27)..(27): n is a, c, g, or t
  misc_feature (125)..(125): n is a, c, g, or t
  misc_feature (181)..(181): n is a, c, g, or t
  misc_feature (216)..(216): n is a, c, g, or t
aaattttcataacgtatttacnttccnagtgatttggtcatttatcacgagcaactgttaagggaataacttgggtataagatagctgaggcatgaagcattaacctaatttatgcttcgctgtntgtttccagagaggaagctttacaattactctcagttctttagggcagagcttttnaagaggttgcagagaaggattatgactaatgagtncgcttgtcagctaaatgggcaac

SEQ ID NO: 424208 - DNA, 199 bp, Homo Sapiens
  misc_feature (75)..(75): n is a, c, g, or t
  misc_feature (95)..(95): n is a, c, g, or t
  misc_feature (126)..(126): n is a, c, g, or t
  misc_feature (141)..(141): n is a, c, g, or t
  misc_feature (143)..(143): n is a, c, g, or t
gacatgtcatttctcctgtatgggggcaggtactcgccttgttgctccacttgagtcagactacctgctcctggnctcagatcacatctgagagnactctggcaggtcacagaggcaccattctgncctcaactcgcagtntntgtgggacagggttgaaggggagatgagcacagcttcttgttccatatccatctag

SEQ ID NO: 424209 - DNA, 264 bp, Homo Sapiens
aaataacatcattccttagataaaaatgcaatcttacaggaatatacaatagtgtctcacacagagatgaccctgaagctctccttgaagggttgccccttctagattccctggcctttctcgagggtgagaaggcccatcaggcgaggcctctgacaatgggattatttgaggattacaaactgtacaatgatatttacaacagtaagactgtgaagtcgtggagcctggaggggagggtgtgggggtgtgtaggggtgtggg

SEQ ID NO: 424210 - DNA, 242 bp, Homo Sapiens
  misc_feature (24)..(24): n is a, c, g, or t
  misc_feature (41)..(41): n is a, c, g, or t
  misc_feature (135)..(135): n is a, c, g, or t
  misc_feature (146)..(146): n is a, c, g, or t
  misc_feature (168)..(168): n is a, c, g, or t
gtcagttattaaaaatgttttacngcataactaccaagagntattagtgtgtccttcggaatgacacctcactttctctctttcactacaggagacttacaagaaaagataactcatcaaaatggagaacatctntgcataatatnaaaatctcttctgctataccanccttgaagactggtacacttattaagaaatacgtttcttaataaattagtttgaaaacttaggtttcttagaaa

SEQ ID NO: 424211 - DNA, 165 bp, Homo Sapiens
aaatgacagggcaaggcttgagccagatcttctgagtcctatccagtgttctttccaatctactgcttgttttgtaaagcatggcacttgcttataaatccctctgaagtaataaaactctctagctctcatccttgtgtatttaccctagaaatatgaacattt

SEQ ID NO: 424212 - DNA, 337 bp, Homo Sapiens
  misc_feature (112)..(140): n is a, c, g, or t
  misc_feature (146)..(269): n is a, c, g, or t
ggtctctcagagggatgtgaatacatcaaggtcctcgtgggactcaggaatctgaatctgaattttatagctcatccacaggattcacatgctggtagtcctcaggttatannnnnnnnnnnnnnnnnnnnnnnnnnnnnaaaggnnnnnnnnnnnnnnnnnnnnnnnnnnnnnnnnnnnnnnnnnnnnnnnnnnnnnnnnnnnnnnnnnnnnnnnnnnnnnnnnnnnnnnnnnnnnnnnnnnnnnnnnnnnnnnnnnnnnnnnnnnnnacctcaggtagttatactttgaaaacatccttaaagtgctggctttcttcaaggttcagtactgtgtc

SEQ ID NO: 424213 - DNA, 304 bp, Homo Sapiens
acacgctcactagatgagcattgaccaaatatttagataatacctgttgggaaagtgctgaattactagcctgcctgagaatcccacacatttcagtccaagaaaaccttcctcaaattttccatctcccatcagaggagctgcaaaagggtctgaagaagtttggatagggagccagtgtgaacacaagccgagattttcagaaggtagccaccgaggcatgttgtggagagcagttgttccaggtttatggaagggccaagaagagcacattcaaggggttgtctgatggcagggccattgt

SEQ ID NO: 424214 - DNA, 220 bp, Homo Sapiens
  misc_feature (29)..(29): n is a, c, g, or t
  misc_feature (53)..(53): n is a, c, g, or t
  misc_feature (83)..(83): n is a, c, g, or t
  misc_feature (85)..(85): n is a, c, g, or t
  misc_feature (90)..(90): n is a, c, g, or t
  misc_feature (101)..(101): n is a, c, g, or t
  misc_feature (116)..(116): n is a, c, g, or t
  misc_feature (135)..(135): n is a, c, g, or t
  misc_feature (149)..(149): n is a, c, g, or t
  misc_feature (187)..(187): n is a, c, g, or t
ttgattattttaatggtttttgaacccantcaatattatgcaatattttaatnaaacataaaattttaatcacaaaacacttnanccganaaaaacttttncactatcaaacaatnttatgcaaatacatcactncagtgcaccacagnacacctattgggggtatgccacagcactgagatactgnggatctctatttaccctgtttaacacaatgtga

SEQ ID NO: 424215 - DNA, 292 bp, Homo Sapiens
  misc_feature (201)..(201): n is a, c, g, or t
ctgttatttcctaatttgctgccattttatttatttatggttggagtcttctccccttagcactcttctgtcccccatatttggtgctgaacaattgctttgtgcgattgcgtttctcaggtacatcctgcagcctcctaccttgtgctgcagagacaacatctaatgcacagctgggctccgggacctggtgctcctggngtggatggcaaatgaagaactgtatctcattttcatgcaacttgtacctatttgtcccactaattttgcaaagaaaagaagcagagagagg

SEQ ID NO: 424216 - DNA, 278 bp, Homo Sapiens
  misc_feature (46)..(199): n is a, c, g, or t
ggcagaggcagggccataccatcatcttgggtgcacctattatggnnnnnnnnnnnnnnnnnnnnnnnnnnnnnnnnnnnnnnnnnnnnnnnnnnnnnnnnnnnnnnnnnnnnnnnnnnnnnnnnnnnnnnnnnnnnnnnnnnnnnnnnnnnnnnnnnnnnnnnnnnnnnnnnnnnnnnnnnnnnnnnnnnnnnnnnnncacccccggcagcatgggtagacatggccctcccgcctgatctcttaaaaaaactttaaataattcgtggggggggtta

SEQ ID NO: 424217 - DNA, 132 bp, Homo Sapiens
aatgtggaaaatttttttatctgttacgtctttcctattatatttatcttgtccttgatttcagcaccccacccgatttgcaggcagtgctttctaaactgtgccctgtgagctgttaaaaagtcttctgga

SEQ ID NO: 424218 - DNA, 148 bp, Homo Sapiens
  misc_feature (44)..(44): n is a, c, g, or t
  misc_feature (93)..(93): n is a, c, g, or t
  misc_feature (99)..(99): n is a, c, g, or t
aacgaaagacctcacatatttattactgaacccagacaaccagngccttcatagcacacacagaaagaaaaaatatagtcccagtgaaacatntccaantgtccagatagtggtaacattttcagcttgatatggtaaggtggtcgtg

SEQ ID NO: 424219 - DNA, 288 bp, Homo Sapiens
  misc_feature (57)..(214): n is a, c, g, or t
  misc_feature (267)..(267): n is a, c, g, or t
  misc_feature (277)..(277): n is a, c, g, or t
gttgaatcccaggccatggcttctgtgcttccgcatcactacacaagtgggagtggnnnnnnnnnnnnnnnnnnnnnnnnnnnnnnnnnnnnnnnnnnnnnnnnnnnnnnnnnnnnnnnnnnnnnnnnnnnnnnnnnnnnnnnnnnnnnnnnnnnnnnnnnnnnnnnnnnnnnnnnnnnnnnnnnnnnnnnnnnnnnnnnnnnnnnnnnnnnnnaagcacaattagaacagccagcacagcctctaggggcacagggaaggaaggtncttgtatgtnagcagatgaca

SEQ ID NO: 424220 - DNA, 288 bp, Homo Sapiens
  misc_feature (14)..(14): n is a, c, g, or t
  misc_feature (26)..(26): n is a, c, g, or t
  misc_feature (47)..(47): n is a, c, g, or t
  misc_feature (89)..(89): n is a, c, g, or t
  misc_feature (178)..(178): n is a, c, g, or t
  misc_feature (225)..(225): n is a, c, g, or t
gacccttgtttctntgccttttgggnaaagtgggcacattgcaattncttcatctaaccaaggaatttcaaagcaaactgctgcatttnttttcatctcagagggttctggggctctctcctgagctgctgtatacttagctgacctcaagctgccagcacagagcctgggctctgtnctgtggaaaaatagttgtgtgactttgagagaacatcttacactgtnctctcaaagcacttacactcagtgttaatctgactcactgatcacaggacaggggattctcat

SEQ ID NO: 424221 - DNA, 283 bp, Homo Sapiens
  misc_feature (16)..(16): n is a, c, g, or t
  misc_feature (93)..(93): n is a, c, g, or t
  misc_feature (110)..(110): n is a, c, g, or t
  misc_feature (115)..(115): n is a, c, g, or t
gtaatttacatttttnagcaccctgtgaacacatccttggggatgaataatagcagcataaatataagctgaagtaggacttataagcaagantagatgacaaataaggntaggnccctaaggaacctagcatcacaggacatgaatgagtggaggctaaaggggactggaataccttaatcttgaaagctaagggattccttccagattctaatcattattcacctttctctcagaggaagattttgtgtcaggtatatgtcagctttttattctctaagca

SEQ ID NO: 424222 - DNA, 183 bp, Homo Sapiens
aggaataagagggtcataggtttttaagaaaaccccctgctggaaagcctggcatatttcaaagtgctaccatttgaaaagtgagggaaacaacatttaataaataatgaaaacaattgcctggcagtctacaatttccaatacatacattgttttaatggatcataaactaaacacagtagt

SEQ ID NO: 424223 - DNA, 278 bp, Homo Sapiens
  misc_feature (225)..(225): n is a, c, g, or t
gacagcgtgcatgtttgatgtagaagtgaagaatagtcttggatcctcaatgtttatgtatttagtatgcagatagagtgtgtctttattggaagagtacaactcaggatgcttctgtaaagccaaggcagccctcctcactcttccacgtcacctgccaggccctcaaagcattcgggtttgcaacttggggtgggacagatgcagagattgtgggctattttnagtggccatttgcaggggacatcatttctccccctcgtgagagccacgtctgg

SEQ ID NO: 424224 - DNA, 140 bp, Homo Sapiens
  misc_feature (83)..(83): n is a, c, g, or t
aataaagggccttctttcactttattttcaaaatagcaagctaataagtgaaggaataagtaacattttaaacattagcagantatgattgtcagaattttgtttaattacatagttacatttcatcacatgataacaaa

SEQ ID NO: 424225 - DNA, 298 bp, Homo Sapiens
  misc_feature (19)..(19): n is a, c, g, or t
  misc_feature (202)..(214): n is a, c, g, or t
aaaaagtactgtgtgatangaaaaatgacattttgttttaggcttggataattgttgctgccccctctccttcatgaatagacactgtaagtcatggagaccttggatcagtttattttgtagcatgtgctgtgcatttgtgcattgcaggatatccaccattcctgtagctcaccattaagtgctagtggcatcctcccannnnnnnnnnnnnaaattacagtctaaacacattttcagaatgcccccattgagcatttctaggttagaggaaagaaggcacagagcaatatgtcga

SEQ ID NO: 424226 - DNA, 256 bp, Homo Sapiens
aaaggatataaagcaaagggtctgtgggccaatgaatatgtgtaccatgtcctttcctcctggggatgtataacaaacatcataagaagtttgatatgaacgagttatgtcttaacctagcatttcccaaaacttggacatggaacccttttctatgagacacctgtggaactattttttggaatacacttcttaggaaagtgccaggagaagcaacagagagagttcttggcagtatgtactttaagaacacact

SEQ ID NO: 424227 - DNA, 228 bp, Homo Sapiens
tcccagggtgatggatgtctaatgctcaggaaaggcgagtcagtctctgaggcaacagatcccatgggcctgggtagaaaatgcccagtgcttcccagtcccaagtgctggctttccctgtatctgcctctgccaggcaacacttatcaggctcccaatcagcaggagcctccatgctccactttgaacagcctctatgctccagcaatggggcatttgtgaagagtg

SEQ ID NO: 424228 - DNA, 215 bp, Homo Sapiens
  misc_feature (165)..(165): n is a, c, g, or t
catctgtatttatctagtgcttaataatgctaggccctagtcgatagtcaaatagctaagtgtcttcttagaggtgatccaggacctagtcctggctccatcactgtgatactctcagaataattaggagatttccttccattctttggatgtcaaccttccctnctataaaataggagcctggaacagatcttctctaagctcctttccagatc

SEQ ID NO: 424229 - DNA, 247 bp, Homo Sapiens
  misc_feature (136)..(136): n is a, c, g, or t
  misc_feature (138)..(138): n is a, c, g, or t
  misc_feature (151)..(151): n is a, c, g, or t
  misc_feature (153)..(154): n is a, c, g, or t
  misc_feature (161)..(161): n is a, c, g, or t
gaactaccctgaaagcactaaggaaaatgtagccgaaagttaagtaataggttttaaaaatttatcaaaatttattgatagtttgatctgtaaaacaaattgggtttcgtgctttctgatgtccagttaataagtntnttatgtgccaggntnnacatatngctctttgcaagtagccgttaaagtgtaagtcattgaagtttgaagatctataaatatttaatatagtagtctaaacagttgtgag

SEQ ID NO: 424230 - DNA, 251 bp, Homo Sapiens
  misc_feature (131)..(131): n is a, c, g, or t
  misc_feature (238)..(238): n is a, c, g, or t
ctttctgatctacagttcaatacagaaacaatgtattgatgttaaagattaaaatttactggctgaattttcacaaaaacttttgcatagttggagaattaggttgaaaaattagtgtcgtatttcagtangcatggccaatcatgtgtcttccattttgatcttcttactttttcaagtataacaatatttaataccagatattaaaatgaatgcatttagaagatattcgaaagantgaagcatgtgca

SEQ ID NO: 424231 - DNA, 279 bp, Homo Sapiens
  misc_feature (191)..(191): n is a, c, g, or t
  misc_feature (256)..(256): n is a, c, g, or t
ccttactcggcaagtgttcttggcagagcatcctattgaaaatattgcagtcctaaagaatgtctagtgatagaccttgtcatacaaacataagtatatgtgcaaaatttgcaagccatgcaaaggataagatgcttgaaggaggttaagaaatttcttgtggagttttagagagtccttggaaacagttnttttcttagacatgtaatcatgagttccctctccttcatgtcttcccagccctattttgtctggntctgacaaaaacaatcatccagt

SEQ ID NO: 424232 - DNA, 220 bp, Homo Sapiens
ggcctttaaatgctctcctatccaaatgattttctatcctggaaatgacacagttaactggatgagtggtatacagaccaagtctaatcgagaattctatcgttatgccaactcaaaagtggtttatgtggattctgcagttttacattactgtaataagtaaatgaggacgtcagtactaagtacatcctttcttagccattcagaacctttctaaatg

SEQ ID NO: 424233 - DNA, 159 bp, Homo Sapiens
  misc_feature (74)..(74): n is a, c, g, or t
  misc_feature (117)..(117): n is a, c, g, or t
  misc_feature (129)..(129): n is a, c, g, or t
taatattctcttccttgagttcaagcaaagttacttaaaatgcttttttgataatgtcctccctttcctctttnctttctggaatgcctattatttcgatgttgacttttgaatttnctcctgtaattnccttatttgaagaatcctatagtgtattgt

SEQ ID NO: 424234 - DNA, 278 bp, Homo Sapiens
  misc_feature (35)..(35): n is a, c, g, or t
  misc_feature (145)..(145): n is a, c, g, or t
  misc_feature (256)..(257): n is a, c, g, or t
gaaccataaagcatttttatcaggtacctctgttncaagggatttatgtcttagaccatagctgaattgaatgtttgcaaaacactgctataggataaggtggtctttagttttgaacgtgtgaaaggactgcacacttttcagncagggtttgagttactgcccagggtcatcgtctcaaagtaattcaaggagtgatttaacatcagcatttgaaatgtagtcttcatctcctgggatccataaaaaaatgtgnncagggaaatggtggctaagca

SEQ ID NO: 424235 - DNA, 176 bp, Homo Sapiens
  misc_feature (111)..(111): n is a, c, g, or t
  misc_feature (138)..(138): n is a, c, g, or t
  misc_feature (161)..(161): n is a, c, g, or t
aataaaaacaggattctcccactgctctgaaatgaatggattcctggttgatttaagatgactctgctttctaaatatgccagcttgaatccatgcagggctcggagtagnggaagtaaagcaactgcagctcctggnaaggaaacttcagtacctgcagngcagaccagcaacag

SEQ ID NO: 424236 - DNA, 260 bp, Homo Sapiens
  misc_feature (213)..(213): n is a, c, g, or t
cagtttagtgtgcagcagtgggtgcaggcgggcgagtgggccccacaccttgtctcttaagtggcctgcacagtgcgaacagctggatctgacaacaagatgtcaccagggtgagagccagagtgagggacgtgctgtttccctctcccagcattgggagtatctgtgggttcagcactagcactcggggacagctcccagccgggttccttncagctcctggacctgctatttcaaggtgagaatttcctcccccagag

SEQ ID NO: 424237 - DNA, 321 bp, Homo Sapiens
  misc_feature (237)..(237): n is a, c, g, or t
gctcttattgttactaaggaacaagtactaagcctataagaggagtagcctcatgtgaacttggaggaaccctccattctggaccccagatctttttttatgcacccctcatccatgctctaatagcgctggttcgcacgggcaccggcagagacatgttctcaatcctggcatgatgcaatgggagctctttgcagtgatcatcagcctctccgtcctcttaggcatggtcccctntccccagtcaggttgatatgaccttcaacaccagatggataatgccccaggcgggaggaaaggatgctctgggagagtagcctt

SEQ ID NO: 424238 - DNA, 312 bp, Homo Sapiens
  misc_feature (120)..(120): n is a, c, g, or t
  misc_feature (183)..(183): n is a, c, g, or t
  misc_feature (272)..(272): n is a, c, g, or t
ggtgaataagacaggtcactcagggagtgcaaactgaggaagagatgggccagctcggtgcagtgtgaggaacgctctgatatctaggcggggaccatcattctgcgtggggtcacaggntcacttggaaaatgcctctttgtagaggtctagccatcgtctgcagcctctggcatgggtgcntgtgacaacagctgcgtcgccgtgtttctatctagattggctctggggagaggaggcagggagctcgtcctgtgtgggccatgccactnttgtgcagaggaaagtgatttaagacaagagagaagtccc

SEQ ID NO: 424239 - DNA, 210 bp, Homo Sapiens
  misc_feature (14)..(14): n is a, c, g, or t
  misc_feature (174)..(174): n is a, c, g, or t
  misc_feature (190)..(190): n is a, c, g, or t
ctttgcaaagtggnctttaatacagcctgaatgaaagacgggcatcggtgctcatggttaatgttcaagggtcaaaggagttatcaacttggcaaagtagggagcaggggaaggcacctggctcacccattcctctgagtgtttctcacatcacagtagacatagaaagagagntataaaaacaacatgnttggcattctattaatcaag

SEQ ID NO: 424240 - DNA, 265 bp, Homo Sapiens
  misc_feature (193)..(193): n is a, c, g, or t
gattgtagatcttcttctcttgatagccagccaaaatcaggaacaggaagatacagaagacagtgacagggagcagtcaggcgaggaaagaaaagctctaatttggcgatggaaaatccgctgggcaaagcctcacagtcagcagtctgggaggacacagagctgaggcagggtcaggcaagagtcacaagantaagagaaggctgagaaggccggtggctaatgagaggagtggggagacctgagggtggagccagcggcacag

SEQ ID NO: 424241 - DNA, 260 bp, Homo Sapiens
  misc_feature (50)..(50): n is a, c, g, or t
  misc_feature (128)..(128): n is a, c, g, or t
aacattaagatagcaacaatttattcttctagttcgatttgcatattttnagagaatcacaaataggaatcatctcaaccaaaggaatgaatacctaatggtaaaatttcagccatgtgatacttggntagggagacatttgagggcagagtaaagctagctagtatccactcctccttcataatggcacctcagtttcctcttgggaaattttctctcccccatgatgtagcctaagggcttacctcctattagggata

SEQ ID NO: 424242 - DNA, 103 bp, Homo Sapiens
tcatcgcgctcggcctggtattcccgggcagtcattctccatcatcgctcccggacttccatcctcattactattctgcctgcaactcaactacgaacgcact

SEQ ID NO: 424243 - DNA, 301 bp, Homo Sapiens
gtgtcacctcgtcttataactttttttgttattctaagacaccaacttatttgcctcatttagagcaggtcacaatgtcattaacgcttagttgagagttttttctcattccgcggatgtaggaaaaatcgtcactggactgtccacctcttaatcaactcttggcatttctgcccagccttcgtgtgttgtccttatttgctgggatcccttgttgggcaatcactttcccgagctcttagttgttcaaggtctctctgtcttgatcataatattgtacatactggttacaaatttttct

SEQ ID NO: 424244 - DNA, 148 bp, Homo Sapiens
gacgatccccgtaccgatgtcacttaatgtgtcaatttcatcatacactttaccatttattttcataaatgctttcatgagctagcattattgttatgatacttaaatggtcataatcaatcagaactgtttatattctgcctaatat

SEQ ID NO: 424245 - DNA, 215 bp, Homo Sapiens
gtctctagcaggatccccttcatttaggcaatttcactatgtgccattaaagtattcgttggatttatccagactatgttaaaaaccatcatcacagcttgctataaatcaatagctgggtttaattgactttggtcgtggcttcccagggatttcccatgtcattaagtccatatctgaaagttaaaagttctgtctacctatcataagctgca

SEQ ID NO: 424246 - DNA, 176 bp, Homo Sapiens
ggtcgatctctagcaggatccccgtatcccagaaagctatgggacctcttataactaatgatagtcacccctgttcaccccaggattttatcggcttatcaattctgtacaacactatgatgataaattaatgataaagtataattcatgtaatgttcctatttgacttcactaga

SEQ ID NO: 424247 - DNA, 342 bp, Homo Sapiens
tatcatttatttaatctatcatacccaggtttttgtcttgtttcatatagtagaactactccatcattcataaaattgatatctggcaacctactgcttacagtcagataatgccactttcagttcaataaggcaagtcacaccttttatagctattctctctcacagtcctacgagatattgtttcacttcaatttcacagggacacttcatgatttatctcatataggtaataagacaatcctaagttgtaggattcctattaagttgttgcttttcttgatggaaccctttacttgaattttctcttctcctttctgaaatttgtttctttcattatgt

SEQ ID NO: 424248 - DNA, 121 bp, Homo Sapiens
tctctagcaggatccccttcatttaggcaatttcactatgttcattaaaagtattctagcgatttagtccagcattatgtataaaccatcatcacagcttgctataaatcaatagcgaggt

SEQ ID NO: 424249 - DNA, 259 bp, Homo Sapiens
ttcggtcaataagtataggtcatacaaattgaaaccgtggcgcctaatatgttccgcaaggtgacagatcagatattatgacctcagcatttatagcgaggactaaccccttattccttctgcattatgaattaactagaatataactttgcaaggagagccatatcttagacccctcgttaatcagacaagctaccttagaagcagcttatatagctcgcccgtctatttagcataattgtgggaagatttattggtc

SEQ ID NO: 424250 - DNA, 213 bp, Homo Sapiens
actataacaagccctcctgttagagctgatggcagcccattaaagtggtcaggcgatggcctgggattgtagtgcacaaggagtgttgatttcctgttccccctcctctgggttcccaaactgtccactcttctgtgtactccacaagttacaatacccttctctcaattcttctgactcaccacatcctttcccgcatttgcctcaatgaca

SEQ ID NO: 424251 - DNA, 427 bp, Homo Sapiens
gctcggcacctcatttaggcaatatcaccaaatattctattttatttccatatctgcactttcttcatgtcaacactcaagaacgactaggcttgttgttcctgtgggcctctccaagagtcagtttgcccacttcacagttttagtgaaagtgcattccacattttctatctgatcctccacaggaagcatacaagcagtatagtttaagatcttcaactagggttctaccctgcctttatgcctctagtgatggtatacacactgcactcatgatgttggcagtttcaaagttgaacaattttagacgttataaagttttcctcaatatatggaataaaactggcttccttataagacctacctttaaccttggattcacaataacagaaaaatctgtcccccttccccatgtgatgactcttag

SEQ ID NO: 424252 - DNA, 190 bp, Homo Sapiens
tctcgctaccttcatttaggcaattgagtattaatttctgttacataggcaaacatatacatatagagattgttatatccagactgttgcacacaggatactctttaaaatatatacaaggaaaaaagtggtttcatatactattagattgagagataatctctaacattacaatatttactaacactat

SEQ ID NO: 424253 - DNA, 215 bp, Homo Sapiens
ttagcaaatgagggtattccatatagagctatctcgagagaacactgtaccagcagcactcctcagcactgcagagcaacaagtttcctcagtgggtgtacctgggacggacctctccctatgaatgatgggcaccaggacaacatccagaaaccagagagggacaggccatcagtcattctcattctgaagatgtttgtaagataaagagtcca

SEQ ID NO: 424254 - DNA, 122 bp, Homo Sapiens
tcggctacccatttaggcaaatgccaatatcaaggcttgaaggtagaaatgagtgtgtaaccccttaaaattgttaggcttgtaaacctcagtgatggctttcatgacctggtaagctcata

SEQ ID NO: 424255 - DNA, 121 bp, Homo Sapiens
gcccttcatttaggcaatggagaaagtagatactagaaatatagactggacagaggaagggacctggctacagatgagaatatttaggaatcatctcacaaaagacaatttttagaacaag

SEQ ID NO: 424256 - DNA, 212 bp, Homo Sapiens
actcgagctcctacccatatattagttctttaatgcagtagtatcaagattccatttacacattatttattgttcatcagacagttttcattctgtaagttttgctagctctgcacttctgaatgccagcctctatcccgtatctaccctacctacctaccttgctcctcttctctcaaaaagtaatcctttttcatgtttggggtttttaa

SEQ ID NO: 424257 - DNA, 110 bp, Homo Sapiens
ccaattgcatggcttctttaagcacagcactggttgaacagattgcacctgctgaaaggaaccaggccttactaagcctcatttgaagggaagtgatttgccataatgaa

SEQ ID NO: 424258 - DNA, 383 bp, Homo Sapiens
actcctttatttaggcacatctctagtaaacgatgttgacttcagtgactcttcaaaaaaacgagtctgtttattcagcaaaatcccacgggcccaaaacaggtccccacccatagtagtcttacctgttaggtcatccaagctggctgtggtggccaggtcaatcttcccaaatttgatgagatctccataagggttaaaaggaagagtgaacggtttcctttggcttaggggcttttctctaaaattccttgccttcttcccatctggacttttccctctgaactattagcttactgccaaccaccgtccccacagaaatcacaagagtttaggctaattaaaagcaagttctgcccagccttttctttcccttgcggtac

SEQ ID NO: 424259 - DNA, 256 bp, Homo Sapiens
taacattatctgcacaatcagaatatcgctttatgttcttatgcaagtcttgaggatttatcgtttctccaaagtattaccagcatgtgtaattaaaatccacattttaaaatttatgcataatgtgccttatattatgctgaaaggggtttaaaacaggcaagtcataaacttgctcttggatgaacaaatgtacagaggtaaacaaaatttcattttctacaagttgtgataagctagccagaaaatcaagggc

SEQ ID NO: 424260 - DNA, 414 bp, Homo Sapiens
ccagaagcgtaaacctcacagccactctgaagatgcactcatcttggtatagtgtatgagcacagcaacccaagagctattccatagactcgatggtttatctcgaaatccacacacaatctgccggttgtcagatgataacgccacacttcagcacatcctctctctggcccacaaatctgcctcctcgtgtcgctgcccgttgtcgcgatcccagaggcgccgggttccctcccaggagcctgtgcacgggcaatctggccatcttaggcgattcccccgtcactcgcaaagtgggagtgacctcgcagagctacgctgtgtcaatccattgttggtctcatccctggtcagtttccccatcatgatggtcttctctcgagaggcggatcggatcatctccgggcactgcgg

SEQ ID NO: 424261 - DNA, 244 bp, Homo Sapiens
gtaacccaggctatcatccatagtagaacctttttgagccctggatacgaaccttacaaaccctgcaacagctatatcaactacatgtatgtaatattctaaatacttagctgtcattttcaaccaatgttcaccagcatcttcatccaagtaaactctaccttaaaaaaaccactatctttgctagtacataagaagcaattatacatccatcaggtttcatccatgaaattataacaattag

SEQ ID NO: 424262 - DNA, 308 bp, Homo Sapiens
tatattggtggacgatttataacagaagaaggaaagtgatgtacagaaaaacagaaatgaggtacagaaaacggaaatggggtacagaaacaggcggattggttacagctcagcagctgggcgtttaccttatttgaagacagttttaacagtttgcctcctctgattggccaaaactcagtgattggcacaagaataggttttggtctgtttacacttccattgagattatagttcgctatgtacagagaaacctttaggctgaacttaaaatatgtaaggaggcaggtttagtctaaacttgatct

SEQ ID NO: 424263 - DNA, 309 bp, Homo Sapiens
aatgttcgaactagaggatccccttgaccattattattctaattccctctacatctgtgaacatctgtcctttttagagttaataaaagggaagcacaggttgtgaactctatgaggacagggtcaggtcagtcttattcgcccctctaattccagcacctaatatagcaactggcgtatgataagctctcaggaaccatttgatgcatgagattaattggaaagattttagcattaaatggctttttaatgctaagactttttcttcttcccaaggtcgctccacctgataaaacttttaatggtttt

SEQ ID NO: 424264 - DNA, 181 bp, Homo Sapiens
ccccctaatagaatactcccaggtctccagtgtgatgaggctaggacactggtacatggtagctgctggcagacagagtgtgagtgcataccactacacagtttgcccacacactctggctgcaaagggccagggtaccgtgtggtctccagctcgctacctggcattcgtccaacccata

SEQ ID NO: 424265 - DNA, 249 bp, Homo Sapiens
agttggcgagagataaaggagaataaaataaagcagggcttcatacaagttagtcacaaaagtataccatgaaatgaaaaatatgatgaaatcagttctccgtatctcaggtgctcttaccccacttcctgcgagagagagatatgtaaccactggtttcagcaaacctcaaatcaatgtggagtgtagtggggtaagagcacctgagatacggagaactgatttcatcatatttttcatttcatggta

SEQ ID NO: 424266 - DNA, 131 bp, Homo Sapiens
atctagaggatcccgttgattagtcattgttgggtggtgattagcgttgttgatgagatatttggaggctggtcgatcaactagagggggcacaatagaatgactcagtactgcggcgggctatgcctagg

SEQ ID NO: 424267 - DNA, 396 bp, Homo Sapiens
aatcacattttttcatctatgtgatggtcatcatgatttataattctttaagtcacagtacggctgatctcagtgaagttctccctatccctgtctcccatcaatcccagttcttttctttaaaggctccttacacagtttcttgtgtatcccaccaaagatattctatgcatgccagctatgacatataccttttccttttcttcacaaatgacagctcaaatatccacatgtgcttgcatcttcctcttttcatttaatcctctttctgggagacctcccatcagcactattagaaatttcaccatatccccatagatcggcatcagtgttacagcctcatctttagctattactatcaatgctgcaatgttcttatgttatttgacccatatg

SEQ ID NO: 424268 - DNA, 334 bp, Homo Sapiens
caccctaccactgtgaagctgtgctgatggagaatgtatccaaaacagagcaaggaacttaggagggagaagaacagctgacctggtcaaggctccagaagtcaccatccctgtcgggccaagggtcagcactctgagctagctcctcagcagaggacaacacaggatttaggtaagagtgaatggtcttggttgttataaggaagaaagccaagtccagaacgttctcttttaagtagccaaaaatttcctttgagacgggaatacaggtgggaggggatttccttaaaactcagctaattttttcattgaacaaggggattgaatgtgatag

SEQ ID NO: 424269 - DNA, 400 bp, Homo Sapiens
cccccgcagtgtggtcattgaagtcctcccagctgtgccctgaccccgaggccttggtcaggtggtgcagcctcatgggacctcggctcactccccagtagtggcaaggaggttctgtcctgccagactactcggctccccactcctgaccacaggggtcacagccctgagctccaggcccagctacagggcctcgctttcaaagagagcattgaacaaggaatccacctcatctccggggcatgaggtgagcatcctggcttctccctacccccaaggcccacctgctcgtgaacagccttcctcctagtgaagcactttctcacgctttctggagctggggcttcccgctgggtatgcagcctctccaatgtctctagaaccatggcccaagtaggaa

SEQ ID NO: 424270 - DNA, 401 bp, Homo Sapiens
tacgtctccccacattattactacatatagatggttgtgtagtacaatgcaaccatcacaatcaggaaataaacactgttacattactattatctaatcctcatacccattcaagctttgccaattgtccgactgtcttttacagcaaaagaatatagttcagaatcacgtgttacatttagaagctacatctttttagtgtcctcggtctttccttaactttgataaccttgacacttctgaagattacaggccaattattttgtagaatatcagataaagcaggtgttttatagaatgtcatcaccagtcttacgttatgcttctttggtagtaaatattacagaactggtgctgtattcgtttcattgcatccttttagatggtaggggatcctctag

SEQ ID NO: 424271 - DNA, 288 bp, Homo Sapiens
gccttctgtgtgtccacaccaccccgaggtgacctggactcagggaatctgtaactcttgtccttttctagggcctagggacctaaacattgcctaggagtctggggacatggtgagttgtcctaccatgaggggaaggtcgataccctaatcccagtgaccgtctctggggaacaggcccagggccgctccctgctcctccttcctcccttcagggaaggctgtgggagcctgggggccaacgccccattgggcccagcccctccctggctgatgccatggtgatgg

SEQ ID NO: 424272 - DNA, 333 bp, Homo Sapiens
  misc_feature (119)..(214): n is a, c, g, or t
tttcgttgatctttactcatttggcaagtatctatttagggcccacaaagggagaggctgtgttgggttctgggagtgacgctgggagtagaggggtaccctgctccctgctggggctnnnnnnnnnnnnnnnnnnnnnnnnnnnnnnnnnnnnnnnnnnnnnnnnnnnnnnnnnnnnnnnnnnnnnnnnnnnnnnnnnnnnnnnnnnnnnnnncatggagatttgacaagaaagggcaggtaggatgctcatgatattgcgtggcccaggtcaaagcttagtaatgttggcttttgtcatgtaggggaggaatatcttttcttctaccctgt

SEQ ID NO: 424273 - DNA, 327 bp, Homo Sapiens
aataatgggacaatagcgtctctccagctacggcacagggttccgccattattgggcatagctaggtacgctgccatgttgagtgtggttgaggcagtttgagtgcagtatctcccagataccttctttaacaaaaaagcacatccctaactgctccgtgactgcgcctaccccaccgaagagctctctgtggtccgggatcacaaatcagagattgcaccaggaccaaaggggaattccttccaggaactcgtgtacatccccggccttgtaaatggaaaacaacgcaaaaaaatcactcctcattcagagagtggagaaattggg

SEQ ID NO: 424274 - DNA, 185 bp, Homo Sapiens
atcttaatgactatcgacaatgcttacatcttggtaatctgtgcatcccccaccccaccatagcacatgatatagactatttccatcaccacataaaaaggttcctgcagtacctacccaataagtccctcccccaactcaggaaactgctgaacactattctgatttttacactttgggctgga

SEQ ID NO: 424275 - DNA, 144 bp, Homo Sapiens
agacactatcatttctctcagaccatcatcagtccaaagacctgaatttgggaaacattgctttgtgttttaaagaaccagcatttgtactgtgttctatggttgacaaaaaaatattgcacagatattttatttaactctaag

SEQ ID NO: 424276 - DNA, 383 bp, Homo Sapiens
tatgtcagtatttcatacattgtatgtcaaaatgaaaagtaacgcaaggtatgtcaaaatgatgagatcaaagaaaaggatataatatgtagtgtttcagatgttactttttcataaatacctctagaagaatctgtcaacgagtatttgataaataccacttctgtgctagttagttgtacataaaaaaattaaaattcctatttttcagtgcattcctcaagaaatgaaaggcaaagcctttaaaattctctaggcaaaggctccatttgtcttctaaaagctggttcaagaggtattcctctagcaaaagacctcaagcattattgtacctggaggctaaacaacccagtagtctataagatgttttaagtaagactaaa

SEQ ID NO: 424277 - DNA, 376 bp, Homo Sapiens
gagagactggtcacagctttatccttcattatcctatggtgttaaactcattgagccgctagaccagacagaggttgtggcttataaggggagaaactatagcattaaccaatgttaatagatcattatttgcatgaaaagagtgtgataaatacaatggctcatttgccccacaaaagtgtagggcaagatgaattgattacttaattgatgggttgcacaattgccgttcgacggaaatgcaatcttaaacgcaacatagtaaccagtgcgactgccataacgaccattgcagccagtggaagctgttgtaactgcaggccaaatgccagcaaggtgccacccaaccaggcaccttatgcattgcctaaattga

SEQ ID NO: 424278 - DNA, 179 bp, Homo Sapiens
tatcacctgtgattgggacgttactcctacagcctgagctctggtactcccctccccttgatgattatctctggaaatcacagaacgttagtacttattagcagtagcgaggtgcagagcatgaagtttgcccagcgtctggccatgcagaagtctcacggagatctcacaggaaaggg

SEQ ID NO: 424279 - DNA, 145 bp, Homo Sapiens
taggaaaactggggtcttaagaatgtctgcgattagcttgcgcttttgagacggctgagatctaccatcaatgagatcaccttaaacctactctcttattgacttgactgacgtccccatcccaaagtcactatcggattcaata

SEQ ID NO: 424280 - DNA, 278 bp, Homo Sapiens
tcaagtgaagtagcagctgtttcaggcttacactaatcatgatctaacagataaaaatgagagctaataaatttcctgtacactcgctacgtgactaaaaatgaaacagacgggaattactaatcagtcacttacaacgtggtttaactttaaccctttactttcatttttaggacttcttgtctattccaatctagctacttttcacaggggacctaagccatcacatggaattaaaagggggtcctagggcaactaaaattttcactttgggctga

SEQ ID NO: 424281 - DNA, 424 bp, Homo Sapiens
tcttttcattccatattaataacccatatcttattaactagatgacatagtttatcagttttcacataagaatatacatcctcgaactagaactcaaatattactacttattattcactatgggtggaaactagacatcaagtcactaaatataaataggagggtttaaatatggatttatttttcttgtgactgacttcacatttcttgaagcagtgaattcaatgtcaattcgcactttgagctatttttaatttgggggtcagaaaattgttttttattatcttagatcttaattctcttgtacttctctggtaagtgaaaattggaaggacattttgaaagtctgcatggattataacatcttgttgtagcgaagtctgattcttctttccattataaagtactatactactgatcagtt

SEQ ID NO: 424282 - DNA, 374 bp, Homo Sapiens
actgtgctcagccttcttcagcattattgataattggggctggatagacttttttagttttggcgggctattctagtgcattgtacgggtgtttcagtggcacccttgcgccttcatccactagcgtgccaatatgcacccaccacctcccaggttgtctcccaaaactgtctccagaacatggccaatatgtcctgagaggggttggaaaaagggtaaaatcacccccagttgaaagccactgatttctctatgtattctggataggaaccctttgtcagttaaatattttgcaaatatctcctcccactctgcagcatgccttttcaggctcttaaaggtgtttttgatgaacagaagtgcttagtgtagtc

SEQ ID NO: 424283 - DNA, 117 bp, Homo Sapiens
agcccaaagtgaaaacagtatctaagtattcaagtttattctagcacatattttttaagagccttaaagaggtttcacggatggtccgagggatcctcgtagagatcgacctcgcag

SEQ ID NO: 424284 - DNA, 128 bp, Homo Sapiens
cagtggtctgctgacagccacatgctctcatcctcacatgactgaatgacgagaaatgaaagctgaagtggtctacacagcagagagctgatggggatggggtcagccctggccacctcttactttgc

SEQ ID NO: 424285 - DNA, 353 bp, Homo Sapiens
aagagaaggtagacaatcttatatatagtcatcactccaatccacaagaagtagtaacatgtatataggcacagaagaactgtatatataaagctactctgttgtattggatgagaaattagcaagctttatggacaagagttgatgcgtgaaaggagtaacagacagcttgctaatgtaatgggagagatagatatgatatctcatttttccaacctgtatcatgctattttttcccaacttttatttaggtctaatatgatcttagtaagggaattgccataaacaagttgtatgggatcttaagagatacctggcttcataattgccttacatcagaataaaaagtaggt

SEQ ID NO: 424286 - DNA, 124 bp, Homo Sapiens
ggatccccagggcctaacgtgacacgtcatcgtttatataatgtcagtgtagaatggatgatgaaatgacagattgtgcaaatattcaggcgctggaatgattaggaaaaatgagaaagaggaa

SEQ ID NO: 424287 - DNA, 120 bp, Homo Sapiens
agcgcaaagtgaaaaccacaagttacagagcaacataagtaaaatgagctaggcagtttcttagtatacatgtttgaaatgggaagaggtgactgactgcctttcaccagagtcttagct

SEQ ID NO: 424288 - DNA, 234 bp, Homo Sapiens
gaacaagataggctcagcggtggaggtgattattttctacacaagtagataacatttaaacaatgcatgaagttttaagtggaattagggaagggatatagcagaaattttatggtatattgcagtaatatttaaagggtaagagagctctatgtagaattttggcactgagaaatcctacttttagtgaagttgccttctctccatctctttctgttgaacccttgagagatg

SEQ ID NO: 424289 - DNA, 133 bp, Homo Sapiens
  misc_feature (16)..(16): n is a, c, g, or t
catcatcttcagatantgattttgccctcactggggatgtagaaccagaataggtacaacatatgctcaggagagaggtgacttcagtattagccttctagaaactaacatcactttaatttttacatgttcc

SEQ ID NO: 424290 - DNA, 601 bp, Homo Sapiens
gttcgacggaagcaagttataagagtggttgaattttcccaagagaaagttaaatgtttctaggacagaaacctgatgggtgttccggtaatggtgagagaacccaggagagagtggtattccacaataagggtagaaaatgcttttagaaagaactgctaatcatgtgaaacaccgctgtggggtgagtggaggtaaagacaggaacacatccaacgacttaacaacaaaggggtcaccagagaactgggttcagtgataaggtggcaagcccagggtaaatgggaaggaaagatatagacagcaaggtgctcgcctggttgtctgaaggaagacggagaaaagacagcacaggggctttgaagtttgggtgacttaagtattctaggaaaggagaaatgaatggagatagatataagatgcttgtagaggggtgtatggaagtgggtgctccagtgagacttggcatggtggaactctcacactcaacagcattcatttcactagcttatgaagatgctcctcccctctcctcacccactcatctccttcattctctcaggaggctgagggaacacgattgaaactacaatctaatacg

SEQ ID NO: 424291 - DNA, 227 bp, Homo Sapiens
caaggatccgtcgacggaagcagaggtgggacgtggaaagagggaggcgagtggcttttgaggagggggcttttgtataagagctggaggatgcccgggaaccactgagctgttaaaataaagtctgcaaacaaagacccagctgctgggaaaaaagggggatttggggggttgttggccccgcgggggggaaggttggccgggccaagggaaggaaccaaccaaca

SEQ ID NO: 424292 - DNA, 398 bp, Homo Sapiens
ggaccccggtcgaccggaagcagcattcagtgtgctttcaggcctttgacaaattaaacattcaaaagtaaaaatgctcactgctagggtagggtaaaattacaggtgtagataaaacaggctagagcttatgaaaagaaaaccacagtctctctacgctaattactaatgcatctcagaaggagctcagaggttaaaggactaagtccttagctggattttcaccattcttagaaccaattgcagagaggcatagcatcttggaactgtgaaatgatacaattccaatgctggaggggggtcttcgaggctacacagttcaactatttctccaatatttgagtcttttttatggttagcatagtaagtttcacctatgattgaatgcttccggtcga

SEQ ID NO: 424293 - DNA, 268 bp, Homo Sapiens
tgctgggggtaaagttggtcaggttaagcttttacagagcaaaacccaaagctcttgtttggtgagccgcttcaagctgcctttgatctctcctgcagacctcctgggaatcagtggtccgaaagggtcacatatgaggaaatcaagaccccgagagggaacgtaacttgctcaagcttgttcagctggtttacaacacgggtgggatcagaaaccccggcatacagggaccgattctttcactctatcataaaataaaaggagctcc

SEQ ID NO: 424294 - DNA, 362 bp, Homo Sapiens
atcacttccacaaagaaaatatcatggagatatactggacattgcaaacactttatgtatggattctgatttagaatttacttgcttgaacccaaattctcatgcttctatgtgacctgtgaagaattataagttcttccctctgtgagtcagatcccaattctgccatactgtttctggttcagattttcttcctataggttttaatcttcatagctttgtcaggtcctgtaattcctgtaattctcagaggaagtttaagttttgcttagccatgcaagaaacctccttgctaaaactgaacgagtagcaaaaggtgtatttcccagatccatgtctatgtctctgtgttcgttccattt

SEQ ID NO: 424295 - DNA, 297 bp, Homo Sapiens
tggagaaaggatgaatgggacaggtatagccccaccattccggtctgggtgcgtgccgcggttccactgtgcacggattggaacccggctgtttaggccaggcttgtgctgagaagtttaggtgggaaaagtgtcagcacagtgctgggaccgaacatcattttaaaaatggacttctatgtgtctttgtggaattatgcgagcaccatgttttgttccagaaattatatttccccagagttgcttgtttgcgtttaaggggatcctcatttacagagacttgtgttcgttccattt

SEQ ID NO: 424296 - DNA, 183 bp, Homo Sapiens
cggctgtgcaggtatgttacatagttacacaagtgccacggtggtttgctgcgcctatcaacctgtcagataggatttaggcccccagcgcattaggaatttgtcctaatgctctccctccctttctccccaccatgcggacatgtgccggtgtgtgatgttccctctctatgtccatgtgtt

SEQ ID NO: 424297 - DNA, 356 bp, Homo Sapiens
atcgaaaggacgaacacataaataataacgtcatacgactatgcatgtataaattataaatattttcctaagttcatctaatcacagctagcttatttacccttatattcttgagatttatatatgttgatatttatttaaaatgctgtatttctatactgcagtttattctgccattgatggctaatttagtgtttttgttcggtttatttggctattaaataaatggtatcatgaacctcgtttaggaggctactcttgaggatatgatgtagagcatctggtttgtagggtgtctagtgttcttacctttattggatattgccaaattgcttctaaaaatgttcgttccattt

SEQ ID NO: 424298 - DNA, 291 bp, Homo Sapiens
tgatctagaggatccatgataaagacagtggtgccatctccctaaagtatagaagaaagtcagcctgtcttgtttacacgaccaacttgagcctgtgggcctgaaatctagaatcctgttaaaaagcagcggggcctggtgccagagcccagaggaacacagacttagccaggacttggcaccaaacctatggccagagatgctgtgccacatcattcagctagtgttgaggccagtctcatgaccaattgtcctctctgtcctttctctctcctagtgggtagccacagt

SEQ ID NO: 424299 - DNA, 275 bp, Homo Sapiens
  misc_feature (92)..(92): n is a, c, g, or t
gagcagtgggaccagctgaacggatagactagtttaagtcctttgtgtcttcaggctgactgcctttcagtcttagagtttggggctcccgnggagactcttctctggaatccggcggaggcttgcttcagacactagcgagggggagagtgtaagtaaattattaacctgacaggatccagcccttggacccttgggggtgtaacagctggaaggccccatcctgtgaaccctggcttggctcactctgcaaagtccctcctactcaaattccc

SEQ ID NO: 424300 - DNA, 187 bp, Homo Sapiens
tatggctactgctggaggcaggtggtggcggaaggcagtggaaggagggaggaaagggctcccttctcacgtggcccgggtgccacccccactcttgggggatgttttgtatctttcagttctcagacaccttgcatcagagtcacaagggccgaaggatcctgaggggccgggaaaggcctcccct

SEQ ID NO: 424301 - DNA, 314 bp, Homo Sapiens
ttaagtacttccacatacctctataactcgctgatgcactgggcacgcgtcgaacaaggtttcctcagcaagctgccgtatcagactcaatcgaagtaaacaggttctagggttccttgaatgtatacatatagctagtataaattgccttctctgctgcgacctgggcctttactgctatcttccagagcttcctttaccataatctgcagcgactttaacatactgttgcactataagctagctcttatagattctatctaacaacatctcagctctgccataacccaataccaaacgcccctcttcgtctg

SEQ ID NO: 424302 - DNA, 224 bp, Homo Sapiens
gccgtctccaagagcttcctttgcactagcatctgaaactatatccagaatgacactggttttcataaaagtgttgatcctcacacctctttatagtcttgcacctagcccagtggagtgaaacactttaaatagcacttgttccttgagtatatatggaaaaaaagtgaagtatagataagtgctcagctaatatgagcagcatctcaggagtctccggccta

SEQ ID NO: 424303 - DNA, 100 bp, Homo Sapiens
ggcaatctgtgagcgcttgcaatgtgctggactaaaaggattacgtgtaacagagggattgtgaggaagattttttttatgcttcattttcctaactgtg

SEQ ID NO: 424304 - DNA, 296 bp, Homo Sapiens
ctagtaaatttaaatatgcacattttctatattcatgcaattcttcaggtgagtatttcctctgagattaaaactcacagggagttcattggaggcacatatatgaattgttgcatagtatacaattgaaaataactctcagatctatcaaaggagcttgagtaaataagtactggataaatttatttatccagatgtattaaaagagattgatagatctggataaataagctgtggaatggtcttccaatggaatgatatagagaagtacccatgatgcacaaggatcatgctta

SEQ ID NO: 424305 - DNA, 337 bp, Homo Sapiens
aggaggatgcatgggcttagagtgatgccaagaaacatttggtctgaaaagggctcacttttatagagtttgtccttggtctgaggtccttaagttagtgtttggcgtagattgcaggctgacttttgagagttggtgtagaattaagccttgtgtgccttcacctatgcaagtaaacctggacagaggcctagagaccaggccgaaggatgttaacacatccctgtcacaagcagtttcctacatgctcattgtttctgcttcaatatccccatcacttcttcactttggcgtcctgcctggaagtggagatttgtgggtgacagatggtggggag

SEQ ID NO: 424306 - DNA, 158 bp, Homo Sapiens
aacaaaatctgtattacttttacttattatggctatgtgtataattatatgtctagtttcttttttaacagttaacttgatattctataccacttgaatatttttaattctggaaaatcagtttttcctagtgctcccttttccaactcattctcaca

SEQ ID NO: 424307 - DNA, 309 bp, Homo Sapiens
ccataataaattcgcttgagttttacatattttcctgaaaggaagatgaagatttcatcttgtaaccaccatgctgaaaattgtacatgactcatgtactggcttacctttgctgtgtcaaatggtgatgagatgtcatggggataggatattatgatcattggaatactttcattatccaagaaattggtgacttggcagggaaaaggatggagtttgtaaaaacatttgaaatttatttcaaatgaaaatgcgtttctttgtgtgaaagttggaaaggttatgaagcaagttgaaaactgcggcacc

SEQ ID NO: 424308 - DNA, 345 bp, Homo Sapiens
tccagagagtctcaggctgaacaaataatcgactgcttctcaagttaccttttaaggcaccactgctcaagaacaagagaacttttttgaacaggtgagccaaacatgaggctactgtctgcaatatcctggtctcctttattaggtatgcctatttagttccctctattgagaatattcccactcacctctacctctgctccaatctgaaagaagcccaaagtcagcagttacgcatatagtctccatgtactgcatctggatgtactgaatctccatgtactaatgcttgaagccccatcccagcatcggggtcatgatcctgctagctagtacttccatacc

SEQ ID NO: 424309 - DNA, 234 bp, Homo Sapiens
cacatctcaggcccagtcctgctccagaggctctaccaatcactcccttgggccttaagggtccatccttcttcagtgttctctccaaagctgccaaaatgctccccaaaccttgcaaacctgctccccacaggcaacactagctggagagcatgcagactccccaaagtccacccattcttgtagcccctgaacaagcacagaaacagcactattgtttctttcatgagcatg

SEQ ID NO: 424310 - DNA, 576 bp, Homo Sapiens
actagaaagccaattagaactttatggacagggcttggagggcttccaaagaatagttccatggagcattggagggcttccaaggagcagtaacctgacagtcttgatggggcaccccaaatgtcattgacagatattacagggagattttcttttctctagaggagaaattcatacctcttaccttgagaagcaaatataaacctggttgctagcattctgtgaaatcagtgaagagactggagttctctcagtgcacacactgatttttcacttagtccctaggtttctgtatggctccacctcccacctgacattgtgtttattctgagtgcagagccagagaataagctttttcctgtttgtgttgaaacatggaagtcccctggctgtgcaggcaggaggaaggatcttgaatctaagagttaatctgataggctttcaaccaatactccagatttcagcctctatcctcaccctgccttccaaatcacctggtgcctccaattctggaaacttgcatgggttcttcagtgtgaatggcttccttctttgtctatggcatccttctctgca

SEQ ID NO: 424311 - DNA, 575 bp, Homo Sapiens
ctagggctcacactggggctcacacaaagaccctcatgctcactccgattcacacttatattctgggactccgagttagtcagactcgcatggggaacatggggctcacatttgaactcaaggactcgctgaggacactggggttcatagtcagattcacatttccaagctggggatcacattgactcacacggggaccctggagctcactcagattcacactaggacctttgggttcacacttagattcatatgggaactttgggggttagacctccatgggtaacctggagctcacacatagactcataccaggatcttggtaggactcacttgaagtcctgtgactcactcagattcatattgggatctcagagctcacactcagactcacagtaggattctgatgttcacacttagacttacaagggtactttgggactcacactcagacttaaaaagggataccagtgctcacactaggactccatataagccaccttagctcatactcagaagcccttatgaccagggtctcacactcagacttacactagaactctaatgcttatgct

SEQ ID NO: 424312 - DNA, 293 bp, Homo Sapiens
catagaggatacatgctttatctgaagagagggatctctcaaatatctggtgcaggcgcacttttagctggtcatgaggactacagccaggtgaaaaggatctggcctagggaacgtgtgtgacgggggagcagggagtagtcccaatggactggaaaaggcacatgcgagaggggagggtggaaaggccaccaacgccggtgacgctggagctcagaaaagactccgaggaccagaaggaagaagcatcaagggaccagggggtgatatgccaaggtagagaggatgggtct

SEQ ID NO: 424313 - DNA, 449 bp, Homo Sapiens
  misc_feature (374)..(383): n is a, c, g, or t
tctcggccccgagcactgaccccgatgcttatcaaatagctttcagtctaatatcgacacctctgcccctgggctccagggagagatggccagacagccatctgggattccattggccacccccagacgggatgtgtctcagccttggggagggctgcctggctctgccagtggctccagcatgtcccctctcctgggtgctattatgcagacactgctggcagccacaccgaggttccatcctgctgccgccagggtggtgatagcaagctctttaggtggtggccaagactgtcacagtggattatagtcctggccatgtcctaaatctttcataagctctattgcaggcaccagaaaccattcaggaggtnnnnnnnnnnagcgaaacaccaataaaagtcacacagatcaaaccgggcaacatctgttaaggcaggaggcaccag

SEQ ID NO: 424314 - DNA, 473 bp, Homo Sapiens
gcccctctaggggcagatgctgaggccacagggagctctggggctgggaccgcctttcagagctatcctgaaaaaggcaagggatggccctttaaactatcaccccagccagggattggctagagactccttctcctgtcttccctgggaggggccataaccttgggccacgcggtacctgcagcagagagtggttctcagtgagggacagcgtcagcagcagctggtaccccagccctgaagagggggcctgccaggactgtgtgaagcattcgagaactaatggagaaccaaacagaattgcagcccacatggggctttgaggctatatttgggctctgtttacctatttgggctctctagccagcttggcagcttccttgggtcagaatgttctcattagaagagctcatagttggtgcttaataagagtctatcggatttcatgaccagtaatgcacccaggtcccttt

SEQ ID NO: 424315 - DNA, 284 bp, Homo Sapiens
atgtaggagcgctaggggcagagactatgggtgaaaccaggggtttgttttgggacctgttgagttttgggatgcccgtgaggccctggggaagatacatgccatcttatctaaaggttgcaaattcaatgctctcagggacaagtaacaagaggagtaagacatatctcactctcctcttacctctgtaagaagaacaacgggaccagcgtgatgacaaacagtgactcagagccaaagagcaatagggagcagtggagactggggcaaattggaaagcacag

SEQ ID NO: 424316 - DNA, 378 bp, Homo Sapiens
gactctagagtatccccatatttcaccggcaggttagacactaaagtccattctgtaaatggtgaagtgtaagaatgataatggatcagagaaattaccatatactgattttagaaatgatacattcagagaaatctcgtcaacactaaaatatttgtataaggtgattagtggtataactttgtgttattctaatttggagtccgtcttctgtagcaatatgtctgcttaaagattaataacaaatgggacttgcagtttcagtgctgacgtgtaaaagcttggaagttgtcaccccatccttacaaccagatcaaaacaactaaaaatcagcgacttctcttggttccatcatacaactgaggtcgctcgtctctc

SEQ ID NO: 424317 - DNA, 297 bp, Homo Sapiens
agagtatccccagtatttcaccggcagttaacacttcattgtaggtagagacctacttgtcttattttctgaatcttatgtgcatctgactgcagttaataaacctgtgtgttacaatagtattgaatttatgatttgcatgtacgtaagttactgtgagggtccttagagtagtgattttcttatattggctgatctctgtctgatccctgtggtcgctaacccccatgaagaggtgacttagacattgtgttaggctgggttggtttggaaaggagacttagagaaggtgaattc

SEQ ID NO: 424318 - DNA, 289 bp, Homo Sapiens
ggcggtccagattcacggcagtgaagtacttgttggtaagagaaaatattgcctgaagaacttattcttcttcctcttccttaatttaaaaagataatcatttagattcttcagaaataatctccatgcccatctttttaaagaaattctcttgacacaatggtatgtactgagtagttatcttgcctgaagcacccttggtccttgtattccaaatgctcttatcatcatgctggaacacatgtttaaacagctattaacttatgaaagaatggagcctatcactttt

SEQ ID NO: 424319 - DNA, 310 bp, Homo Sapiens
  misc_feature (161)..(188): n is a, c, g, or t
taatatgtgatcctctcccatcccagaggtagagatgacagaggtacacatatgaaatgcgatcactctgctaccattgctgctgaccaaggcatgatgctcctctaagtgcatcttaacattttagagcaaagttgtcagcggcactatgtgtctccttnnnnnnnnnnnnnnnnnnnnnnnnnnnntccaaaaacagttggcttctctaaaccaggagttggcaaacttttgctgtaaaggtcagatggtaaatacttcaggctttgccagccttgcagtctctgtcgcaactaaggatccagctctg

SEQ ID NO: 424320 - DNA, 309 bp, Homo Sapiens
tgctcggtaccccgtgaacagtagatgcaagaagaaagtggacgagggtgtttacaggttgtacgctaaatagtaagatgggcaatgcaattactcccactggtcagaggatacggtagggacaaggcaagctcacataggccaaagggagggcctctggctcacggtttcttgtcacgagttgggtcaaagtgattattgggctccaagtttttacaagcctctgagatttaccgagagccaacagagcactacactctttttaaattatccccaactatcacacttccaggcaggaaggtgatcaga

SEQ ID NO: 424321 - DNA, 493 bp, Homo Sapiens
tagctcgaggaggtttgttacaaggcagcgcttatttaaagcctttcagccctgctatgctctgcgctttgcagtttacaaagcgcttttcacctctcctctcgtttaacttcaggaaaattatctgaggtagcagtcacaaattcccatttcacaaatgacgacccgagaggagaagggactggcttaagattagtggtgctgtcaaagcactggacttgctcattaggaaacagagaaagcctcaactctggcactaagggcaaaaaccagcctactccagccccagtcccacgcctgggctcttctgcagcccagaacaaaactcctgggtggagaactcttactttcccattcttctcaaccaggcaagtcatcctgacctctgcacctgggacagccagcttgtctagctgaatgaaggagaacccttgaactccatacctgcaaagattcttagggagaggagggcggcccaatacctgcactcttc

SEQ ID NO: 424322 - DNA, 171 bp, Homo Sapiens
tgcggaccagattcaccggcagagaaagaggagaatggaggaagcacacccactgtcctgggcccaagctgtccactttccattggcaagaactaaaaccccacctgactgcaagggatcagtgaaatgcgttcaccagtcaggaggccacatagccatctactgttctgg

SEQ ID NO: 424323 - DNA, 157 bp, Homo Sapiens
atggctgggctgaaatatccaagacagttcacatgtccaacaccttaatggggatagtggagaggttttgaccctctctatctacatggcttgcttagtctttttaatatgggcagctcgaatatcactcagatattcttgagtccacttactcggt

SEQ ID NO: 424324 - DNA, 254 bp, Homo Sapiens
agctgaaggctgcggggcctttcccatgtggcctgctgttgtgtatagcaacttcccagcagtcagcacggctactgtatctatggtcagtgtctcacctatttgtcacccgcagcttcaagtgtactcatattctccgtttcaaggcggtgtcaaatttctcgatttagctgttcgcaagtcttgatacgacaacgacatatcgaacgagcttgagaacagtctgcggattttcttggatgctgccgcgtgaa

SEQ ID NO: 424325 - DNA, 308 bp, Homo Sapiens
ggaccgattcacggcaggcttgtgatattagattttttaaagaagcaatatagaagttagattttaatcaaatttgtatgggtttctaggtaatttttacaaatatgcttgttggcttcagctggtctcctaccgtctgctcttggatggagatggggacggggcgtggagttcaaaacactgtgtaattttgtatctctgattgtcttgagttaagagctgctgaagaagttattttattatcttttatatataaggaataaatccccgcctttagttccttcatttcagtctactgttccgggggt

SEQ ID NO: 424326 - DNA, 534 bp, Homo Sapiens
cgtaccgcaggcagaagtattaaaataaccattttctatgtcattgataaaattaattctatgagcaaaagagatgagtcttaacatgaaaatcaaaatagagaacatttactaatagtgtgtttaatgatctaatgttggcagtgtgagagttaattcaggcatttctctgcacacgtatgagcatctgtgcacacttaacgtttctagtaagagaagcacagcaggaaaaatcccagacttagggtaagaaattgccagaagagatcacaggctctattaacacaatattctgcaacatcactaaataacaatttatttattgtctctggttgtttgcagcatcaaccttaagattttaagataatttcttcctgttatttctgaaagaatcaaaattcctttccttataggttccttgggtgtcactctatcatgtttcatacttgaccccatattgctaaggccagcaggtgccatctgtagcgtatggagcacaatgataattaagatattcccccccgggaaagtcca

SEQ ID NO: 424327 - DNA, 293 bp, Homo Sapiens
tgtcggtagcaggtatgtcgtgaggggagtatccgtggtcgagatggaaaatataaatgaaagaaaaacaatgagccatgtgctgcttgatataatgggatttaacatacagaattttgacatttttctcttttataaaatagcccatttgagaaataaccagaaaatttttaataaaatgcgcttatttacccaagatgaaattggagagagatcgatcataactgcatccaatgcttgtgtatcacctgtgaggctttggaggttggagtattgccttttcactttgggct

SEQ ID NO: 424328 - DNA, 463 bp, Homo Sapiens
gagacgtgaataatgctcccatctttaccccatcatgatccacagggcgaaatggcagcatttgtgtggtgctcaggtaatagctcctaggtcagagatgaccacctgtctgccagccactgtaagggctgtaagggggccatactgtggcattcctgaaacccattcaaagacattcgcttgtgcctgggcacacagaaaagtgaacaaagccagtgtgctacttacagtggagtagctactccagttatcaaagcagcaaaccagatattctcttggtatcaccagtagattatatttctatctctgtcagaaaaatgaaaacactaccatatgttcagtgtatcccacaagtgcaaaggaccccattgcactttgaaaagcatgcagtgctcagcaaatggacaggatttaactatggcatccaagacaacccccaggcgttccatttaggaacctgagg

SEQ ID NO: 424329 - DNA, 297 bp, Homo Sapiens
cagtgctggaacttgacacctccggccctcctgctgacagcatttctttgctagaaataccacctttctcagagcctgtgtctcctttggttttggtttttactccatgatatgttaaggactcaccagatttaaatgtgaaatttatcttcaccactaaaaagcccacttgtcttggataaatcacttggtttctttaactcctcaaaaagtacaaagtcagggggttttgatttttctctcttgaaaatttggcttttaacaaaatttgtatagcaaaaacaggttacccgctcc

SEQ ID NO: 424330 - DNA, 115 bp, Homo Sapiens
tggatgggttatcaattcacacagtaagaagcctgctctatgtgccaggttgatccctacttcttctgagtcccctgattgcctgtacctttgaaattatcaataaagtttaaaa

SEQ ID NO: 424331 - DNA, 223 bp, Homo Sapiens
ataccttatcctcccagcctactgttcagtgtttttatgggcacgctcattcctcaacaatactggtcccacagtatttttctctccaatcacaacagagcataccactgctgcctccaggcatggcaacaccatgtctggccaccaacattgccaaattggacaccacttccactctcctcactggaaatagatgctgtagccatttatgccactgctgccg

SEQ ID NO: 424332 - DNA, 100 bp, Homo Sapiens
ataaatatatttctggtggcatcagaaaaaatcaagaagcttccttgtagaagtggccagcacagaatttgaatgcagactctagtacttagaatccagg

SEQ ID NO: 424333 - DNA, 110 bp, Homo Sapiens
ccccttacagcaatacctgatcactactgcgcagctacttgctcggtactatgcgaatatgagtccaaatatcaaagagaaatgatagcattgaaggactcggggatatc

SEQ ID NO: 424334 - DNA, 301 bp, Homo Sapiens
cctggaatactatatactactagtctgcattcccttactgagttggccttatcgactatgtagcgtcttgatatgtatctgctgccattcgaaatgcaattatcccaggagcgtcactagagctataacatatgggtggtgcatacatatggacaaacacctgctataattcctgtttggagaacaatatggcctggtgagtttagtcgtgccctagaggactcctttcagtatctcaggtggggccacatttttccagagaagtggagggaaaaggcaggacagtttccttcactaattt

SEQ ID NO: 424335 - DNA, 469 bp, Homo Sapiens
cggcagttcagggcgcatgcgacgttatccagtgccttgttctaagtgagggagcactgggcgtggaatctgcagctggcagcagtcacagggtttccaaccacgacaaacacgcctgcaccccgcacgcacagccgggccccaatgagggtttccatcagcccttccctgggaaaactctgcaggcttctggaaacatccacacggctctggaggacctggctgtggtccctgccatggcgccgctggcactcccacggctggtacacagcaccatggctgcttttacccagaaacgagcagcagactcaccgggcgcctccctcacacgctgccaccactgctggaggaagggcacgtttccaaccaaagccaccacagcaacttttaatgtcaccaaggtttcccactgccaagagcaacggtaaaatctgtgctcttttaacggatgccagaaaatctttcacaa

SEQ ID NO: 424336 - DNA, 315 bp, Homo Sapiens
aagctatatttggagatagataattgtccccagaatatctaaaaacattgggtaaaatatttaaaataccaccttaaaagcattcaaaaccttacaagcactaagctagattctgggtaaactgaggactaaaggtattattgcactgtgaacatttgccaacactagcacacttgcattcgactaaatggcatcaaggagagggatacgtcaagcccaaagcccattaagagtacagagttttataggagacattccccacaataaactgggaatttaaagggctaattctcttagagtaaagctaatccataa

SEQ ID NO: 424337 - DNA, 256 bp, Homo Sapiens
gagccggaccagattcacggcagacatctcacaacagttgtccacctggtagctttcctttcacttctgagtgcatcgcagccaggctttgaacaaactgtagcctgattttatgttactgaagtgctcgcttcatgatcactggtcacttcctgattaccaaacccagtgacctcatctcaatcctcattggacttaaactctatagatttggaaccctgttaactggcctatcataacataccatctctttccg

SEQ ID NO: 424338 - DNA, 341 bp, Homo Sapiens
taaagagcatccagtctctttcattattgaatgatgtgaacttaatcaatttaatttctctagcatgtcagtcaggattatggcaggaaatagaaggcattctgaagtaataacaaatggcaaggcactcagggaccatcaacagcaggaagccactactaacttcaggcttgaaaaggccaaggaaggaatagagctaccagagcctggtgagggctagagtcaaggtggatgagccacttgacaggggctaaagtcctcggggataagcactgccagaatgctgtgctaaaacaaagacggtgagctggggaaaggcagacatactcagacctctctct

SEQ ID NO: 424339 - DNA, 165 bp, Homo Sapiens
gtggaccagaaacagatcatgaagagcacaacacaagcatgttgatgaaatttaaactatcaataagctatagtgagccactgaagggctttaaaatataagaacaaatcagacagcaacacgagatgagagcaaggtctctttcattgctgaaattccgggtct

SEQ ID NO: 424340 - DNA, 628 bp, Homo Sapiens
ataccgagtaatgactcagctagatatgtgtggagggccaatggcatgtgctggttggaattgaagaatgattattacttgatatgatagtacaggagcggaatctaatgcagaatatgactgatggcaccagcaagggtgctgaagttcccagcacagcatgcccatgggagtgggtgggaggctgtcaggtgggaagaggatgctgtattgtcaatagctggtcttctgttttggctgaggtttggttattctttacagtgggagatagaagaggaacttggctttcaaagttgtctctatgtattttgaaacaggatatatatgggagcttctaagagagaatactcagctagcctggcggctggcaaagagctgtcagagaatgatgcaggtgagttgagccctggctgaggggtggactggcaagggtcatcctgtcagatcttcaggccagaggtcgcaggtaggaactttctcgaatcgtcactgaggatcacatcagagagaatgagaaatgacagtgggatggaaccttataagtaaaccttgtttagtacctgtcttaccgtaagccactgttttatgacagtgttttgtcacacttcagacagaccacaggttctcc

SEQ ID NO: 424341 - DNA, 116 bp, Homo Sapiens
tctcggaccgcactaagctcatctggcctgagtccagagtttatgcatttgaagacatggctgtgtacttctctgaggaagaatggcattattaggtcctcttgctgagtccacta

SEQ ID NO: 424342 - DNA, 217 bp, Homo Sapiens
tagtgatgagtattgcaggtctgtgacagtgcctggatcccagttaagtgcttagcacgctcagcacaagttacatgtataccactgataggcgccagctctatggatcccagccctttcccagctgtatgtcttggaactaaaacgcaacctcaccacttcagcttatctgtggtatagctgaaattgtggctgagcgtgctaagcacttaactgg

SEQ ID NO: 424343 - DNA, 362 bp, Homo Sapiens
caggtagctgcactcagggaatggaaagttgagtcacataaaaataggaaagattttaacagctttctgtggattttattatagatttatgtggagtaatccacagaagtatgtaagactagtaggtactaggcactcaaaaaatgtttatcatacatatacttctgaatagttgtcaagaaaaaagcaattttaaacatggcttacgttacacagaaattacctggtttaagggccatcatgtgacctgagaagttttgacagtttgatctatacagactatgaatgctaaactcttctaccacattataatcctttgtctattcttaatagatattcaagtcctcaaacataccttaccc

SEQ ID NO: 424344 - DNA, 334 bp, Homo Sapiens
ggatggaggacagcagctacacggatgacactcacgaatggaggacagcatctacacggatgacactcagagatggaggacagcatctacacggatgacactcaggatggaggacagcatctacacggatgacactcagggatggaggacagcatctacacgcatgacactcagggatggaggacagcatctacacggagtgacactcaggggatggaggacagcatctacacggatgacactcagggatggaggacagcatctacacggatgacactcagggatggaggacagcatctacacggatgacactcaaggactggaggacagcatc

SEQ ID NO: 424345 - DNA, 226 bp, Homo Sapiens
agctcggtaccttctttgttgtgagttgtctcttccagaatctgacagctcagagtctttggcaggaccccaccatgtcttcagaggtggagaaaatcagtgaccactgctagggtgggcaagctctccctgacagctgggagaagcaaacattgccttctatgcacaggcttccttcattgagttagtcacctttatttgatcagcaacctgctgtcaatttaga

SEQ ID NO: 424346 - DNA, 165 bp, Homo Sapiens
gggattggtctaggtggcagacggcctgagccacatggctgatatgccctcaggtcatgcttggaatggtgtcactatccagtctgacaccaagaggctagctgtgggattggatgtagaatttcaagctctcttcttagaggccccaaagacaagcatataggg

SEQ ID NO: 424347 - DNA, 298 bp, Homo Sapiens
tgagtagtggaccgcaacacattgtatttcagtcttgatgttaataaaccctttctgttagaaagagaaaaaaacttggttcaagggtaatgaatgtcctttttagacagaattcagtcaaatgctctaacatgtgctgctagaagtcaaagccagctggccatgccctacactcttgacagatctttggcttggggactttcctgtcacagtcaccactgtgcagcatggtaattcctcacatctccccacaaactggacaaggacagtgtggtggggcttcttatgtaggtctgag

SEQ ID NO: 424348 - DNA, 266 bp, Homo Sapiens
gatatcgagctcggtaccgactcaggagggcactaatgtctgctgtattgcaatttggacagatctagaaccttttgttagaaggggccccattcaaagtgggcttattttgcaagtaacagcgtaaatgggcttacctaaaatctacaaatgaaggatgtgtttccttgtaactcaatgaggcctgaaggatgctggcgaggtttattattagacccgtctgaagtactgcacacgtgttctaactaaatcctcccgagcatccg

SEQ ID NO: 424349 - DNA, 304 bp, Homo Sapiens
tatgactcagactgccctccatagttccaatgcaggagtctggattgctcctccccagaattcaaggcaccctcacagcactatctcaggtgtgagctcagccctgggtagctcagaggaagggaataaatgggaatgtaccatcttagccacaagcatagcttagggagcctataatgatcattctttccttcactcatgtacaaatgatgactgaacacagctcaatgcctgacacaaggcccaatgtggggcgggggataggaggttgccccgggagctgtaggggacagaaagccagtct

SEQ ID NO: 424350 - DNA, 156 bp, Homo Sapiens
gtattaatgcatgggacaaagttttagtaatgcaaaatttagtttatatcatatttgctccctcatattctcacaaatctaaattgccatgctcttccacagaggcaagaaaaaagtaatgcctaactcgtgggctctaatcatggaggttatggg

SEQ ID NO: 424351 - DNA, 582 bp, Homo Sapiens
tagccgattatagattctagatgacatgatctgtttatcttagctatggagagtggaagaggacagggccgggagagtactgtgaggaagtctttttcatcttgcttcagtagttctctgggagactctgggaacagagtctgaagtggtgcgacagctccttcacacttcctttgctgaggtgatccgctaattgcatgctatcaggaaatgcgtaagatgggagtgagatggtttcccagggggcccttcttcctgtgctccatcgagaaatacattttcacttgctggtgtctgagctgtgccggtgtggatgctagagaatccttctggcttttctaagtgaatgcacctctctaagctgcaagctttctggatggccccaccctggtctcatccctgagaaatcttgtcattttttcccactggtatagttttcttctgcatgagtgatgcacatacactgcccggcccattagttgtaggcgtttgtggctcagtttgctccatttatttcttattttgttctcaggcatctttagggctgtgagctacagcttttctccttgagcatggatttga

SEQ ID NO: 424352 - DNA, 124 bp, Homo Sapiens
acatgcagagccatttatattctggctctaactaacctttctagtctcatctccaagcatttcccacaaggtatgctattctcatgtttttcatggccgtgcctctgactatactattttctct

SEQ ID NO: 424353 - DNA, 416 bp, Homo Sapiens
tagtggaccagcagttatatttcaaatggcttgaaaaaaattaatggaataaaattttgcatctgatgggttacgtttagccagcaaaagggattttacctggggctccattaaagcctgcactcctaagtcctattctcaatcccaccatcaccattgtgcctccatcaacagatttttatttaagccaatgcgtttagagtacaattccgtggtgaataacctttaaggttacatttgccttttccctgcttcttgcaaacagtgcgtaatccacaagcacatttgttggctgtaaaggcgtacaacagcaatttttgcaatgacagtgcggcgagggaatatgagatctgtgtgctaatgagctgacactgcagaggctggggcggtgtagtgtggagtgcactacaagtgca

SEQ ID NO: 424354 - DNA, 373 bp, Homo Sapiens
tggactcagacagcaagctcccttggatgacatagatttattacgtagtatattatgtattggctgtcccacattttgaaatttaatggactcgtggtgatcagaataaaaggtcagtatttcctacaatatgttgatacgttaaaggcagaactaacacctcattttctaagcagaactattatcttattaaatgtctaagttgacatttcttgccagttttttctttacttaatgtaacagtgctgtttcaaatactagtcattatttaataactaaaatggaatgctgaagaattttatgctatgacataaaatgccgtattttttccccaaatatatgaaaaatggaattaaaatctccactgagtcca

SEQ ID NO: 424355 - DNA, 323 bp, Homo Sapiens
gtgaggaaaaactgataagcatgccactcctgcaattacagcctttgtaaagttgctacttttatgaaacaattgggaacaccaaagattatccccacagctttaagaacactttgaaattttcactatgaaaaaatttgagttcttagtatcacaatactgcaataccacaaattagaatttaaactaataaatttaattctaaatgtacaattaaggatttaagacataaatatcaatagactttcctaatgttccacagattctgcagttatttagaaatgagaaatgtatttaccaaagactaaataaaacacacaaaa

SEQ ID NO: 424356 - DNA, 310 bp, Homo Sapiens
ggtaccatgctactgtagggatagacctggtgtgaggaatctacatgaaggagtgagtcaaaggaaacatcacaaagaaggtgacacctcagaggagacaaaggactctgaaatcctggaatcacgggatatctctgattggttagggaattcctctgcactcaatctccagcaaatgggcagattccctcacaacttagaatttttcatggggagtgctggactgtaccccaaacatggagtaaggtggcatcatccatctctgaagggccatactcctcgcaaagccgtcacaggactgacctacaga

SEQ ID NO: 424357 - DNA, 171 bp, Homo Sapiens
gggacttgatccctgcgagcattgcagagccatggagaggtgttaagtaacagggaaaaggatctcaaatttgtcaaggtaattccttatcttgagagacacatggagatttgaaccaggcagactgctaggaagtcctcctgcagttttgtaggggatctcatggaactt

SEQ ID NO: 424358 - DNA, 560 bp, Homo Sapiens
tcgagctcggtaccgtagtggactcagactcaataaccagctcaggactcacagaactcggtgttgggttggggttggaactcacaacgtgtcgtcattccaaagcccatttcttcccactaatcctatgctgtgggacaacatggatttattttagaataaatttaaatctcagtttcatgcaccacttcccttccttcccaacccacctggtaccccaactgtaacaatccttcaacgaccaccagaacctactacttctccatagctgtcctctctcccttcattattcagccaacaattcaaggttaatgtacattattatttatctgtatacacttcctgctcccttgccctcctacttcatcttcaaatgtgcttgcgaaaccacctctggttaaattcacctcttctgcctctacaactatgcagctccacaatcgccggaggacaagactcaatcacaaccaactgatctcactttcaattcatgatcacaattcttcaagagggcccttcatgtcaccggggatctcactacacctcctgagtccactact

SEQ ID NO: 424359 - DNA, 112 bp, Homo Sapiens
atccccgagtcttcaatgctatcattcctctttgatattggagccatatgcatatttaccgagaaacataatgcgaagtagtgatcaggtattgctgttagatatccccgag

SEQ ID NO: 424360 - DNA, 108 bp, Homo Sapiens
tgaggtcatagtgcccgcaggttcgctagtgattagctgtctctaacgaatagtacatacaattaactcgttcatctactcgttctcaaactctgcgggctactcccc

SEQ ID NO: 424361 - DNA, 311 bp, Homo Sapiens
  misc_feature (47)..(180): n is a, c, g, or t
gatcgagctcggtcccgtattacgtgtggaatgacaaggttcacaannnnnnnnnnnnnnnnnnnnnnnnnnnnnnnnnnnnnnnnnnnnnnnnnnnnnnnnnnnnnnnnnnnnnnnnnnnnnnnnnnnnnnnnnnnnnnnnnnnnnnnnnnnnnnnnnnnnnnnnnnnnnnnnnnnnnnataaactttgaaaatataaacattataaactattaaatgacctgctagaaacaatagaaatatcagtcaaggagattgacacactgttctgagtaaacgcaaacaacaaaacaaatgacttcgaagcatat

SEQ ID NO: 424362 - DNA, 341 bp, Homo Sapiens
ccccgtgtggaagagatagagaaagtgaatgaaggtttgaaaagagcatggagaccttcaatattatcaaatttttgagtttaaggtgatatttacattaaaatagcttgccagtgatgagccaatgaagggaaaagcctacttttcagttagttatgatttccagggcagaggaaaagtaacaaggagacagggtcaaaggaagtgagaagctgaacagaacttttaaagtttaaacttaaagaataaaaacacaagagaaccagaaacaggttcaattatgctgaatactctatttcccaaacctatcctctacttgtctcattaatgtctatatttct

SEQ ID NO: 424363 - DNA, 363 bp, Homo Sapiens
  misc_feature (161)..(251): n is a, c, g, or t
cgatcgatgaaaggtttaaagacttcagcacattcttcagatctctctcaaaaacacaactttaacttctaaattagggaggaaaagctattttcttacaggactagaaaaaacaataaacctacaattacttatttttccctcacatcattattaatggnnnnnnnnnnnnnnnnnnnnnnnnnnnnnnnnnnnnnnnnnnnnnnnnnnnnnnnnnnnnnnnnnnnnnnnnnnnnnnnnnnnnnnnnnnngtgaaatcagtttcctttcaggacaacctgaacatcaaaatagtcctttaaaattatacaagaaaagtatactatcaaaaggaatagagaaaggattctatttaaggcaatg

SEQ ID NO: 424364 - DNA, 357 bp, Homo Sapiens
  misc_feature (96)..(253): n is a, c, g, or t
ataggtatgtgatagagctcctagggtatgcggatgggaggaagggttgatcataaggtatgtgacagagctcctagggtatgcggatgggaagannnnnnnnnnnnnnnnnnnnnnnnnnnnnnnnnnnnnnnnnnnnnnnnnnnnnnnnnnnnnnnnnnnnnnnnnnnnnnnnnnnnnnnnnnnnnnnnnnnnnnnnnnnnnnnnnnnnnnnnnnnnnnnnnnnnnnnnnnnnnnnnnnnnnnnnnnnnnncaaacttgacttaacaaagaaaccttcggtatttctagcgtgtttgaaatgggatgcaacgtcttattatggtttgtaaggctctgtctgacatctggcctgtc

SEQ ID NO: 424365 - DNA, 229 bp, Homo Sapiens
cctacccagcctggatttgcctgttagaaaggtgtcactgctggatgggttgaatccattcctccaaaaaaatgtgccctggagtgttgttggtgttatgcaggcaactgttgccaggcgtcacctccacccaaagatgggtgttttgttctgcactgtgggtggcaattgcttcctgccgtgaccgatttttcggaagctcctcatccttcagggaccccctaagtac

SEQ ID NO: 424366 - DNA, 177 bp, Homo Sapiens
cgatcgataaaggacactggaaggatgagtgttcagaaggcaatgagggaaatagccaagaccacgagacaaagaggccatcggccaagggctgccgcaccttggggaaccaaatactgatctgatcaggctggcaggagccgaaggacgtaaggaacaggacagaccgggaacctt

SEQ ID NO: 424367 - DNA, 297 bp, Homo Sapiens
tagagacaagaaagaacaattggacatcagaagaaagaaggaaagatttttctgccttccaagaacacactacctctcctatctggcctcctttcctattgaaaagaacatgatgcattgagattaagactttgcccaatttaagaaagagctattaagtattttagttatgagatgaccataacatggagattgggaaagatggaacatgatgagattgtgagaaatggctagctgttaagtatctccaaatgaccagctctaaactaattctctactcctttcctatggcttcca

SEQ ID NO: 424368 - DNA, 362 bp, Homo Sapiens
agtcgacaaacgcttgctcgggaacatatgaacttatgcactataaattgaaacatggctaaggaattaagatccagagtcatactaagtagacttttgtggccacgtgcccccaattttgagacgtatgatttcgtgtttttcttttcaataatggttatttaactgcataattacttatttgttgcattctttttcatattaataattttacaactaaattccttcatcagaccttctacacaatttgagtttggataactggtcaccatatgtatgaaagcaatggaacccatacgggtatagagatgcttatgaataaattggagttgggatgagagagagtgaaacagtccatgcta

SEQ ID NO: 424369 - DNA, 125 bp, Homo Sapiens
cagattctttggctggcacaaacatgttttgtctttgtatcccctatacttccttgaagagaaaatacttaggaattatttgataaatggaaaagcacatgaaagaaggatgtctacccccaaaa

SEQ ID NO: 424370 - DNA, 207 bp, Homo Sapiens
cagttctttgctgtcctcctaaaaccctctgcttctaaggcaaagatggtgccttgtttctctgttccatcccagcaattaacacaaacgtttgttgaaagatagatacaaggggcatggttcagagatacaaattcaatgttatctattctcttctagtcctcctttaaggaggctgcagaaagaggcgttttatctattcacaaa

SEQ ID NO: 424371 - DNA, 370 bp, Homo Sapiens
agcacagatctttgcgtgctcatctggcagctgatgggtgtctgctggcatcaggcctgagcggtgaccgtgctcctctgattgtcctcactgcgtgtgacaaggcctgggccactgtgtgagtcgtcttgcgctccatgaagcctggtgtctgtgcagatgtgtgggtggcgttagggttgggggacatttgtctttcacactggacgaatgggagtctggagctggtgctactggttgaggaagaggcccggcctgctgccaggttcgcccacaccttccccctggttgttgggaaaaccaaccttggaatggccaaagcaggagatagcagctccccggtgaagatccaggagctctcatgagctcc

SEQ ID NO: 424372 - DNA, 137 bp, Homo Sapiens
  misc_feature (94)..(94): n is a, c, g, or t
ttcctttatttgcatgatatatttgcatttgtaaaacacccacatttacttttactgcttaatgggccctgatttaaatgggccactctatatnaatggagcacactggttctccactcaatggtgttgataagaaa

SEQ ID NO: 424373 - DNA, 369 bp, Homo Sapiens
ccccgggcacgatctttgccttttaggtccctttcagcactaaggttttgtgtttttagtagaagtgaagtatgtccctgaacattttcatctgtcttaatggctctaattttgcttttgctaaaattaaaatcttcataattgaattcaaaattaaagtatatgtcctcctattggagaaaaaaacaagcaccttaacaggacacaagtttgaaaatagtgttttaaacatttgtaagatttttgtaaatgctctaaatgttttatttttgcattgtttttaccttgaaattgtataaacttttttactatgaaaatataagcattagacagctaactcaggttccattacaaccttaaagatacaga

SEQ ID NO: 424374 - DNA, 348 bp, Homo Sapiens
acttgacgatgagtaagatgctcgtatcatttgtcagtgactctaaagaacctgtacagccctagtttaaggaagaatcatggataccaagaataaatcacaaatactctaaaaaatcattccttgaaggggaagaagactttgctgaccttaattcctatcacagatttcactgaacccaaatggggtttggtttcattaatttaacctataaaagacagaaatagttgaagctgcagagaaaatagcaatggaacctgaaacaaagtctaattgtgattaattaaaaattagtgtcttctaaagattaccagaagatgaagaacaataaatttacaaatatcagaa

SEQ ID NO: 424375 - DNA, 362 bp, Homo Sapiens
cgattctgccttgtattatatcctagtgaaaaactttccagttgtttcccattgattatagtagtttttcatatatggcctttattatgttgaaggattttccttctatacctaaattgttaaaagttttcatcaagaaaggatgctgaattttgtcaaattatttttctgtatcaattgagatgataatgtgagttttataattggtgaatgttatgcatcacattgatttgcatatgttaatgcagccttgcatgctagacataagcctcaaataatcacaatgtataatgttttttatatattgaatttgatttgctaatatttcattgagaatttttgcatcaatgttcattaaatat

SEQ ID NO: 424376 - DNA, 505 bp, Homo Sapiens
  misc_feature (213)..(222): n is a, c, g, or t
  misc_feature (256)..(367): n is a, c, g, or t
gtcccgatttttgcaaaagaatcagtttgggggtcaacagactgagctgggattctacctccattacttataggccaggtaattgtcaagttatctaggctaaactgtaaaatgagtctgacataagcagcctcatagggtgttacatattaaataagaaatattaagaaaatgatacgacctgccacatagttggtgacaataaatttgagnnnnnnnnnnagctctgactccaaccctgtcatttttattgatnnnnnnnnnnnnnnnnnnnnnnnnnnnnnnnnnnnnnnnnnnnnnnnnnnnnnnnnnnnnnnnnnnnnnnnnnnnnnnnnnnnnnnnnnnnnnnnnnnnnnnnnnnnnnnnnagtttcttagattaaatatacacttactatataacccatccattccaatcctagctgtttccaagtttgggtgattacaaaaaaacagctactgtaaacattctcatacaagattttatgagatcacatgttttcatt

SEQ ID NO: 424377 - DNA, 411 bp, Homo Sapiens
cggctaccggctcgattctttgcctcagatgggcgactgttgcttttaatcattttaatataagaaagactgcagaaaatattccaattcaaagtgtatgtgaccatgaaaagggtgggttctttccaggagttctggtttgactgtgggaggccctgctggcttttgtgcctgttgctaaatgtgaacccacagaaagtgtcatcacagccacactgaaatgagttactctagacattgtcctgctgcagttacgaaagcactgactaaaccgtgaggaatctcagttcagcttatcccgtaatagtcactcgctgatattttgcctgaaataacccttgaatcatgtttgctggacagacaaagtccagactgaacagtggtctcagtaatacacaaagctcggcagga

SEQ ID NO: 424378 - DNA, 215 bp, Homo Sapiens
ggcactgatctttgcatttggttgtgatgcccgtacaatctgtaaggtgaagaatccctgtgtcctgagaaactccatctactctatgatgctcgtttatgtttctttttctacagtttgctccatggtagatacaaatatcagcttctggccatcatagcaaatgaaaatagtcattagcaaatggcaataggctgatatttccacagtggttc

SEQ ID NO: 424379 - DNA, 303 bp, Homo Sapiens
tcagctcggtaccacgattctttgcgatggtgcgtgagatccagtcggcggtgtcggcaggcgtgatgggcattgacaaattctccgaggaggtgcgccgcggcatgtctgaggtgcagcaagtgggcgagcaactgtcgcagatcatccatcaggtacaggccctggcgccgcgggtgttgatggtcgacgaaggtatgcaggcccaggccaccggtgccgagcagatcaaccacgcgctggtgcaattgggcgatgccagcagccagaccgtcgaacccctgcgccaggccagctttgcca

SEQ ID NO: 424380 - DNA, 400 bp, Homo Sapiens
tttttgccagcatttgttatttttgggtctcttcaatagccatcctaactgggagtaagatgatgcctcactgtggctttgattagcatttccttgctgattagtggtgttggacattttttcatatacttgttggtcatttgtatgtcttcttttgagaaatgtctgttcagagcatttgtttatatttaattagattgttgtgcttctttgctgttgatatgtttgaattccttgtatatacttgatattaatttcctgccagatgagtttatattttctcccattctgtaggttgtcttttcactcactttattatttcctttgcctgaggttttttagtttgatataatcccattgtctatttttgcttttgttgcctgtgcttctgaggtcttac

SEQ ID NO: 424381 - DNA, 171 bp, Homo Sapiens
caacgattctgtgccattggatttaggaaactttacactaggcagtgaggaaccataagttagaaagatcatactgacttagtgaggagcgtggcttggaaggggtgaagactgaaggcctgatgatcttaagaagttacatgagataataagaaaaatcatatatgctaa

SEQ ID NO: 424382 - DNA, 310 bp, Homo Sapiens
cacgatctttgcgggcaacccttttctgcacagtcagaccagtactggtagttgagagttgtgggtaaacttggctctcataaaaaagaaaggcattgtatttcaagtctttacagtagatgtttttgtgggacttatcaaaggagagaaggaacctctttgagttggtgagccatcaacaaatctgagtgccatttgtgtgtttcactggccattctgaacaagtagaaaggaaaccaggatggaagttaggaaattatgttccatcccggctctttcactaaaacccaatttatgggtatataagatg

SEQ ID NO: 424383 - DNA, 337 bp, Homo Sapiens
aaatcagctctaaggacaaaatccaaacccccattgaggggccccacatccagcatcttccaagtcaacaaggagcagttatattttgcaagaactcgcagtcaagcctcaatccaagttcatgctttttttaagaaaacacctgttgctggaccatttgcaagacaggcaaacagaaagctagccaggttaggcccttgttcactccttccaccatcactactaccaccgcttcagatgtacaaagaggtaaactgctaacctggtgtgtaggcatgtgttggcgagagggtcaacggaatgttctacccacaatctccatggcaaagaatcgggg

SEQ ID NO: 424384 - DNA, 134 bp, Homo Sapiens
acaatttagtacagattccggttgttggaagcatctcaatatttgttgctgtttttttccctgctgggtgcatatttttctgagtgttggtggttttggaattgtgatgcttttccagacattcacattgcatc

SEQ ID NO: 424385 - DNA, 209 bp, Homo Sapiens
cacgttctttgctggctgttggccagtggcctccctccattttctgccatatgagcctctccacaatacagctcacagcacagcagctggtttccatcggagcgagcaagcaactaaggcttatttggaaaggtgtaactttccagatgtttttctgctgtattccacaccttagaagcaagtctgtaggtccagatcatgcttgcagg

SEQ ID NO: 424386 - DNA, 194 bp, Homo Sapiens
tgtgatgatggaagaagttccgaaaagaaaatgaaacatgcaaagcctaggctcataagaaacttattgtcatttcgtgtcaatggccaaaccaagccatatctccaaacccaaagttaaggggtgagaaaaatatatttctccttataggaggatttaaatgtcataaaacaagagtaagaatatagggaggg

SEQ ID NO: 424387 - DNA, 323 bp, Homo Sapiens
agaattctagatggcagcatgcttgcaacttgggaaggatgaggcctttgtctggagacattatccctatgagctctgaggtcttgtctccttctgtagcatccccaccaatgtggccaaagccaatggccctcatctgatcagtcctcctgattctggtccagccactgagccctaggtctactcaatttcatggcaggatacccagaaggagggaaatggcctcagccattctcattcctatttagagaagtgcattcttcaccatcatccttcctaccttttcttcttacccactgcccaaggactttagcaaagaatcg

SEQ ID NO: 424388 - DNA, 342 bp, Homo Sapiens
cacgattctttgctatgtagcaatagtaactgcaacagagtatgagagtcaaagatatttgtatcaatatgaattgagattaattatccaaaatatttcaatcatctacagaatagatgtttgaaagttcacaatactctggaataaaatattttctacataatgtaaagcaaagcattatttgcaaacgtgtaaatacatattgtcccatgagaggttttccattataacttcagagtaattaaacatacaaagaccaatcccttgctaatctttctgttcaaattgcttaattatgagagcttctgtgttcattgtaagacagaaagataagcgggtacc

SEQ ID NO: 424389 - DNA, 138 bp, Homo Sapiens
cccctcacccacagaggttttgtcttagttgttttgaaaaatcataaacgtctctgctcctctcacctgaaccactcttactatctacatccctaatgtggatagtattacacatattaaatgtgtacctcgtcccat

SEQ ID NO: 424390 - DNA, 142 bp, Homo Sapiens
atacactagcattaaacatatgctgaatatgatttaagtgttctctgataaatcagaagctacttcactactctgtaatgtaacagagttcttatatgaacagcaatttatgtggtcagtaatttcagttaaaagttaattc

SEQ ID NO: 424391 - DNA, 126 bp, Homo Sapiens
ccaaatgactactgaaccttcctacttggaatttttccatgtcaaaggggtcagaacctgcgacagcagccagactcacatcctttgcactgcctgtccctcagcataaaaagtgcattttctttc

SEQ ID NO: 424392 - DNA, 107 bp, Homo Sapiens
ccacgcgatcggccagagctactagctgatacaaaaccacatgcacaactaaagttcgcctgcatctgctgtgcgctgtgtgtatctcggaccatgattcaatatgc

SEQ ID NO: 424393 - DNA, 182 bp, Homo Sapiens
ttgcaaatagcagcagcacagttgctgatccctgatctatagggttccttcccccgcaccttgtccctgtaatacatacattgaagaatgatgtgccttcctaacatcaacgtattattcctttccagagttacaaatcttgagtagcaaagagacttaactttaatggcatcgttttagct

SEQ ID NO: 424394 - DNA, 343 bp, Homo Sapiens
gagccgctaccggttcgattctttgctgtagttggggctgtaaaatgcttccccgtgagaaatgcaagcaggaagtggtggacagccggagagctgccagagccttctgcctccccgcatttttattttgatgacctgagaaaaggcatcacatttctggcttattgatttctttttttctttgtgtatgtggttggagtggggaagttggtgggggatgaaaagaaaggaaaataaagccattcatcattgcaactagctattttgtgtagaaaatgttttcttggtttctgttttatgtgaccaagcacttacttactctgcataataatgcaaagaatcg

SEQ ID NO: 424395 - DNA, 165 bp, Homo Sapiens
  misc_feature (42)..(42): n is a, c, g, or t
ttgcatcagtctgctcatgctgcagagaaaatgagatggcanatggggaaacaggaagaagaaggcaaaatgagaaacaataatgacagatgctgcaatggtccaccttttcgttactgacatggttaattcttcatcttggattgaagtagaaagtacttttta

SEQ ID NO: 424396 - DNA, 212 bp, Homo Sapiens
gcaccggtagattcttgcattccagtggccacaaaaatatttcttaattgatttgaactcatagtggcacaaaaaaatgaaaaacaagttacgtcaatggtcagaagatgagaaagaaagtaaatcagtgatgtagggagtaatatgagcaactttccaacctactaatgcaacctatcaatttgaccaaactcatgtcttaagacccagat

SEQ ID NO: 424397 - DNA, 320 bp, Homo Sapiens
  misc_feature (205)..(273): n is a, c, g, or t
ggcacgttctttgctaagagagctccaaggtctcgtagctaacagatggactgcttggcttcaaagctcttgaaccttaccactatgctatcaagcaccccgtgtgcttaacactatgcattcttcagcttttcttggaggaggaaataatcagttgagacaattatctccataattctggcctgggaagggggaatagccatcnnnnnnnnnnnnnnnnnnnnnnnnnnnnnnnnnnnnnnnnnnnnnnnnnnnnnnnnnnnnnnnnnnnnncaagaatattctgggctatgaggatagcatgagcaaaggcaaagaat

SEQ ID NO: 424398 - DNA, 107 bp, Homo Sapiens
tgtccaaaccaatgtatacgtttcatgtatacattagtatttgtattttacttttactatatatttatggcactatatcttgacttacaattttgttccattgattt

SEQ ID NO: 424399 - DNA, 281 bp, Homo Sapiens
aaggatggagtcatggaaatacaaagttatggcacaaagtgatggctagcaatagattctatagctggggaatgggtgatttcttgtctgggtgcactaacacagcaaagctgacccaacttaggcaggtgtgtaggtgcccaggtagcgggcttttgtgtacgtgactgacagtaatgtttctctcagtccctaagctactccttaaactacataagacactgatataggtgggtcgaactgagtttcatcaggagtaggagaaggaaaatggcaagcaa

SEQ ID NO: 424400 - DNA, 147 bp, Homo Sapiens
cacgattctgcccatatcactcggatctttaaaaagttacatatatacaacaatcaaaatataaatatatatccttctatgatatgattttagataactaagcacttcaaatttgtaaagttactttgatttcgtatagcaaagaag

SEQ ID NO: 424401 - DNA, 309 bp, Homo Sapiens
tgaatcgagctcggcccgcatgattcttgcacaatgtccggcacttagcaagcacttagtaccttttagtttccttcttttacccctaccatcttttcctgcctagactggattcctttaattgatgtgcacagttatctaactagagagctaacctgcagatgatgggacaattttcaaacttggagcttatactgggattaaggagggccaactttaaacacatactacccagctgttcccttcaaatgtttgtactgatccatgcttctaaccccatttaccccttagtctttcagcaaagaatcg

SEQ ID NO: 424402 - DNA, 134 bp, Homo Sapiens
ccgcactttcttggcactcacgtaaaatactagttctctaactatgccagaaggccctgcacaccgtggtcccggccctcttctgcaaccttatctcttgcttctaccccttcttgcatgaagtatccgccacg

SEQ ID NO: 424403 - DNA, 154 bp, Homo Sapiens
cgtacaagtctttttcacatgatcgatctgctgtcaaatcactttcccgttatgcacttacagagccaatttttggagcacaaatgtgagattttatgtgtgcccaactgttaggatttcatcgtgttacagtttctacccatcttcaagtgag

SEQ ID NO: 424404 - DNA, 482 bp, Homo Sapiens
gtaggtttgaatgaagccactaggtaaacttccaaattagaaccggctgctccacatccttggagctggtcataatctttagactgtgcaaatatccaatgaacaaaatttttaaggagccagagttatttggtttaaatctgatgtttaaattttacggcagatgactcatgcttcgcaacattgatacccaccctccaataggctggttcagctccataaaaccaaacagagcaaaaagctaggctctatggtcttcgagtttttcaaaattctagtttgttgtttcgaatagaaagaaagacatttgagtttgtaggatatttgggttgggagccagttctccgtaggtctctcacatttcttcatgtcttatgggaaaaggcactgactgtctttgctctaggctgtctttccaaggctgtttgtataatagccttgttgtaggctgcataataaatagtcttggagatagagatagt

SEQ ID NO: 424405 - DNA, 216 bp, Homo Sapiens
tattttactacaaattctgtagttattttactacaaaaagattagaaaacatgtactaattccctgtaaatatctgttgtacacttcataatatagaaggaggtcttctatatgttccagtaagttttagcagaatttagcttctttttggatgtctaatgcatatccagagaaaactcccctctcccatcctaacaaaatgttgacatcaacatt

SEQ ID NO: 424406 - DNA, 264 bp, Homo Sapiens
tccccgtcatatttcatttgtatggaaaatgtcttactcttctttgctgacctttcccacagaagagggagaaaatgatgaatccacatctgaccctccggagacagtccaggcacagcaaacacctcccagctcagctggacgttctggttccaccgggaggcttatctagctgccatctatatttactttaaacaaagcaacccacgacatactatggactgaacctccatgacagagcaaagactcgtgccgagtaccgag

SEQ ID NO: 424407 - DNA, 227 bp, Homo Sapiens
ggtacgattcttgctttaaacaaaataagattaggaatttttctgtcacattatgtctttttctctttcctcctttatccctaaatagaatttttcacataaatacattgtgcttcttatcaagagctccaggttggtcctcgagaaagcttagacacttaaccgcagtaatgaaataatatctgccccaatttttaagcaactattgtgtgtatgccaatttctgt

SEQ ID NO: 424408 - DNA, 237 bp, Homo Sapiens
ggagctcggcccggcttgattctttgcttatgtgcatccaatggacaggctagtatagcttcatagcttccaattgctacaagggagtgaccaaaaagtggaagactaagctgctagtctagcgtagaattaatttttgtgaaagatctaactttatattacttctaaattgttatgctatcccatactatttgttgaataatccattttttccttactaatttgcaaagaatcgtg

SEQ ID NO: 424409 - DNA, 294 bp, Homo Sapiens
gccggcacgatacttgcagatgagaagtccctttgcaaggtacagtatggatataccctctcagataatgccttataatcactgttgtaatagaggtggttgttatgtagttacagtgggggcaaacagttgaatataatagactggtgccagcagattggattaaataggtatgagtacagcacagaagatacggatggctctcttcctctggactacaacaaatggccctagctgcccaccagaacacttctttgcttgcagagctttgggatatgaaggcaaagaatcgtg

SEQ ID NO: 424410 - DNA, 192 bp, Homo Sapiens
gatggctggcaccattccttccttttactggagtgtcttcagttccactctgccctgtcaaagcttagcttacctcccccagaccttggcccaagtccagtcttctcctcaaagtcttccctagccaatttagcccaagtgaaactcccttcagtgaactcctataacttactgtttggaacactccgctca

SEQ ID NO: 424411 - DNA, 234 bp, Homo Sapiens
caatccctcaaaggtatttcctataatgaaaagttgcccactttcctgtgttcagtataaaatctagaaatcctgcatcagaagacctggccacaaccatcacaaaaataaggcggttatctgagaggtaagctctgagtcacaaaacctccgtactgaattcaagtaattgaagacacgagtgaagtatccatccttaactacacaggaacaattcccaggagcaaacgtaga

SEQ ID NO: 424412 - DNA, 223 bp, Homo Sapiens
cacgttctttgccccatgggttgagggagatttctctttcaggggatgataccctctttttaatctttccttccccgacttcaactgttcctgctgagagaagggcagggtctctctgctcccttctgccctggttctcttggccgggaccgcagggctgtctgagatgcagcaggtgtgtgttttcagcatcgcccacccgctcctgatgtgcagcctgagg

SEQ ID NO: 424413 - DNA, 148 bp, Homo Sapiens
cacgatcttgcaaagaagcttggacaaggcgaagggagcatttgatgtatgatctgtcttaattctgtcccagggaccacaaggatggcatgtgacgtacactaagtctagcagagtgaatttctgtcccattactgggactgctgag

SEQ ID NO: 424414 - DNA, 272 bp, Homo Sapiens
tagattctgtgctctctccactttactggcaggaatgggtagcttttaagtatcttcagctctttccagctccagagtctgagccctggataaatatcatctcatactatctaacctctaagttcccttctcattctttaagcttccataaatgcatctttcttcctctatttctattttattccctcacatttcatgggtaaatctttataaacacaccatttcaaacaatgctattttactctttctggctgccccgtgaatctttatag

SEQ ID NO: 424415 - DNA, 397 bp, Homo Sapiens
ctcgattcttgctaggttagaataggcagtttcttcagggaggcattactaatcaaacaggctcagaatcagaggtccaaggaaagaatgtttattttggtcaaattccaagtttattgtgggagcctttgagaggagccgcagacagcctttcacttttgaccataaaatgttttactacgatgatcatgattctttaatcttaagtatactgatgaaaggtatactgactgcagtctctggattataagaaccaaccagatttgactgttgcctgccatgtttcaaccacatagatcgtcagtggtgtgtggacgggattccctctagctgtcttgctgggagtgaggctgtgtagtccggcctgactgaagatgcccttgcgcaccaggctttt

SEQ ID NO: 424416 - DNA, 273 bp, Homo Sapiens
accctcacacgaacttggtccacgcaacttggtaccatttctattctgagtcacaggtgttaggtttacacaggtatttcctacatttgagggataggtcatctctgctagagatgtttcctctgcagccaataaaaacccacatgccagaaattaagctcacacagtcaagactgaaattctatgtctctagccaaagactcacataagtaaacagaattttagttctatatgtagacatcacaatgagtaagtactgatatcatttttttt

SEQ ID NO: 424417 - DNA, 125 bp, Homo Sapiens
acgaacttgtactacagagttctgtcctcagatgtgaggaaaggacttttcaaagatgagttctaaatgtttgtttagagatggcagcaacaagccacaggctgtaagaggaacgtgaatctacc

SEQ ID NO: 424418 - DNA, 370 bp, Homo Sapiens
  misc_feature (63)..(304): n is a, c, g, or t
cacgcaaatagactgttactttctttctttatttcttttcgagatagagacacgctctgtcannnnnnnnnnnnnnnnnnnnnnnnnnnnnnnnnnnnnnnnnnnnnnnnnnnnnnnnnnnnnnnnnnnnnnnnnnnnnnnnnnnnnnnnnnnnnnnnnnnnnnnnnnnnnnnnnnnnnnnnnnnnnnnnnnnnnnnnnnnnnnnnnnnnnnnnnnnnnnnnnnnnnnnnnnnnnnnnnnnnnnnnnnnnnnnnnnnnnnnnnnnnnnnnnnnnnnnnnnnnnnnnnnnnnnnnnnnnnnnnnnataagccacaacacccagcctctgcacactatttctgactgtgtcacacccaccctgcaatcatac

SEQ ID NO: 424419 - DNA, 229 bp, Homo Sapiens
tacgcctgactctcgtacagctcggtccagcccagccatgctctgctctgcaaatatatctctcacgcatattctggcacagggaaatagtgactctgagtggtaacacccagcccccaacaggcccgacctcatggactcctaggggaagtcaggcaacagaggccagtcgaggtaggtgactttgcaaataactcacggccccagacctcaaataactggctgtttg

SEQ ID NO: 424420 - DNA, 404 bp, Homo Sapiens
gcttgtcactatcctcttccaaggagaagctgaccctcttttcaggctggctagagaccttgttcagtgaactgactcttatttctttttgtacagccacctcggcttcagaagcaaaatcttcactggtactgaaacccagcaaggtgattctgaggtcctttccatggtcttgggggccggtgcttgctgagatcctgtcctctgtccccagaggaatgctctctggtacaccagattgactatgagatcccatggccatggatcgcacagacccacaccaggcagtgtgtgcctcagaggaacgccctctaacatttccttcggggctgtggcttctgggctccgtactctggtcctgatgctctactccagttaccaagggactgttatgaattttcaac

SEQ ID NO: 424421 - DNA, 255 bp, Homo Sapiens
acacgcagcttgggcactgggatgctgttgcatgttatggttagctcctcattacatgctggtggagcagtgcatgctggggatatggtgcccgaaagggccttacttaggcatgatgcatctcggtgttaggaagcctctgcagaggggtagtttggtagaggtgacgtgtgtatgcatggcagtgagagagtaaatctctgcaggatgcaaagtgtacatctgaatttggaggtttggagggcatgcgtgtga

SEQ ID NO: 424422 - DNA, 379 bp, Homo Sapiens
  misc_feature (171)..(173): n is a, c, g, or t
agaggagagagcaagatagaaacaggtcctgagatgaggtggcggcatacaagctatctcacacttctgcacccttccaggtgcgtttctgaaatgcatcaatgctgtgagatctacactgacttcagggatgtggcaaaccccctatttcttgtaaccagccagcgacannnattgtggagccctgcctgtgccccaggcagccctgtgcactaagaaagccaggcctgggagacactgacttgtcgtttgcctccaggcgtttttagttgtaacagactagttcttgtttcccatcacctagaatctgctgatctgtctggatcttagttcctgagtctcctgctctgcaagacgcaccctgcacatgcacgctcac

SEQ ID NO: 424423 - DNA, 138 bp, Homo Sapiens
gctccgaccccgaacttggaacacgcaacttggcacctgtcatcactccatcttaaacacgccattccgcaccccatgcctctgtctcgctgctctactttacagcaaactcagggacagaatgcacaagtcactcat

SEQ ID NO: 424424 - DNA, 290 bp, Homo Sapiens
gcggaagctactcaaagtacgtcgccatcttttgttttgtggaaagtcaggaaaagctttctcgtagatgtggtgctaagaatggggcccttgggccgaatcttaagaaaggaacaggtctctagcaggctcagagggaaggacggggtcttttcaggcttgggtaaaaaactggagcatctgtgtccacttgcctctgctgggtaatgaattggctttctatagctgtttcatcttcttcccaaagggaatggtaaattttattaactcagcatccaagttgcgtgtga

SEQ ID NO: 424425 - DNA, 363 bp, Homo Sapiens
cgagctcgcacccacactcacttgcatgtatgctgtatttcatcaactctcaggagccatgaaagctgcacagttactttatataccacgaggcaatcaaacggtacagggccaccacttcgaatttttcttacgctcttgttgaaagagcttttctaaataagaattcgatttttgtacacacacgtaaaaggaaaataggaccaagatgagttggttatgaccatgtcagttttgtcaccgtggccacctggccagtggtgactgagacatcactgaaattgcctcctaatttccaagacgttaaaggtgtcttagaatcgattagacacagcatttaccttacacattgttaaattttca

SEQ ID NO: 424426 - DNA, 125 bp, Homo Sapiens
ctggatagagttgtgggtgcacacaaagggaaagggtggatgccgaggggcaagggagtgaacggtactagacgtgttctgtttccttctccagattcgctctcttctcctcttccctctcctct

SEQ ID NO: 424427 - DNA, 255 bp, Homo Sapiens
  misc_feature (135)..(154): n is a, c, g, or t
  misc_feature (182)..(196): n is a, c, g, or t
agctgcacccaggctggagacaatggcgcgatctccgctcactgcaactgctgcctcctgggtttaagtgattctcctgcctcagtcttgccaagtggttgggattacaggcatgcatcaccatgcctggctaannnnnnnnnnnnnnnnnnnnggagggggagtttttgtagccaaggttnnnnnnnnnnnnnnnaatctaagctaactgtttcttttgcctcgggggacggggggattctcctgcctaagctt

SEQ ID NO: 424428 - DNA, 326 bp, Homo Sapiens
gcttgactcttgaggatccactcacagcgcgacttggaagaaaacagggctcaaacactaaacaacataacattcgcaatgtctgccatcctacggagaataacttgatatgagaagcagcaacaccacgtgaatgtgtcccgtcatcctacgaagaagccgtcaacagaaacagacccggaagaggcaaaaatgacggagtgagctgaaagcaactgggaacagtcattgcaactgtgaccagacagcgaaaggaacgcacagacggaaggaaaagcgaggacagggaaagcacacgtgaggcttctggaaggagtggacaaaca

SEQ ID NO: 424429 - DNA, 292 bp, Homo Sapiens
agtgaatcacgtagtcatgggcatagctagttcctgatttaaaaaaactggccgcgtaccttgaaggggctaattgcggagagaagaggttaaacaagcccaggtgagagcgaatttatgtgcagactagagccctgggtgcaacagcggctcagggaagaggatacaggccccaaaacgtggtgatggctcagctgattcctcaccagggagcctcgcctggggctggaagattaggctaactgcaaaatccaggcctcctaggtttaagccaaggtagtgaatgatggga

SEQ ID NO: 424430 - DNA, 167 bp, Homo Sapiens
tcacacgcagctggccccgatgttgtcttctataagtaactttcatcctagttggagataatcaccacatacttgcaagaaagactttatccttatcctcttgttctgtcttctgcttgaggctttggataaaggcaaagcccttttaagcccaagcaggacaaagt

SEQ ID NO: 424431 - DNA, 356 bp, Homo Sapiens
tgcggcccgttggcgggagtctgacctgggctgcctggcacacacccctgcggataagtatgggccctggcgagaatccattcacctgggggagcaggtcgttttacatctgctgacatgtgtgctccaactccagcgagtatctgggaataggtgagaggcatttggaggaaaaaagcatcctgggctgctccctaagggctggtgtctgcttcccactgtcactcgcttgagtgacactatttacagaaaatgtcaatactacaactgataactcatccaaggacccctaaagagggcaggatgaggctacaacgagataccctgacagctaaagatgtagactgctactattc

SEQ ID NO: 424432 - DNA, 156 bp, Homo Sapiens
atttaaaacaacgaccaaagcagccaaagggggtccataagtgttaccaagggccaaacccccactgctgaatccacgatgatgctcaaatgggcctccagcggccagacttccggaagcaaggtcccgttgttgatttccttatgacgacaccag

SEQ ID NO: 424433 - DNA, 278 bp, Homo Sapiens
cgccagagaatccgtaattttggtccttgctgccccctgtacgtgaaaccgaaggacaatttataacgacagcggggaattttcagaacagtgttgcaaaaccccctcctaagacctggcaaacatgggcataagtgggtttagctccactctgaaggccattcacgatgaccaggtctttttgccctttttggggagggctcgaacagctcaagcccaaaaagatgcccgttttggagaagcagagcccaaaagagacagtggttccaagttgcggg

SEQ ID NO: 424434 - DNA, 133 bp, Homo Sapiens
cttgactctatgaggatcccctacagattcttcagctgcagtaaggtggagctacaattaaatgtgggttactgaggacttggtaggcagttgattgcatatagtaaacatttattgtatgttaggttcattc

SEQ ID NO: 424435 - DNA, 146 bp, Homo Sapiens
gtgagacataaactactgctggaatgagtcctgctctgaggtcaagcggcatgaccccctaccagccttgaggcttaacggctgctggactactcctgcctggtgccctgccatccctgatctgccgctacatcttaccttgagag

SEQ ID NO: 424436 - DNA, 164 bp, Homo Sapiens
agaagatcccctcttcacttcattgggtttgggcacttcatgccatgccaccttcctcctgttgcacggacaaagtcctgcttgggttctaaagcccgcactaggtttatcctctgtgtggatgcccttctcaccttactttgacactctacccaagttgcgtg

SEQ ID NO: 424437 - DNA, 309 bp, Homo Sapiens
taacacgcagcttggctttaagaacaagtcgagaagtagataatcttctctacccaaattttttaccttttgagaaaaaatatggatttaaattatgagcaatattaaactctcattacatcatcagaaatctgggagctaaagtttatttcagaagtcttattagatggagttgcatttcttaaattaggagttatgttttatttaaatttcctgcctacccttggagttgtaaacatcaccttacttcataaaaccttccctgaagtgcctcgtaggttcccatctgtctgagcccatgtggagata

SEQ ID NO: 424438 - DNA, 324 bp, Homo Sapiens
cacacggacttggggctttaggcgtgaggactgctagatcccgctctatgaacgaaaggaggctggcaccagggggtgagtaagaactgttttgaacagaacgggagctgactcacatctggaggagggttctcaggtggggtccctcggtattgctgtaactgggtcaatctgattgtctctcttcaacctttttcaaccatgggaagcacgaatgccctaagccattgactgtaattaatgaatttctctcctatgcatctggattgtacagtctagatgtacaagttgtactatcccttgggagaactaagaaaatagttg

SEQ ID NO: 424439 - DNA, 240 bp, Homo Sapiens
cccatggccaaagctggttcctgagaaaaacgacggcgccctgagacgttggaagggtcagagtcacacagcgcctgtgggactgggcatcactcccatgggagatagggtcaggcgacctacatacagtgcccagcaatgcccaacctgtagcaatgctctagtcccattcatagcttaggccccacatctgagtaccaactgtacattattttcttactatttttcctttgttttttt

SEQ ID NO: 424440 - DNA, 263 bp, Homo Sapiens
aagccccaagatgcttgtcggaggacggttatggaacgcccttaccttcttggttgtgggacaccggtggaatgaccagttattacttgtttttctgtcgccgtttctttcacaggtatacctcagaaacacggcaggctcaattccagagcactcccataaagcgaatctccatgacttagttaggtttcccagtgcaataaattcatggttacactcatacccatcagtctcattcaaggaggggatgcagccatgggaga

SEQ ID NO: 424441 - DNA, 346 bp, Homo Sapiens
tgttacatcatttccccaaccagcaactctccactcgatggcatcaattacaagaggaaaagatggttactcactatctgaacttaacacatctgtttaaaagtttttattacaagagctatccaaaaactgttagggcacagaaggaacactagaacatccctgaggaccgggaccgaatctaaactaccaaggaagccctggggcccttcagcgcaatcccagcatctaaccagctccataatacagttgtacaatggttccacttcagtgtaggaagtggctttttattttcatctgtcattaatattttacaatcaaggcagggatgcgcggggatcctcta

SEQ ID NO: 424442 - DNA, 377 bp, Homo Sapiens
tcatcactccttattgacgattttcacatcgactatatcaggatatgggctgcaattttcctttttagtgtgtctctgccaggtttggtagcaggatgatgttggcctcataatgcgagttagagaggagtcccatctttttcgactgtttggaattgtttcagaaggaatgctaccagctcctcttgtaccactggtagaattcagctgtgaatctgtctggtcctgggctttatttgcattgggaagctattcaattactccttcaatctcagcaattgttatcagcctcattcagggatttgactttttcctggtttcagtctaaggagggatgcgcaggggcatcctctcagcacctcgcactgcaggcatgc

SEQ ID NO: 424443 - DNA, 583 bp, Homo Sapiens
cgacgccaggatctgacctgcaaatgctcacgagattcctaaacacagcactgattggaacatgagctcttcacggtgcggcggatccttgggggctcctgctctttagtaaaaacacagctcgcctctcatttatccaccgtggagctcctcacccgcaagccctggtggagctgctttgaggatggaccagagcctcattctgtgatgctatcatttctgggtccacagattcactgcactggccatacacatgctcggctgccgggggaccaggaatgcagggtgcgggctcctgacctgtgtttctaaagtctgctcattcacccctcgcccagtgcttctcatgctttcaaggaacacacaccctttcaagggtcttgtgtgtgccaggcaccctgaacaggcccagccccgcacttaatgagctactcacgaatcagaggccaggatggtgaagtgaccggcagtcacactgcttgcacgggggtgacatttgggggcaggcggctgtagggtccatgacgaaaactccactgtcggttgtggggtcggaggaagccgagggctaaaggatgagtat

SEQ ID NO: 424444 - DNA, 560 bp, Homo Sapiens
tcccagcctcctgaccatgacacacacacctttcagctggtttttgttggcgggggtgaatgactctgggaaagtatttcattggaaagtgattattctcctccagaaatctgttcacaagtgtctacttgtgaatatcatgtgtatctatctgtcttgtttagtgctttgcaaagaattatccagaagggatgcgtacgggatagtattaatataagtgaagaaggacttgaccaaattttaaaaaatatcttgttagaacaataaatatgtagcatattttctaggtaactgatacatttattcttctatcccaatgaagtttggttaattcttttctctggtcattgataatgaagtggatcagaaatataggctgggaagcacattcaacaggtaatgaggactgccataaagtttaattacttattgttaggctactcagtgattgggaatgaggcacttaaataataccctcttgtgtaagatctcaccagagaaatgagcgcataacccaataacatagaaaaggttatatttagtaaatgaaaagaatagtg

SEQ ID NO: 424445 - DNA, 427 bp, Homo Sapiens
gcattcgtttcgtcatctggaagcagagatggaagaagctggggggaaatgagagacatctagggtgctttctgtggagggaagctttgtagcatgttatcagacagcagtgcatattagaagaaaatatctgttaggaatgcatgtcaccagatgtattttgctttcaagaatggtagacacatcaaacaagaatcagataaaagccggggaaaaagatgttcagaagaatactggagttattctttatgcttcactgccctttacctctcttggtaccttccagagaaacaagtatagatgtattattagcttgccgttaccagcatcactatgacaacatgattttgtctttatatcagtaagcagcttctactatgttatcctattatctgctagctacagtatacaaaggagggatgagcat

SEQ ID NO: 424446 - DNA, 242 bp, Homo Sapiens
gatagccaggcaaactactaagcagctataactaattagacatcaataaatctacacaatgagaagtgctaccattgataagaagctcataatcccaaataaagctcatatctttgtaatagcaccatggtctaagcattcaggctgccgcaaggggcaagcccagtaaccagagtcacagcacttcggaatctgtggtatcagaccaaacagagtctcttcctagccctccaaatctaggt

SEQ ID NO: 424447 - DNA, 563 bp, Homo Sapiens
gtctcaaacttttgtgccatctgtgtgcattcacgcacatgagcatgtgtgtggaggagaagaggaaaagaacagagatggaaaagatttgaagtgggatgcttgggagaggagtaaatagatgataattatgaagaagaaattggcaggatttcttaactgactagattatgggaacaaggagtagagaaacaggtcaaagttggctgaagtccatagaatgtatattttaatttaagtgctaaatttcctccatacatttttcatgaactttgaaaaatttgttggctttatacgaacctgtgaacttcagtgagaaaaacagcatctttatatttttgagcatagtctcaatgtcattaattcttctgcttaaaaatcctcaaatgacttgccaaattaggataaaatctaaattctgttaccaaggccccaaatttctacgtatctgactgcaactgcctacttaaactgatcttaccattattcccattcatataccacccacataggctttatatctgctcttacttaagagttttatacttcctggtccctcatcc

SEQ ID NO: 424448 - DNA, 122 bp, Homo Sapiens
aagctccaacaagaaatgaaggccaatggcacatctaaatcacacaaatagtaagtagagagctgtgatacaaaccctaacctctgatcccaatgcctgaggcttccactagacccccgagg

SEQ ID NO: 424449 - DNA, 297 bp, Homo Sapiens
  misc_feature (88)..(236): n is a, c, g, or t
tctctcacactggattactacaacagccccagcaggtatccaactcccatacttgcctggatttagaccacatcatccaagaagaagnnnnnnnnnnnnnnnnnnnnnnnnnnnnnnnnnnnnnnnnnnnnnnnnnnnnnnnnnnnnnnnnnnnnnnnnnnnnnnnnnnnnnnnnnnnnnnnnnnnnnnnnnnnnnnnnnnnnnnnnnnnnnnnnnnnnnnnnnnnnnnnnnnnnnggtttagaatactgtccatacggcagctgagggatgctttttaaagccagtgtggagagag

SEQ ID NO: 424450 - DNA, 275 bp, Homo Sapiens
  misc_feature (30)..(30): n is a, c, g, or t
tctctccacactggttagcggggggacagngaagagaagactttttactctatacctttaatacattttgaattttgtactatatggatgtattacctactccaataatagcgactaagaaagtgaaaagcacagcataccaagaattgtgataaatgctaagaaggagaaatatagaacagttagaacaaacaatggggagccaatctagacttgtttggacagggaaatttttcctgggtaagagatgtttaaaatgagacctaaagggtaag

SEQ ID NO: 424451 - DNA, 315 bp, Homo Sapiens
tctctccacactggatggatggtggtgccctaactgtgggggaagcatggaggaagcgcacaggtcagaggaggagccccggggagtgagggagggtggggggctgcccagagaggacacactcacagcagatgttggaatgtaaagcgcaggtgagcggcctgagtgaagctggacattactgacggcggagggaccaagcctgaagcaatgggtgtagacagatgagaggtccggatgctgtggacagacagcagagccttggatgccacctgggcaatgacaacgacgaggtcagacccagtgtggagagag

SEQ ID NO: 424452 - DNA, 507 bp, Homo Sapiens
atctgaggatcccctctctccacactggtacaaatcatggcatacagacagaagtctaaaaatggtaccacgagaatatttttttaaaaaactaaatgtgtgatacaaatatccagacgaattaaagagtcacgagagaaacagagatagcatataagatgtgacagtgtaaaatgggtagcgaatcaaagtgagacttaaatagaaaatatatataatcacctcatttctaccacataatttcagagtgtgtaatggggagcatttgagaagagtaggagaaaatagagatgagaatttatctcacctttaatactgtgaatactatatgggggggtccccgggtcagagcatataaatatcacacttaagaactgagcatggggcctttgagtaagtgtatatacaggatctgagtatttacacacatatcacactatagcaacctctcgtgaaaaatcatgaggatagaatgcgccagtgtgtatactatataaaaagtgaata

SEQ ID NO: 424453 - DNA, 481 bp, Homo Sapiens
agttggctctcgcattctggtgtttagtttagtgccggcgtttggcatccgtagttcacaggtacactaattgggcatctcagaagatccccacctaggcctcgtgtaggttagaatctgccttgattatagtggtccacttgattaaatatttgcatgacaattcaccataagtgtttttgcatatacctggccagagtttctaagggtggaactttgtgttccacagctgtgggggtttcagccaacttaaagggctccttccacataatttagagttttccttcagatttgaccaagtcggagggttagttggatccaaagtgtgctgcttggggacctagcttttcagggccgttactcgctgaactggtatcgtggctacctggcacagtgtgtcaggggctcaaggcatgggagatcagctccttatttgcacctgctagctgagattacaccctaggtaccagtgtggagagag

SEQ ID NO: 424454 - DNA, 398 bp, Homo Sapiens
cccatgaaaaaattcagacacagtgaatacccatatactcaccacctaggttctatttgcatttaatactctgattatgtacctagggagaatgtaacagtggcactgaattacaactgagcagaaaagaggagaaaaaatttctattttgatacaagaatatgattcaatttgattgtgaatatgactactcaagtatctgacctaaaaatattttaatacctgattattatacatgtgtcaacagtgggatcttgactcatgaataaataatcccaagtcactcattcaaaaaatacttcgagcatctctggtgccaggtactagggatgctaggatgtatcagacacagccccttctttctaggaaccagggtggagagaggggtaccgagctcg

SEQ ID NO: 424455 - DNA, 290 bp, Homo Sapiens
acactggaggtttacactgaaacatgagagttaagtctccaagtaatgctgattatttattcttaatgtatagcaaggcttctgtatgagcagagtcctggcatttagaaaaaggtcttgtgcggaaatatcaagatttttgtaatagggagagcctctgtggtttgaagtttgtagagggagtgcagttctatttttgaactgtctccaggacttccaataggtagagtcactgagctccatgtgatcaagtgagatgcatgcgagtgacttgccacgtgtggagagag

SEQ ID NO: 424456 - DNA, 174 bp, Homo Sapiens
ggcggccagaggatccccctctctccacactggtcgggtgtgagggttatatgcaaagtcgtggtatgaacaaggttcatttcctgaagaatcaattttcctcaatgacaaataaattaaatctcttttatactgcaatatctattatgcccataatataaaatatttgcatgt

SEQ ID NO: 424457 - DNA, 164 bp, Homo Sapiens
cgtctccacagtgggacggctgaatggaacttctgcttttcctcttggtgtaaccacttgacttgacacaatgccccaatacgctttccacccttcgtcttggtacggtccttggagtacggagcctgcagagggtcccacggtggaagccagtgtggagagag

SEQ ID NO: 424458 - DNA, 126 bp, Homo Sapiens
agccagacatattccaagtcgtctcagtcctacaaacaacctatacatgtaagaacttatcttatcttgtaatagaagattagaggataatttccagtaatactttaaaatccagtgtggagagag

SEQ ID NO: 424459 - DNA, 180 bp, Homo Sapiens
cctggaggatccccaaatctcttcctcctcattttgagcttcgggagagatttgcccagccaacttctaatcagagactctttcaaatcctgtccagtccctctccctccactccttcctctagttattctccatcaggccttcagaatgtgctttttggtgtgtccagtgtggagagag

SEQ ID NO: 424460 - DNA, 120 bp, Homo Sapiens
ttagaggatccctctctcacactggaacacaaaggcgacttccagggatctgcagcttggcaaggtggtattggctgctgtgattcacagattagcatggtcactgccagtgtgagagag

SEQ ID NO: 424461 - DNA, 134 bp, Homo Sapiens
gaagacgcatgatgtcgagaatacctattgtagatatagcaccctatcacatgagtggtcctgatcaacgaatttggtgtggacgtaggacctgtttgctttttataaagccactctctatctaaaatcccaac

SEQ ID NO: 424462 - DNA, 561 bp, Homo Sapiens
ctatccacactggttaagcactggtctgcttcccacttaaatcagtttagtctaaagctgcctccttacatatttaagtctggccaacaggtttctttgtacatagtaaactataacctaactggatgtgtaaataggctataacctactctcataccaatcactgagttttggccaatcacagggggccaactgttcaaaccgtgttcaaataagacaacaccaagctgtaaccagtccaaccgtttccgtacctcacttctgttttctgtgtgtcactttgctttttctgttcatgagtcttctttggccatgcggcagcactggtgagtctctgaacctattctggttcagggctgcccaattcacaaatcatgctttactcaattaaactctgttacatttagtttgcctaagatttttcttttaacactgccctggggcttctctgactttgagatgtggatgccttaggtacccctgcctggtacttccaactgtggaccctgaagggcttcctagaagtccatagcacacacaaggcagcccgtgaccagtgtg

SEQ ID NO: 424463 - DNA, 262 bp, Homo Sapiens
ggtgatctgaggatccctctctccacactgggattaagtgggggtgagatagaaaaaaatgagctagaaggtgagagatggtgtagtaagtgggatgaatgagtttaaaaagctatttttgcgattaaatttaagcaatttgctaagtgggaaggtggtttgcagggagaaggaagagttgatgttaataccaaggtttctagtttgtaagtgaagaatagcaatgtctcaaaggatatcaagattaccagtgtggagagag

SEQ ID NO: 424464 - DNA, 180 bp, Homo Sapiens
tctctccacactggggggctgtggagatctggatataggaaagcacaggtagatatggacacacaagagagcatacttaacccattctggaaacggcagagcctggctacatacagcaggtgaggtctttgctgaggctagaatcagctaggtgttgatcaagtgaaaaagcgccagtgt

SEQ ID NO: 424465 - DNA, 123 bp, Homo Sapiens
tctctccacactgggacaaacatacatctcttgaatatgttttacgtgaaaaagacacaaagaaatggcaaaacccaaatacttttatgctaggcagaaccaagagcgccagtgtggagagaa

SEQ ID NO: 424466 - DNA, 603 bp, Homo Sapiens
  misc_feature (337)..(451): n is a, c, g, or t
gtcatacggtcctttgtcagtcatgtcagaggtgtgctgtgtgaggtaacctgagaaggacagacttttcacaattaaaagggttgactgggtgccctagttcatcctcaatcagtctattgaagttgtatgtagtataggacatcattgatgtggtcgattttgtaaaactaaatcccttcaatagaatctacataataccttatactgagatggggagtgattgtgaaaactttttattttctagcaaagtattcaacatactcgaggtcaaaagcacagatcctggacacacactgcctaggttctgaccacagttctcccatcaccagccatnnnnnnnnnnnnnnnnnnnnnnnnnnnnnnnnnnnnnnnnnnnnnnnnnnnnnnnnnnnnnnnnnnnnnnnnnnnnnnnnnnnnnnnnnnnnnnnnnnnnnnnnnnnnnnnnnnngtatatcaaaatctcttagtataatatctactaccaaaatcagctttacacaagctctggttgttattacttaacagagtatatgactatcaagaagaattatgcattttcgctgaccaaaaatacgagtgattcagatttctttacctttc

SEQ ID NO: 424467 - DNA, 139 bp, Homo Sapiens
tctctcctctctccacactgtgctgacacactcacgtcatacctctcatgtgggcaaatgtgaaccacatgcatagtttgagattatcaattaccttttccctagctgtcagtcttatctccccacccagtgtggagag

SEQ ID NO: 424468 - DNA, 252 bp, Homo Sapiens
tctctccacacgggctctctccacactgggcacccagaatagtctaatcatgcagctatctagaacttccacatgcatcatatttattgggtaatattgctcctttcattaccaactactaacttctcaagccttatggagaatactttcctagtcctggtaacggtgtcggtcacagggtaggaattaaatatgtatttgatgaataagtgaagaaggaaaggaataatgtcagacatccagtgtggagag

SEQ ID NO: 424469 - DNA, 513 bp, Homo Sapiens
ggattgaacagactaagggacaaagtacacaatatgctaaatatgataggtggaggggaatgaggagagggttgagagaccttcaaaagggtgcttctactggatgcatgagaaatagacacacctctagccaggaattgcagccctacaggtacccaggctgcacagtgtgtccaggactaaatttcagcctcctttaatcccttagccttcagctttgcaccatgcaagctgtacagtaataccaatacacgtatgtgggtgcatgcaaaaattttcagttgcaagaaatgcaattttattcagattgcctaatgttttgcctatccctgaaaaaccaagttgaagatggcttgcagcaagaacacatgcacaatacagcatttctgacgccagaagacatggtctagcatttgtagtgaaatatatgaccacattctccctgtgggattcaaatctgtttaaaggtggtatctagattctagggtggaaaaagtgaaaattaccaaacgt

SEQ ID NO: 424470 - DNA, 195 bp, Homo Sapiens
ccaacggatacctcattactctcgataaatatagcttccacacaacgtcattaattaaatacatctgagttactaacctacaattcacgtgactgaaaattaatatagcacatgtctatttctacacttgattggttcttatattgtcagctgtgaccttgaaagcatcaattttcaatactgatttataatgtg

SEQ ID NO: 424471 - DNA, 346 bp, Homo Sapiens
ctaatattcttaccctggacttacttcttttaaattatacaaaatcacttcacatgtaatgtaagaaggtaacaagcatacacttctatttccctttcaggtatttgtgccattgtgttatttatcttctaagtactaagcctcacaacacactgtcattattttatgctctgcagtctattatctgttttaaaaattaaaaattatgagaaaactttctttagtatctacttatttactccttccagcactcttcttatttttagtggatctgaacctttgtctatcactttcattctgaaaaacctcctttgacattactgggagtgcatgtctaccgccagtg

SEQ ID NO: 424472 - DNA, 393 bp, Homo Sapiens
gggacctctccgggggatatagcatagaggggctagttatcggtgattattttcctcttttattctcttccttacatttctgtagttttttcaggcagaatggggagataaagggagagaggcaagaaggcgttattatttacctaaaaacactttccctggcctctatctccttaaggagaatgaagagttctgttggtttctgaatccacagtttctgctcaaaaagatataagtcttctcattgaaggaaggaaaaaggtttgggtaacagctctcaaaatatgcattaagtgtaaacaacttgggattttaagatagaacccatttgcttatcaaataagctgccaaattaaaaggtgcttacatccccagggctgcttgcctcaaaaa

SEQ ID NO: 424473 - DNA, 498 bp, Homo Sapiens
tctctccacactggctctggtaatggaagtgtcatatcttctacggtgttagaaagggttgtgaatagtgtttggtatgaggtgattgaggtggttatgcctgctattccagtgccaagtgcagcagtgatgcctaatcctgttagcagggtgatgagatgtagagcccatttatttcttatgggtgaagaggagatagaggcttctacagaaattagaatagtttggttagggggtaggatgttgatggttggagcctgaaagaccagggtgcaagttcctgaccagttggctggtaggcaaagatatcagtttgtatcacacaaaaagaagagactgggggtggacaggcagaagttgtaggtgaaggtaggtagccatgatagggtattttcgttttcccaaattgggtaactgccagccagagcggcacctgtaagggcctgatagggagtcttggctagggagttgatgaaggctgtttggttttggagagag

SEQ ID NO: 424474 - DNA, 102 bp, Homo Sapiens
gaggccagcccagctagcggcacagccattcagtgagtcaggagtctttgtgcacggaaggctgaggtgatgacagagctaacagcaaactcagacaatctg

SEQ ID NO: 424475 - DNA, 442 bp, Homo Sapiens
  misc_feature (381)..(397): n is a, c, g, or t
ggtgacacttgctcttttgtgagtacgtatatggtgataggaataaaggagaaagtctggtaagcaccaagcacaaagcaggcctgaggctccagcaacagtcattcagaaacaactgcccactttatacgtaaaagtatgaaaggaatgccaatgtgagcccatgtcattaggagaggtaaggataatctacaccttgcttaaccatcacttaacctttttattgcacataatgaaatttaagccctaacctaggtctgtacttgtgtaataattatgcactctaaattagcatctgcatttagatagattgcaagcttagaaatcagtcctgcatctgacctcttttgtcagtgcctactatatcaaattttaacagannnnnnnnnnnnnnnnnggaaatgggatgtttggctctggtttgcccattggtggaagagcg

SEQ ID NO: 424476 - DNA, 124 bp, Homo Sapiens
ataagccggacctctctcagactggagtagttgattcctgtcaatgttgtctttgtgtgtgacagattaggattaaattatggtttgacttttcctaacagcgtgatcatgggcaagtggccta

SEQ ID NO: 424477 - DNA, 215 bp, Homo Sapiens
cacagatgtcaactactgatcacaaggccatagcaacatcatctcgcaaatgtgagtagacacagattctccatgtacgaaaacatgtctccactatagagactgggaaattttcctcttctgggtcacaaattatcaaggggaaagagtaaggatcacttttcaaactgcactgacaatcactcaccagtgtggagagaggggtaccgagctcg

SEQ ID NO: 424478 - DNA, 262 bp, Homo Sapiens
tggcattatggttatcgaattccttttaactcccgctcaaaaggtcttaggttgataacagacacctctctaatagggtttacgtgaaacaggatgataactagaggcacctagaagttcatcgtagtgtaactcactgagtgaaccatcagatggtctcttcttgctttgtaaacatggagtctatttcaagggtgtttctgagctcctctgcagcgtccaccaaactcgaagagctgtttcttgcccagtgtggagagag

SEQ ID NO: 424479 - DNA, 267 bp, Homo Sapiens
gctcagaggatcccctctctccacactctctctccacactggcaacgtactttacccttacaatattgattttcacaactgttaattatcaaacttttttataatttaaaggtaaaaaaattatctcttttctatctgcatttcctggatttataaagctgaatgctgtttttaaaaatcattccatttctcattttataaactgcctgttaacatacaagatgttcttcaatcgtcaaaaaaacctaacctccagtgtggagagag

SEQ ID NO: 424480 - DNA, 548 bp, Homo Sapiens
gaggtgcttgggacgtgagaggaaggagcatgcctggggaggatgggaaacagccttatctaaatatgccaaatccaagcagtcaagacacctaggttctaaaatctttataagaacaatctcatttcctttgatgcagaagacacagcccagctgtgatctagtatctgggcattctgatcaaggagcaaaaggtcaggagtcattgcctgatcaccaaacagaacagaagggtggatctcaggacctggagagtggggatagatggtcagaattagagagaatggaccacagaaaatctatttgaaaagcaagccagccatctgtaagcctcttgagagagagtcaaaccacacagttttgaaaacaaattctcagctgcttgagcaggcaggtggatcagcctgggctaactctgggagatctaatcagttgcaggtgcattttgggtgttttaagagcatgttagtcataggggtaaactgtcactttgcacagttgaggttgaggcatagaactagtactttctctttactggagttgctgcc

SEQ ID NO: 424481 - DNA, 399 bp, Homo Sapiens
tgtcaatcccgtcatggccttacctcaaagccacagctgactgtgtttgttcagactccacagtgtggccttgtatgcaggttcttcccagcaccctcttctcacacagcttgtcctggggctctaggcattctacatcaacctccaaagaggccacgctctttcatacctccacacattttgcctatgcacatgctcgtttcttccacctaccgacttgcttctggaaactcttctttgcatctctcctcttgcaaagcattttggcacaagcctcaagcctagcgagtgagtgtcgtgtactccaaggtgatgctgaccatgctggggacagttcttttctgtgccagtctataaaagtacgtcaaagagatggactttgcccagtgtgggagcgcg

SEQ ID NO: 424482 - DNA, 572 bp, Homo Sapiens
aatatgaataacatttattactattattcacgattaccaggtcatgtgtctccatattccaggcaactgaattaaaaggttactaaaattttatccatttgtccacatgatatgaaacataattaatagtgcatttttatttaaatgcaggttcccaggacttgcaggactctaggtgcctgagtgcagagtccagtgtcctttaacctgcagtggggactttctggacctacatccagatgaaggtttgtcaactacaccctaatctatggccaacacttccctaccagagcaaagtttaatactgacatgctcaggccacaaaaggaatctgtactttattcgcatgcgctggtggagggaggcaggggtggatctttttgtaagaaatgttttcttacatccccaaagttctgacccaatcatgacttcccagctgttatctgaaaatttttcggtgcaacaaagaggacttgtatgtcccctaccctacttttcctgtgctgatatagcgtaatggaagacacaatataaaatgtatcagggcactgagattctggcactattctaca

SEQ ID NO: 424483 - DNA, 233 bp, Homo Sapiens
cgctcgccagacgggtacacagatgacggtatatcgacagacgttaaaagaatgttaatagagttgactttatgtgtctcagtctcaatgtatattaaggctgagggcaaggccaaatttaaaaactaagtcagtttagagacagaatcaaataagtgataatactggtaatgtagagatatgggaaaaatgtaaacatcatggtacttgaatgattcaggaaatagtggtgg

SEQ ID NO: 424484 - DNA, 487 bp, Homo Sapiens
cactgtctgcacagcgaacagaaaaaactcagcaggagccaagcgtattagagacagggaaaggttacttctgagagcctggaggcaagcagggcggggtgcacaggtgagtcttcccagctcacctccacccgatccttaccaatctactcaaggaacacaacaagttcaacgagcaccttgcatttggaaaacttcacattcaggagaaatgtacaaagtggatgtttaagcctctgtggtgccaagtgctgggctgcatataatagagaagtctcccacgcctcctgcaatctgtttcagcaagattgctttcacgtggaaaggcaactgctgccagcagagatgccaaggtaggatatataagatggggaccctggaggttagaggcgacccactgtccaggtagttggggacttcaagggacatgacatttttggtgctaagacccaggccaatcgcaataagaggccagtgtggagagagg

SEQ ID NO: 424485 - DNA, 257 bp, Homo Sapiens
tctctccacataggtctctctccacagcgggagtctcacctaactcctccgccgtcgggctcccgtttccccatctgtggcccagatttgaggatgtgctctagttgggtggtcgtgtgctgcaagttctgtacaagggcttgtgcccattcatttattcattaccctgatggttggccttagggacacagctgagcagctgtctctactcagtgggaaacacagacagcgatagaagagaaatcagagccagtgtg

SEQ ID NO: 424486 - DNA, 104 bp, Homo Sapiens
tccacactggaaaacaatcttttggccccattaaacttaaaagcacatgccgtctgacccagaagttctcagaagtactcattcactacccagtgtggagagag

SEQ ID NO: 424487 - DNA, 367 bp, Homo Sapiens
gtctgtcttctgacattttaaatccgccaataaagtgaaaaagcagttggcacgtgtctcggttaggctgaatgctttggcaactgtggccagccaccagcttccctgtggttaacagtacatctgagcattgaaggataaggagcttttgcttttataaccaggcacttactgttccctaagacttaaagagagctagtcacatttcacagtttaagggaggctttgaaaaatagtttccccatcttttcagcttatcccgacccaggagatgctattctttgctcatgaattatctggagatgggtcaagtgagtcatcctggagctggatggagacaaacaggaaatgtttgggtggggcctgg

SEQ ID NO: 424488 - DNA, 263 bp, Homo Sapiens
atgtatgctttatataggtaggtgaaattttcggtttcaacatgtcttaaaacatattaaagcccatgcacatagacctgacatgttataattatctttaggcatatagaaaatgatttgagtgattcagctctgatttgcgttaacaataatgaacaaaactgtggcccagtgtggagagagagggttgagcatggcagagaccagaaatagcagggatcaatttttgcggagcctttaagacatattaccagtgtggagag

SEQ ID NO: 424489 - DNA, 501 bp, Homo Sapiens
tctctccacactggcagagcagctgatactgtgttaagagatccatgtgactgccagttggagactcatgtgacacatacttaagatgccatagttagagaaacagtggtttcgaaaaagagctccacatcaagccaactggcagattatctgtgtttgatcaaaattgagctgcttctacaaggggaactatttagcatgtgacaggatgtttatatatgacgattaatgtgagtgtactgaaaaacatggcagtgattagcaagagggtaattagttgtttataaatttgtatttatctctcatgagccccaggggacacccctttcctggactgagatttagagcagctcctgctggcataccatggcttcggtggatgctgagttattttctcaacatactcttctcttcccttttattaatatgtctctacatactatttaccagctttttgcccatgtcatacttcctactctgggtacaaattattttggcatc

SEQ ID NO: 424490 - DNA, 207 bp, Homo Sapiens
ggggaaagcgtggcaaatcctcctgggggagactctgccagaacgtttcatgtcatccagccatttctgagaggagaaccggccttccaagcagaagtccctgggtgaacactatcgcggagtcccgtaagttattttaatgtagacatcactttaaactaacctttcaccatctgttctgtcctctaataaccagtgtggagagag

SEQ ID NO: 424491 - DNA, 104 bp, Homo Sapiens
agggcaaacctctgccatggaacaggaggacccagactaagtaggcccttgcggagaggggtgatggacaagcctgatggcgtgaaggcccagtgtggagagag

SEQ ID NO: 424492 - DNA, 394 bp, Homo Sapiens
cgaaggctcatgaagcgatgtgattgagacaagtagggtctatgcaagcagagtggagaggacaagaaagaaaggtctttgaaagttgaaggaacaatgtgacccccaggcacagatgtaaagattgtaggctgtgtttgggagaaagttggtgtcagggggtcaatggctggttgactagattctagcacaccttcttgaaatataggagaggtcaaggagtatgaaggcagtgtgataggttgaggcacagagagtctggaatgccgtgcctagaagtcagagagctaatgagagtaagacagggagcttaggatctatgtttcctgaacttggctttgtatcctgcaaccaagagaagccagtagacggtcttgggccagtgtggagagag

SEQ ID NO: 424493 - DNA, 315 bp, Homo Sapiens
gctctagaggatcctctctctcaacggtaagtactgatatttatgcttagttcagggagtccggcagaaataaagctggaaggacaagtggggggcagattgtgaaggatccttcaagacctgcttcctctagagaatgggagactacccaagatactaaacagggaagtgatcaggttttgtgtcttagaaaagtgttgcagtgttgatgcaaatgtgactagaagggtgacttggaacctggattgaaggggtgggagatgggagaaaggaatgcagtctggcagcagctacagcagtccagtgtggagagag

SEQ ID NO: 424494 - DNA, 148 bp, Homo Sapiens
ggaatggacacttgagagggaagatcagcaattatccggtcttttctctacaagagtgcaattcaggaaacctgttgattagggaaagttctttacataagaattccggcaaataagtgagtaaagaatgacagtttaagaattgtct

SEQ ID NO: 424495 - DNA, 377 bp, Homo Sapiens
ccttctgtattgctgcttggctgtgctctgttgttggaactgaaatatgaaatttttactttgaagtatgttaatgtcaaagttgatcgtattaagtttggaaatcctttgaggtttatctaataagtgtgttggagcttctgtctcttctggtaatactgtaccctgttgaaccaagaacagttttattgtttgtgggacttcgttggttttctaataccataacctgtgtccctgtgcagtcagggggtcacttctttaagatcatgtataatacggcccgtcatatacacgtagatagagccatgtgattccagaaattagaagactggatctgtggaatccatacatgttaaaattttgccaaactgaaatga

SEQ ID NO: 424496 - DNA, 467 bp, Homo Sapiens
ctctagagcatacaaggatcatctgagatttactcatgccagaatcagatcagtcctgagacctcggcttttgagaattagggtgcatccctgtggtaatgactcagtactatgattcataaaactgtagaaaatgaagaagttctgagatgtagatggctcaaaagctctctgcagaaccacaagaagaatttaaatgaagttcagtaagtaagcaatgctttaaggaaaagtattaatgtgtaagaaaattagtggaattatgaatgtgtaaagactgacttcaatttttgaaggtctctcaccagacatctagaagaacagttgatacggtaactgaaatgttgaagtatttgtttaaactgatatatgtcacttggctgtaatagccaagctttccaattacaattttgcaacatttcatgaaaagtcctattttaaatactaaatgtttgcattaaaaatca

SEQ ID NO: 424497 - DNA, 376 bp, Homo Sapiens
taaccaaaatgaagcctggaaaagatctctccactcgctgatcagcctaagactcttagcagggatggcatgctaacaagggcaaccctagcgctgcccgggatgttttcagcaccacggccagcggcaaagaggcacaagtttaatttcacttgcacccagggatgggaatccccggggagagaaaacaaaaccagcagcaactattaacactctctgagacatctgcaaagacctacatttcacatacagggtagaggcaaaaaagattaatcatgtcatcaggaaaatcaaatgaagagaaaattaaaaacagtatcaaataggtttgtgtgtcatttgtttttcatattatccaacaatgtccaacactttg

SEQ ID NO: 424498 - DNA, 195 bp, Homo Sapiens
ctcatttcagtttagaggtaaggacatccttgggcagtagctttcctagttttgatgttgaccactcccagccatcatagggaaggtacatagcaaatggatgtgaaagcaatcccaatgaccttggagaacccccaacttggaaagccctacctggtgaaacttgagtgctccaaggggaaagggatttctttc

SEQ ID NO: 424499 - DNA, 432 bp, Homo Sapiens
ctcatttcagtttgtttttgactgtatttttatattctgtagatgagtcctttgtcaaataggtggtttggaaatatcttctcccagtccgcagctcagatgctcagagctctgaagttgggtccacctgtcctcttatgggtgtggtttgggtggcgagtctacgaactctgcccagccccaggccacaaaggttttcacctaaaggccctgcattctgatgagctgttctgtagaacgagggcttagggctttgcctaccgctgcccaggtgctccagaccatctgatgaacgggttttctgcctctgtcaaagctccgctggtctctcttgtgtggcctgagtcctctcttctctccacagacgcgtctgtctgccatcgccgcaatgttgatttgtggcttcagagtaagcctcaaagccaggaacag

SEQ ID NO: 424500 - DNA, 339 bp, Homo Sapiens
aatcaacactatagaatcctctgtcccttaaagaattctttcactccagccaacagggcagaatgagagtaccatacaaaagtcatcccatccatctgacctctgactaaactggagagagaatcatcctcatttggcctgctgtgacttgcagttataaactttcccagaagaccatcattgaggacattctattttcttacttttgaaggaaagaggaaaattaggtttatctcctgaaataaaatgattttatgtgtaagatctggcagggtttttctacaatccataaataatttcctgtttataaagggtgatagttcttgaactgaaatgagc

SEQ ID NO: 424501 - DNA, 251 bp, Homo Sapiens
tacaacctcaaagagctcccagttccttggttcttatcttaactgtatgggtctcatgctttatcaaccagccaaaagtagcaggaactcccaacaaatgaagtgatgaagtgagatagtaccagggtaacaagttgtatatggccttcttagggatgaactattcaccagagggccagctctaagggaatgtcaaatagaggcactagaaaagaggcactctggcttccaggtaatgacagtataatgag

SEQ ID NO: 424502 - DNA, 379 bp, Homo Sapiens
aatcatgagattgtagcaattcagtcacatcttcagggtctacttctatttctccattacctccacatctgcagtgacttcctccattgaaggcttgagtccctgcaaaatcatccatgagggttggaatcaacgtcttccgaactcttcttaatgttgatattttgacctcctcccacgaatcacgaatgttcttaatgacatctagaacggtgaatcctttctaggaggttttcaatttactttgtccaaatccatcagaggaatcaccgtctatggcagctatggtcctacaaaatgtatgtccggaataataagacttgaaagttgaaattactccttggtccaggggctgcagaatggatgttttgtcagcagg

SEQ ID NO: 424503 - DNA, 380 bp, Homo Sapiens
attttcaagtaaatgtctgccaaatatccaagcatgaataaccatagtttatcagtaactcttacaattaaaaacggtgttccatgaacaatgtggatagttcagcttgaaactcagttgcatgagtgctttaactcaagataaccatcagtatgcaaagaaactgctttacgtgtacttcccacttcatcacagagaatagaaaaacaatgttgacttcatggacaagatataataaaactaaggtgttttacttcaagaaacttctaaggtgaaactgccatgcttttactgcgagtaggtgatgatacagaacacgatgactgcttacttgtattggtttggaggtagtgccttggttttactaaggtggcagcagt

SEQ ID NO: 424504 - DNA, 437 bp, Homo Sapiens
agaggctcctctgatgcccttagtatcttttatttttccagtgatacttatcactcaatactatgaacatttacatgtgtaagactgtacattctgagaagatgtggactttgtcttttctggctcacaattgcacactcattacttggcacaatgcttggcaaatctgttgaatgactgagtaaatagatgaatgatcggatgattgaatatacgaatatatttaaccccaggacaacttaagtatatcaacatggcatcacacaaatctgctcaaataaaagaagtaaaacaattttggttagggagcaaatggagttaatcattaattgtatacaggaaaaagtatgctttgaatacagagggtctcagattgttagggaacactagatgtgtgaatatattaccatgaaaggtccagagcacaaaaggaggga

SEQ ID NO: 424505 - DNA, 589 bp, Homo Sapiens
  misc_feature (525)..(525): n is a, c, g, or t
atagtgtaagagtggttttttaaaactttaatgggtattgagttttaacatatagttttactaaatttatctagattttttcctaaattttcttataaattgatacaattttcaaatattgaactgtcctaaactcctatcccaattaaaatttttatgtctgtgttcataagtaagactgaatgtaatatattttcccttgtatagtctttccattctagatttaaatgctaaacttgcctgataaacaggtagggtaactttccctctttttctgttctctgagtcaatttgcataagattgggattagctgttccgcaaaagcatatctaaaattataattacaaatatcaccattaaaactattccttcatacttgagaagcagaggaaatggaattggaatggctaatgaactgaaaagatgcttagtctcatttgtagggaagtgcagttgaaaacgtacgagctatcaattttcacccattagattgcaaagcttaggatgggatgttactcatacangttgaaatgtgcatactctgttatctagcagttgattactattcaaggtattagtctagagaaa

SEQ ID NO: 424506 - DNA, 226 bp, Homo Sapiens
agaggatcctcatctcatttcaggtcctaacatatttctctcagaaatattccatttcaccttggatgccatatagtcattcaacaaaagtacctatacctactgagcacttggctgtttgcctgctagacactgttaaagacattggcaataataccatgaagtacaaagatccctgatgtcacagaacttaagaagttggggaagaaaacagctaataaatgag

SEQ ID NO: 424507 - DNA, 405 bp, Homo Sapiens
  misc_feature (92)..(122): n is a, c, g, or t
tgcggccgaggagagagtggacagctgggtcacagaaccatgcagcctcacagctagaaagagcattcccagttgtagttcagcaccatcannnnnnnnnnnnnnnnnnnnnnnnnnnnnnnaattatgatgggcaagctttattttgtatgaacttgatttcacaaaattagaatggcaattccacttaaaattaactgtttaaaaagtgtaaatgtcacggtatagatctgttatccaaaactccaaaaggcagtgaaattggtaacagatattcctcctcatctttggacccatacaacagcagaattgatgaaactggttcccaggcaagtatgtgccacttgctcccgtgcctcagggaggagaggatgtggtagctgtcatgggaccctctagcccatc

SEQ ID NO: 424508 - DNA, 102 bp, Homo Sapiens
atatgaacactatcacggaagcagactgaaatttccatggggaaaagcaagatttagcttccttggtttggggaatattcctcttggttgccagaagagacc

SEQ ID NO: 424509 - DNA, 190 bp, Homo Sapiens
ggagtgagatttaattctttgccagtgacagatgaggtggcatttgtctggtaatcctgcgtgaaccagtcaaaacgtgaaccaaccacttcaccgtccacgcatttatctgggcctggcctaaagcccagcaactatatgagcactggaaaactgaccctccccaacaacctttaataagacatgcttt

SEQ ID NO: 424510 - DNA, 218 bp, Homo Sapiens
agtcctcacttgacatagtgtggactccggcatcacctgatatacatcatctggatgagctcaaatgtgtcagctgtgcctgtggtgacttcggtccagatgtggcctcaccaagccaaatagaactacaccattacctgcttgcattgtagacctggcccgtaggagagcccaaggcccccttaggttatctttactacttatgccactgacaacgg

SEQ ID NO: 424511 - DNA, 139 bp, Homo Sapiens
tattcttcgccagccaatgcaagttagtggattttctactctaaatattgcctgaagtagtagaaataaagtatccagaaatcagaactaacagcagccggatttacacacctcagttataacagcttatacacctcag

SEQ ID NO: 424512 - DNA, 185 bp, Homo Sapiens
tatgacacagaatcacaggccttaatctggggcgcttatcgcatttacatggggtgtatagtgatatagatagattttactttcttttccaccgtctttttctcatgtggctccccctccctgcccccgttcacgataaccggtgcctgctccacacacaaacaaatccaggcacccaaaagaag

SEQ ID NO: 424513 - DNA, 192 bp, Homo Sapiens
ttaacatacagtattgggtacagtaatgtgctgtgcaggagtctgtaaactaggagcagtggaatgatgtagccgaggcctgtggggggcgctgccatccagttgatgcgcacactccgtcatgctcccacagcagcagagtcaactgaggacctatttctcagaacgttttctctcggcaagcacacgcga

SEQ ID NO: 424514 - DNA, 594 bp, Homo Sapiens
  misc_feature (307)..(337): n is a, c, g, or t
agctgctggtgaaaaaagatatgtgggcagagggaaaacggtttagctcatgataattggcagaaagtgcaatgatagagcaatgattatctgcaaaggcagcataacgtaagattgggatgtgcataggcaggtgggaaggaaaataatttatacttcaaagagtttatacaattttattaagacacagtaaaaataaaagaacaaatcattgaaataaatgatccaggatagcagataggctgcaagcattacagtatgtaaacgtctgaatcaaaatataataaaacagcatgggaaaacaaannnnnnnnnnnnnnnnnnnnnnnnnnnnnnnaatacacagagacacatacataaatgcacattgtatatatataaacacattgtggtgataagataaaaatgtgaatgtataaatacataatatatcaatatattttatgatacatctgggaagaaagactaactatcaaaatatgtattagatatgaaaatacttgaaaaagttaaagtactgcaaatgtgattcttccccatttctcacatgatgacgtcacagaagaagagagtttatattctccgtgtcacttc

SEQ ID NO: 424515 - DNA, 146 bp, Homo Sapiens
  misc_feature (79)..(88): n is a, c, g, or t
cgcaagtgtttagtcacaattcacgcatggcattagttggttttctttagaatctagaagagtctccatcctgcctccnnnnnnnnnnggtttaaatgattttaatgacattaacactttcaggagttcaggacagttatggtatg

SEQ ID NO: 424516 - DNA, 187 bp, Homo Sapiens
tgccctatcgagacataacactaggatgactggactataaacgagcaaataacatcaacagacaactagtaagattatgaaaattattcagtgcactatcaaagtaatgagaattagaacatataccatttattgcctgctaaattgaaacaatttttgaaaataataaaagtactcgatgtctaat

SEQ ID NO: 424517 - DNA, 208 bp, Homo Sapiens
ttgctctatgagacatcattctcccaagacagatgcaatttactgacagggataattctgaccataagtaatgttgttaagtgatacatgtcttactaggttgccagaggaacagagctagaaatttaactgaggttaagctgtcaaggggaaggaataaagttttgtttacctttctcccacaataatcaatctaaaagaaatacag

SEQ ID NO: 424518 - DNA, 181 bp, Homo Sapiens
gcttctattaaatgattcatgcttgatacttttataagacaacacaagcaactaattttctacaaaggctttcggcttatatgcaggcttttattgactgtttttcgtgcaaactatgtttaaaagaaatcttcactaacatgatcactgactacatttagagaaaacaatgagttttcca

SEQ ID NO: 424519 - DNA, 222 bp, Homo Sapiens
caggctgactagaggacccctcccatatgagacatctagatgggaaatggaatgtcagtattagcagacaacatgaccgtccatgtggaaaatttgatggaatgtacagaaaactgactagaactaacaagtatgttgagtgaggttgcaggacacaaggtcaatacacaaataacagttgtatttctatataccagcaacaaactattggaaaattaaaag

SEQ ID NO: 424520 - DNA, 396 bp, Homo Sapiens
acgatgtcgatgtacttgttattgagttgccagtgaagaagagaagtatctctctcagattgtccctctctgtaggttatatcagcccctgaaaagacacatttgcagcttactgtatgtttctttgattaaacgtcagttagaattcttggatccagtttttaaatactcgtggtatatgtacggtgcttctggggcttatgatttctaatttagcagcaggagctacttctcttttccctctacctccaaaacaaaaagatgactcaagcattaggaatatgtatatgggcttattgtataattcaatgtgtatctggatttgcacaatttttaatcttgatttatgtagccctaatgtgatttctaatttttacctaaagttttagaggtact

SEQ ID NO: 424521 - DNA, 388 bp, Homo Sapiens
cagtatagacacttctataagactgaaaaaggggcgagagatacattgatctgtatagttctgtttacatcagctagtatgagttgggtttctgtcaccagcagctgggtgaacttgtccattcagctgtactaaacacatccctaatcaagaaaacctaatcataagatgatgaactggttgccttttcacgcatttatttctttgacatttattcattgaacatgtagttaactggtcataggacaataacctgcatgaaaaactgggcattgtccagggtgatctccgtgaggtggcctggagttctgaggccactgaagcttacctagttccacatgcagctgaaacagaatcctaatccccttttaaatagttgcagatcgat

SEQ ID NO: 424522 - DNA, 168 bp, Homo Sapiens
cctccctatgacacatcaagtcacttgtttttccttgtgctaattctattgctatcctatttcacatcctgaaatgagaaccaaaaataactgaggaaagataaacgctgttagacttgatagatttaaagatactgatattatgcgataacataattacctatatta

SEQ ID NO: 424523 - DNA, 295 bp, Homo Sapiens
  misc_feature (190)..(218): n is a, c, g, or t
gctcacgacgtcaaaatagtgttatactgcgtacaagtcttctattcctttatgaatattctgtctgatctcattattcattatagaaattggggtatagaaatatcctactacaattacattgctccctatatcttgctttaattctgtcagtatttgcttcgtatatgttgaaccctagtgtaagatnnnnnnnnnnnnnnnnnnnnnnnnnnnnnttaatatatgtatacccacatttatcatgggttctaagtaaatgaacttgtatattattgtctaatgtctaataggg

SEQ ID NO: 424524 - DNA, 359 bp, Homo Sapiens
tgagcggactcttgagtatcccagtcatctcgtatacaccagggctacaacgatatgtagtatagtagtgtaatgatcactcctacattcagataatgttaaggctggaacatacttaggaagtcacttaagttttagttacttctagtagaacctaagaaatataagagcatacccacacagagaaaagaaatgatacaattacatggaaaattgcacacgtattatatacaactatatttataacacaaatggaaagtacatctttacaagcttccacagaacatttacaaaaatgacttggaatgcattcctctaatatctgcctacgaaatccctaagcattcttcattcccatc

SEQ ID NO: 424525 - DNA, 202 bp, Homo Sapiens
cagctgtgataaagcgttcgtatctgattcttgcgtgaatgatatgacctcaagtgctttattatatggtatactattaactagtgggtttagatgttctttatcatgctccataagttactttctattaccactgtgctaagttctgatgtccatttgttaaaatacacaagattatatgagaattttaaaactgttattt

SEQ ID NO: 424526 - DNA, 371 bp, Homo Sapiens
tgcacgatgtcaagactgtctgtctttgacaatttgtatataggatgcctcagtgtggatctctttgaatttatctttcttgagtttaagcttcttagatgtctagattcatgtctttcatcaaattggggacatttttggccattatttctttaaacattccttttgtccctttttcttcactttctggcagtctcacagtatgtaattttgtctgcttgatgatgtctcaatgacccttagactgttaatctttaatttctctatcttagtgatattgtcattttcctgattttttgttctgcatgttttcctttagctcttttagcatatttaaggcagtgtttttgaagtctttgtctactaaatct

SEQ ID NO: 424527 - DNA, 138 bp, Homo Sapiens
atgtcagccattgagctgcgggctgctctcacccctgtccagatcttccccctctttctctgcagtaggttcttcctttctactttcagcccaaatgggtttggacctaccgtggggaacggaaacttaatttacacc

SEQ ID NO: 424528 - DNA, 294 bp, Homo Sapiens
agtctgctgaagtagcttctcacttgtttcactgctaaactaagtcacagacatttattccctagttcagcacctcccagtgctattgtgggcatggaagatgaaagtgctttaaaaagttaggaaggtagtataaagataattgtcatcatatcctattgagtactagaaactcatatcattgagaaaatactatgatcccatatcttagtaattgtaagcagagaatctaatcctcagcttctggagattagaatgcagacctccctgggggaccatagtactttttgaaca

SEQ ID NO: 424529 - DNA, 434 bp, Homo Sapiens
  misc_feature (94)..(386): n is a, c, g, or t
tgccagtcccgacagtagccagagctaagatggggacagtaggaggagcgtgagaaattctacattgtccaaatcgtgctctcttggcttcctnnnnnnnnnnnnnnnnnnnnnnnnnnnnnnnnnnnnnnnnnnnnnnnnnnnnnnnnnnnnnnnnnnnnnnnnnnnnnnnnnnnnnnnnnnnnnnnnnnnnnnnnnnnnnnnnnnnnnnnnnnnnnnnnnnnnnnnnnnnnnnnnnnnnnnnnnnnnnnnnnnnnnnnnnnnnnnnnnnnnnnnnnnnnnnnnnnnnnnnnnnnnnnnnnnnnnnnnnnnnnnnnnnnnnnnnnnnnnnnnnnnnnnnnnnnnnnnnnnnnnnnnnnnnnnnnnnnnnnnnnnnnnnnnnnnnngaggctctcccatcagacctgcgagccacagcttcggctgccattggg

SEQ ID NO: 424530 - DNA, 228 bp, Homo Sapiens
cccgttgtccagccacccggttgactgaagctgcgagtcagtccatcagggacaagattaagaacacaattatttctgactgacagggaccaaatctgctagaattttgtttaaaacaatttcggggggaaaaaacccacaatatcatcatcttaaggtgtctcccaagagactgggaaccagattaatacgcttttaatgaagtagagatcattatgtatgaagggg

SEQ ID NO: 424531 - DNA, 216 bp, Homo Sapiens
cacaatattaatatatctgcaactacttcggtgttaacacttgagaagcattaagtgatgaggtggaaggctgcatgagtcatttagctggactgatgagagtgggtggagggagctggatgcaggctcagctctgtacctccgtgggccccctcgtgagtcgaggtcccgtgtggctaagtctccttgtcttttgcatgctcggttgccattgag

SEQ ID NO: 424532 - DNA, 173 bp, Homo Sapiens
tggcgagtattcccgatctgctatgctatccagaaaggtgatgtacaatgaggatgtactcagcgcgctaactccaatgttgaaaagaaggaagaaggagacggttctcgctacgtgttacaaaaccatgttggtggtgacaatgaactggctgccacttgagcgtcctacct

SEQ ID NO: 424533 - DNA, 320 bp, Homo Sapiens
aagcggtatcacaccatcacacccagctccagactgaacaaaggatcctgccagtggccacagggagcctgcacccagacctgtttttccaaggatgccaggctgaacgcccaaccctgggtgtagctagatgggtctagctgggtgtagcttcactgcgtctcctgccgaattggtgataccacaaatccaaaggagccctgcttcacctccaatggcagctttcagaaagtagaagggatcagtctacacgaaacatgaagatcatggagaaaaatgtacaaccagccagatcaccccataccctgcggctgccattg

SEQ ID NO: 424534 - DNA, 146 bp, Homo Sapiens
ccaatggcagagtcgctccatccatgtcttgggtataagcccttcccaatggagcctcttcacaaattccacagcaccagtcactgtgagatggaatttaacgtgacatacagagggcctacagaggcattcctagacatcctttt

SEQ ID NO: 424535 - DNA, 466 bp, Homo Sapiens
tgcgggcttgaaacgaggaattgaagggtaactcatctctagtactactgaacatgccccacctcagtccaactcccactgcctgtcttctaagggacatcttgtggctagttctctgctctgctcgtattcagtctctacgtccctcatgcttctcatggattacaatgattacttactctcaaacttatatttccagccctaacctctccagtgatcatttgttaacaagattgtgctaaaggaagcaacaaaggttcttctattggatgtagttgaaaaagcagaactgttgctctggcctaaacattaactttggagaggtttaaattctgtttagaagttataaatgagcttaatatcatgtgatttgcatgataagttattttaaagagtttaaatccatgattgttcaaaatatgtagtcctattttgtctatatatatcaaaaactgctttggggcgg

SEQ ID NO: 424536 - DNA, 175 bp, Homo Sapiens
gcgcactgaagggatatggagaatgaggcatcagtggccccgacaagtagctttgttttgcttattaaatgtgtgcacactcagtacacctatcaaaacattccaagcaatcaaagtgactgccacatctccagctgagcctggctcaagtaaacagatgtcggctgccattggg

SEQ ID NO: 424537 - DNA, 172 bp, Homo Sapiens
tgaaacagactgataacatggtgggtttccagagaggaaaacaaggtggaaacaagaaagagctgcttggagtacttgggggatgtgacaagaactgacatatttgcaacacagagcacaatttccaacctttcactggccacaaaagctatcaggaggtcaaactggggcc

SEQ ID NO: 424538 - DNA, 168 bp, Homo Sapiens
ccaatggcagcagctcagttgccagagaacacgcgtggaccatctaatcagaggaagatgggaatcttctctttgacgtatggggagcctcagaaagacattttcctaatgttaaaaccacatgaatggccctattgatgtttccattcggaagctggtacttgctca

SEQ ID NO: 424539 - DNA, 288 bp, Homo Sapiens
attcccaggtgactctagagatcccggtagcagggaggcttcttccttccagagggagcagctcccgtcaaggctgccagtggactcatccgtctcccttctcatgcggcccgaccagcccccagacactcccccctcttattgtctgggatacagctcgcccctcctctgctcctgcctcctggcacctctgtgctggctctggcttctctatcctcgccctccttccgggtcattgttcccaaaagtgggttgtaacaaatcacaaacgcagcggctgccattggg

SEQ ID NO: 424540 - DNA, 346 bp, Homo Sapiens
ggatcccccaatggcagccgccgacatccctaaattagctaaattagctgtgagccagatttggggccaattctcacatttaatgagtccttgtatccctcttacagggggcagagatattttgcccctgaggagtgtaaacatgctgccctatttcattcccaacttccagctgcttgccccaaccccaggtaggaaaaacaatccaatgttgatgttcaacatctccataccctttgaaggtttatgtgcaaaagaaaaattaggttaattctataactaagtgaaatatctgaattcaatgaaacagagaaaatccaggattttctcttctcggctgccattg

SEQ ID NO: 424541 - DNA, 217 bp, Homo Sapiens
ggtaccctcatcgctacgccctcaccgctatatattttttcggtgctaagcagagcaattagtttttaccagatagcctcgggtattatgtttgtctaagaaacactctctggtgtatgtttaaattgtaattatttcccaaaagctgaggaaaatgtttcagcacagtgaggatttgacgtctgcactgagaacagctgagtttatttgtgccatt

SEQ ID NO: 424542 - DNA, 506 bp, Homo Sapiens
gatcgagctcgtcccccttacgctacttctcttcacagacaacagtactattgggaaagtctagaaacctgaatcctgtcaccactctccactcattggtttcctgtagctctgggcttcagaggaattgtctctgtcccgccattttctcatttgctaagaagatgacagtgatctgttctgttgacctcataggtttgctgaagggataaaatgatgttgtggatgcaacagaactcctacaatgtaaaataatcgttcacatttgaggggttcttatccactttgcttatttcagccacaggggctaggaactcaaccagggtactcaggctaggccccagctccagtcgcaggttcacaagttgtgcaccctccaactcacctggtccctctgactgcacgcctcttcatgtgcccacacatggttctactccagccaggtggggctggcccctccccacgtaagcacccacacccgcaggcagtcctccttctagcggtga

SEQ ID NO: 424543 - DNA, 191 bp, Homo Sapiens
ggtaccctatgatgggggtactccatccagagaggaagagaggagcgggggctttggtccagggcacgtgctggcctggggctgtggaagtcggatgcagggaattgtgaagggagctggtgagagaggcccagagaaaagaggcccaggctggaaagaggcagaacagggagaaaatagcggtgagggcg

SEQ ID NO: 424544 - DNA, 448 bp, Homo Sapiens
cctctcgctatgaagaaaatatactcagtgatgtgctagagattgtctgggagactactttagattccatgccaagggaaggctctctggcagggggtctacaaaggtaagccacccttccccatcccatcctggtctgacaaggaggggttgagaaaaacaagcagaacttctctgtgtaatatgcaaaaagcatttttcaatgcttgtggggatgggaaataatcttagggagattcttttcctgtgaactgatttctttttcttagaatgaatcactatagttcaaaattccagaaaaattataatcttacgagatcttataagaacccatctccagctcttcttaaattttgaattttccttcagacattgtttctgttgtgtaatgcttctatcttatttccttttttgccttctcctctgatatcccattagaaatagagtc

SEQ ID NO: 424545 - DNA, 179 bp, Homo Sapiens
gcgctgcgggctgatgcggtaggcggccacgtcgaacgttcgtcggcgggctcggcgatctggctgcggcgcagcagcgccgcgacgcgcgccagcagttccagcggccgcagcggcttgacgatgtagtcgtcggcgccggcgcgcaggccttcgaccaggtcgtcctcgctggaacg

SEQ ID NO: 424546 - DNA, 367 bp, Homo Sapiens
  misc_feature (281)..(324): n is a, c, g, or t
gtatgcaagacagtcagcaatgggcacatctaggctgggttgcaggacagccatgtgccaagacacctggaaataagacaggagtgggttaccccagaggccgtgctggaagcagactcagaagcattgcatttgggaacagaggagcagggcggagcagggcagggctgggtcccccagaggttccttaggctagaggccagcaccctgtgcagacacaggtccccaggctcagacagcgacagggtgagcacaggattctgagtgaggagaggggctcnnnnnnnnnnnnnnnnnnnnnnnnnnnnnnnnnnnnnnnnnnnncaagtgacttcttttgtcactgtgactctagcggtgagggcgc

SEQ ID NO: 424547 - DNA, 275 bp, Homo Sapiens
tgcgtgaagacaccagccaagaaccccctcaggacaaggcctctcacaagtccaactccacggattccaccgtaagtgctgtcaactggatgcgcatttacaaaatctgagttttctcaaagaagctgaagctttccgtgtcctcagtgattctggactcccagcgccgtaccactccctgccagccacacagggggacccacaggaagcaggccttccccgtggcgggccttgctgctatccgcgctcctttctgtgcagtcgtccctgacggg

SEQ ID NO: 424548 - DNA, 247 bp, Homo Sapiens
tatgatagatcctttctgcagaccgtgaaatactagtgtgtcttagaatgcgttatggcttgacccaacctcgtctagagagactggttctgggccaaaatataagctgacggcttagctccatcacttagctggatttaaaaataagcaagatggataatacatttctagaagaaaatataactgggaatagcatcatttaagaattaaaatagcagctcctgctctttttttggaacactgcatt

SEQ ID NO: 424549 - DNA, 142 bp, Homo Sapiens
agctgcagctccatggcacgtaccacttgggtgtatttttaggaaggactgagacactcatgggtagaaactcctcctaagagatgagacgtgaggaacagaactcagtggagtgaccgtggctcaatggatcttggagagg

SEQ ID NO: 424550 - DNA, 107 bp, Homo Sapiens
tgactcagttttaattttcagccttgtcctagatgataatatccatgaaactatgagtttggggtgctggttatagtttttcctatacaatgttaaattaaatataa

SEQ ID NO: 424551 - DNA, 284 bp, Homo Sapiens
cgcactcggtatgtaagtccaagctgtcgataaagtaacagagtgctggacttcatgaggcctcagaaatgggggcagtcaaaacacactctgtaagatgagcaaagaattaattcagcgtgttagcaacagaacccttgggtgtgtgctgtgggataagcgagctacgcggggaaacgtgccactggcttccaggaaccactgcactcagccaatgagcagaagtaaaaacagtggtgttggcagggccaagggaaaacagcagccctagaaccatctggggc

SEQ ID NO: 424552 - DNA, 137 bp, Homo Sapiens
cggtggtaagccatcctcgcacgcctatcgcaccttgtatcttgggatccttgagagtcatctcgccaggctgctcactatcactgatggcggcctgcaggttggcgcactggttcttgacgtggtcgatctcagat

SEQ ID NO: 424553 - DNA, 119 bp, Homo Sapiens
tcgcgcacacgtctcgcgcacacatcctatgtaaacgtatgtatgtgaatctctgttgtgagagcctataaatgtcaaaaggttggtatccaggtttatatgcgatgatccaggtgcac

SEQ ID NO: 424554 - DNA, 301 bp, Homo Sapiens
tctccttccagagactttcgcactttctattagtacactctacaaggggaagtggggcactaatggactgggagggcaggtcaggagtagcccaaggtatgcatgtgcaagaggaaaacttgataaactcaagtttatcaagaaattgttgatttcttggttcaactgttgatttgaaccaggcttctggttcaaagggccaggccatagctacagctgctctgtgtgggccaaaccaaagagcatcactgtagtttgggcacttgaagtttcagacagctgggagtctccatagaaccgg

SEQ ID NO: 424555 - DNA, 166 bp, Homo Sapiens
gcagaaaagaaatcttaaaatgaatacagtattgctactaataatactggtattgttactttaacagcattaacaaacttattctatctgtctaaaacgcatacaatgcaatgcaaataattgctaatgtaatcaggaactaagattgttcagcataagataaatg

SEQ ID NO: 424556 - DNA, 129 bp, Homo Sapiens
tgtcgatccctgggagagcccgatccgagggcctcactataaccatccaatcagtgtcataactgacggtgcggtgtgtacaaatgggcagtggacttaatcaacgcacagcttatgacccgcacgtta

SEQ ID NO: 424557 - DNA, 160 bp, Homo Sapiens
  misc_feature (123)..(123): n is a, c, g, or t
tcagctcgcaccggttatttattatgtattgttgaatcctacatcagttttaaggacacagagaaatgatgttgatgtgttgggaggatcctctacacgtcgacctctgcacggcaatgcaangtcttggcactgtggcctggtcgcttttacaatcagc

SEQ ID NO: 424558 - DNA, 144 bp, Homo Sapiens
tggattaggacattagggtgccattaactaagtagctcccacagagtcacatagggaatgtgtgacacctccaagatctgaatcccagaaaactctggctttggggatagatgctctgagttggcactgcaatgggtgtgcttt

SEQ ID NO: 424559 - DNA, 117 bp, Homo Sapiens
caaactccaatatgattttctaatagctgtgtttgatgattatatttattcctccatcagtagcttttttagccttgaaaatatctatttaagtttcttatttcctaggatggtgcg

SEQ ID NO: 424560 - DNA, 128 bp, Homo Sapiens
  misc_feature (101)..(101): n is a, c, g, or t
acatttccagcatgctgccgctggtctcgaaaccgccgtagtcggcgaacatgccgtgcagccagtccagcatcggctgcaggggtaccgacgctcgacanttcctaactcatgggtcatatgctggt

SEQ ID NO: 424561 - DNA, 112 bp, Homo Sapiens
actcgaaaacaagtacagcgctaaagtcagcgctcagctcgttaaagaagcggctgccatcggctacaagagaaagagaaccaaggaatttaaataaattcctggttcctaa

SEQ ID NO: 424562 - DNA, 137 bp, Homo Sapiens
tgtaagtgaaatttgctcaaattaacctggaatgtttacttcaccatgtaatatatcaaaaatggtgaaatgtcacagttgacatataaagaaaaatggctataaatatatgtatggggtaaaaaatatccaatata

SEQ ID NO: 424563 - DNA, 194 bp, Homo Sapiens
tccgattactccagcccaagggcccagcgtcctatatgctatcatctcccttgcaaactttccagccatgatctctgaaaaaaactcatccacactgagctggggctgattggaattcattccagggagagttgcattttgtcaaacactaatgttaaagaattgactctgaagaatagattgtagacaggatg

SEQ ID NO: 424564 - DNA, 316 bp, Homo Sapiens
atctcccttccctcccgctaaaatcctcatggctttcaatctcatgcactgggcttgcgcatccattacctctcccgggttcagtcactgccccttaattcaagattttagctcctgagagtccaacacactctggtgataatttttggtgacatctgtagcacacagttgactgtcattctaccatcctggctgtccctcaactccaccttagctaccagttccttcagctctgtcctccaagtggcattaccggtaactaagcccctctgatcttagctctaaccaccgctacactgactccctgaaggacctc

SEQ ID NO: 424565 - DNA, 170 bp, Homo Sapiens
gagctcggtacctccttcactgggaaaggtagctgaaatatcatacatggtcaagttcaagtttctctgcatggtctttgaggatgtactgtcttgcgatcacttacaccaagcccatgactccaagagtaccagaccacttgtacatcctcacactgctgggagcctca

SEQ ID NO: 424566 - DNA, 343 bp, Homo Sapiens
gaggggtccgtacacatagttcggctccaaggaaatcaggttagatggctgtcatgtgccagtagttttacctggtatttaattggtttcctgaaaatgtctccaaatttatctctttatctcacccactttctattgggaaggagtgattagtagttcaaacaaaattgtagacaagaggttcatttttacctttatttagtgattcacaatcactcttcatccaattgagtgtatgtatcttgcctctatattcttgcttctattttactctcaagagggaaatagaagtgtgcaggggttggggaaggagaattttcaagactgaatggagcctcagggg

SEQ ID NO: 424567 - DNA, 177 bp, Homo Sapiens
atagctggaccgggtgtagggctgtctgaggaagtgctcagtaagccttgttccgctctccctcaggtgtccggggaatgaggctcagcaggggccacgcagcagtggcttcggctggagcgaggattcaatatcagctccgctgtttactgtctcaaaggccatgcgtgcactatt

SEQ ID NO: 424568 - DNA, 623 bp, Homo Sapiens
tccaacaattcctggacaacatgtgtgaacaaacatgattgtgcaaaccctgagacatggcagagacccatgacaacatgtgtaactgaactgactgtgctgaaccctgatgacttggcatgatgacccagacaacatgtggtgacaaacatgacgggtgaaccctgagactgggcagatgacccagacaacaagggaactgaacatgatttgcaaaccctgatgactgtggcatgatgacccagacaacaatggtgaacgaacagacgggcaaacccgagactgtggcagagacccagacaacagggtgaacaaacagacaagcgaatgggtgcacagccaaggcacatggcccgtgacagcaggggatgtgaagtgccccttcccaaatcctctcccagggtgcagagccacctaaaaatattgctccaatgtctgcatcctcagctccgaaacttgccaataacacctgcagaatgcagggcggagagggagccacggctggaccagaaagggggctggggacatgggggctcaggccctcacagccacagtggagaccgtgagcatcccttgtgcaggtggtgagctggaaaggagcccccgactgccatcagctcgcc

SEQ ID NO: 424569 - DNA, 572 bp, Homo Sapiens
ccttggacaatgaaggtgctatatggggtggttcccaggtaccagatgtggatttgggaagagtaggcgtgttcactgccccatcaggaaccagcgaaaagtttaggtgagtcaaccacatctcttgtgctctcttcccttacctttaaaatgaagcatccaaataagatgggaactgactcctgtacaacccggcctcagatctttgtcctactcacaccctcctcagaaggaaaatctaaaggattaagaatcgctgaagtggggggctttgactgttttgtgttcatttcacaggcaggttagtgatttaaagatgatccttctcatcccaaaacatgtgctagccaaataccagggcttgtttatacacatgtagttatgcaagaatgactaaggatgatcaaattggagcgagttgctaagagcagcgctgcaatcaataggattgcaatggtaataaccccagtctagttaaagagatgtaaattgcacttcatttgaaaacggggttagaaccacaatggagcagggtggaatgaggagctgggcagacatagagtggtaatgag

SEQ ID NO: 424570 - DNA, 166 bp, Homo Sapiens
ctggtcctcgagtgttatgagtttagattttgccagaagcttgaactgtttattctgactctcaaatccttgtgctttgacagtgctaggtttgctgctcaaggcagccatgcctcttcccccagcctcagttctgtgctttagtgctgagaactcgcctaggtta

SEQ ID NO: 424571 - DNA, 152 bp, Homo Sapiens
tccagagtttttgtgaggctccaatcctcagattcaaaaagcctgaagaccctaaatacagtgaataaaaggaaatatctggccagacaattgtggtgggtctggaaagttctggagacaagagatggattccgcacacgtgaggaggagtg

SEQ ID NO: 424572 - DNA, 317 bp, Homo Sapiens
tatgtatagtaatatttgcatatgttacttttatatcagagagaaattaagggaaaaggttctggcaaactctaaaactatatttagtccatctttgaatcaattgtgtatttctttcatggcataatcctacctggtagattatttcctttattcccagaggtgaactagtcagtgatcatttgcatccagtgccctctcaagggtttatgcccaattagaaagcagtagcactataatgcagcatcagcacgtataacattcagtgctgagacggtggcttaagaattcatggggcttgataaaaagtataattt

SEQ ID NO: 424573 - DNA, 177 bp, Homo Sapiens
tgaaaagcaatttgccacaagcagagaatgacaaatactcaggatggaagaagaagggagggaagcaattatgggaggcgggagggaggtgtttagcaatagaagacactgttgatgactctccccagctgtggcatcactgaaattcaatttactaagcatttatggacagcctat

SEQ ID NO: 424574 - DNA, 127 bp, Homo Sapiens
tacgcctggctttttccccaaggttttatattttatcagttgtacacgtattaaagagtcaactgtaatgtttgtaatgggggcaagcattgccttgcccttgtaactttcttgtcccggggttgtt

SEQ ID NO: 424575 - DNA, 334 bp, Homo Sapiens
tatatgagctggtccggattatacaactaagtgggggcttcatacattaggtcagtgaccccttcaacaactaaatgggggcttcatacattaggtcagtgaccccttaaaccacaaagaggcctctttggttgagcagactcaacatgcagccaatcctgagggtaaagataccctcagtggcctccaccccacctctggctcctaactcaccttggagtgaagaatggagccatgccaggcttcccaaaccagccctccgcccaaactctctgaccactgaggctcccaccagaagcctatgccacacacctccttcttgtccggggttgtt

SEQ ID NO: 424576 - DNA, 146 bp, Homo Sapiens
gactgatgtatataggatcaatgtttagcctgaaattctgtaacctcaccaagatgtttccattttactgattcagtcttactttttcttggaataacagatactcttttatttcaactaagtattttctaccacagatttaagca

SEQ ID NO: 424577 - DNA, 287 bp, Homo Sapiens
caacaccggacaaactaagtgagagggggagctagaaaggaacttgaactcagcctgatattagaagtgcacaggcaggtgggctatggttattgtctatacccagtagcatgaaaagtaaaagctatgtaaaggtgatgtatctaatggcagtaataaattagctagacataatcatatctagggcattttcagacatctgacagaaaatcaacatgcaccataactgacacttagacctgaccaaggcatctcattaagaacatgtacccttgtccggggttgtt

SEQ ID NO: 424578 - DNA, 110 bp, Homo Sapiens
tagagtagaagagcaaggtcgcgagagcacttgaacgtggctgagccttgctctgtgagtgatcccgctgcttctctggtcctctttcttcctggctttgtttcttgggt

SEQ ID NO: 424579 - DNA, 286 bp, Homo Sapiens
tggacttacccacacctcccaggatgggaggcccatcctggcctctgtgggggccaacgtgcacacctgtagtacagcattgatcactctgagtggatgtagctggattcctctccccactaccttccgcatgtgatccctgagggctgggactgtatctcttctttctccaaaccttcccaccattagcagaatgcctggaccagcatgaaagctgaaggagcatggggctgttgagtgacctcatcctgatttcctgtgtggggccctggaatgatccaccaca

SEQ ID NO: 424580 - DNA, 464 bp, Homo Sapiens
acaaccccggacaatgattagaagggaatatatggacacaaaatgaaaattgctgttttttttggaggcttgggttgggagtgctttttatattttccacccttcctgaaatgctactatttcccgttgccatcaaacaagagtcaagagataaggtgaaacccattagcaaatctgagtgtggaaaagaattaattaggaccaagggattctcaggcagtgcttcttaaactttaacgtgcacataaaccacctagcgaatcttgctaatgtacattctgtacgtaggtctggagggggctgtgagtttgggtttctaacaagctcctcaagtattgcagaggctgtttgtccttcaaccacagtttaagttgcactgccctggagcaccctctttttcacccctgagggttctaaagtgtgtcggggaggtctggaagaccttttctttgtccggggttgtt

SEQ ID NO: 424581 - DNA, 408 bp, Homo Sapiens
  misc_feature (93)..(93): n is a, c, g, or t
  misc_feature (211)..(224): n is a, c, g, or t
aacacccggacaagcaaacatgtgactgtttctagccatttgccggcatttacctatgatggcttaacaagtgaatactagaactgaaccaangctactgtgtttcttgactagaagagatgtcttcgtaagcagtaatgtggggtaacccataatgaggaaaacttagtcataaaggagaaaagcaagagaaacagagaattagcaggannnnnnnnnnnnnnaaaagaatgaattcatgaaacatgaaaaatgaatgaattcgtgaaaacggcaaaacttttttttaccatttccgatatgtacagtgacaagttcttttgataccatgccctagactgtgttttacccatctattcagcagttatctcaacaggtatcatgactttttcaaaaccaaaaactgag

SEQ ID NO: 424582 - DNA, 635 bp, Homo Sapiens
tacaatcgattgtcaggcacagggtaaatgagggcactgcaggtggaagaaagtcacccataagggctttctgggtctgcagcgttgtagtaggtgctacttctattcttgcagtgctgggagacgggcgggggaagatgcagtccctgctgacaattgggtcatctgcgcgcagagaaggccccgggatgtgcgaggacatgggactgggagtccggaggcagtctggtttgagctgtcactaattggccatgtgacctccctcagccggcttcgtcctctctgaagcaaaaggctggaattggggtggctggagcatttttattttatgtttttgtatttgaatgctgttgggtttgggcctcaccgtttctggttgtctacacctgcctttttcaccgttgcaggtgacgttgcctgcctcccctgaaggtgtttgaacctggtgagatgtataaagggcccttttcagctcaaaaaatcagaattctgtgctgggttatggttggctctatcagggtcacttatgaacgtattactactattctcttttcattcatccccaatttaatggcttttgggcaccagtgggtgtgcccagtgtaagctctcatgggacaactgctagttaaggg

SEQ ID NO: 424583 - DNA, 141 bp, Homo Sapiens
cgatgagccggtccatcttttatttcagtcctctagatcctctattctatccaatgtgttaattttaaagaatttagcagctagcttccaatttaaaataacgagaaagatttgtcctctatttttatatgaagcacttta

SEQ ID NO: 424584 - DNA, 568 bp, Homo Sapiens
gacaatctcacatcctcccactttctggctcaggtaagcttaccttgcaaaaactctacctatgagtatttgccttagaaagagacagagtgaaaggaggatgctctgctaccccacgctgagggcctgggttatttctgttatattggacttccccaaacccctgaagagttcaaatactgtattgtgctgctttaaccaacccctccccttaggtgcttgggatgggtgtgagacctacactgtgagctgcaatgagggagaaagtgggtatggccctttccacagcaccaaggctcttctccacccatctctttcatagtcttagggtgtgacaggatttaggggattaaaaggaaagtccagcaaaggcgcctgcttttccattcctcctcctgtgaggtgtgcaccatgtttggtcttggatgaggactcctcctttacatgcctggattagcaggatccgctcagaagacttaacatgaggggagattttccaaggagaggccaccctgccttccacatgaggagggtgtgccccggcagaggggtctgattcttgtccggg

SEQ ID NO: 424585 - DNA, 326 bp, Homo Sapiens
tggccaacaatgccggacaagagaaagtaaatttaacagtgctcaatcatgtttttctagtaaatttcttcatttccattaataaaactccacaagaggtaacataaagagtgaaagagatgattggttacattctgaacccaatggtgagtttggtgattttattgagtttatttttgaaaataacatctccatgaaattcttaatttttcccactctttccagcctaaagatgttggtcattcattactgtgatcttcaatctgtgtgatgttcattgacactgtggtttcagagttctaatttcccccttttgtccggggttg

SEQ ID NO: 424586 - DNA, 546 bp, Homo Sapiens
aacagcccagggctattagttaaacacagatagtgtggtctccccgacctcacctgggaggtgcggggacacatattagtcatattggcatattaaagactagaaagtgtgtggtgaaaacacctgtttagtctgaagtaacacaacattttcatactgacccgacctgggcagccctctccttgtggggggcagctccttgcctgggcacacagagataagaaactgacagggctcgtgggatgccaagtagggatttctctgagagaggggctcatgggccaggcctttgggaatcaccacagaaaaggaagcctggtgtgtgcttcctggaggcccctgggcgaggcactggctggaagggagaagataatttgctcatggaggtgggggtgtggctggggtcaggagcctcctgcctgtgcccacctcaagcttaagacctgaccctcacagctcctcagcaagggaggctctaggccagacagtggctgcccacacccgcagttctgaaccagtattttgggatgcctcccctaaaaaatg

SEQ ID NO: 424587 - DNA, 134 bp, Homo Sapiens
agcggccccaggttctatcgctatctctctcctattcttatttctctaccaactaatctcaagtaacaataccccaggctttttttcagcctcagttcaagtaactctgaatcaaaagagagcaaggcaaaaag

SEQ ID NO: 424588 - DNA, 168 bp, Homo Sapiens
ctggtgggagaattattcacctttacatcaagaaggttgggaaaacacctgaacctgcatgtggcatgtgcctagccagacttcgaggagttcgtgctatgagacctgaagttcttgtgaggttccctaaaacagaaacacatgtcagcagggcctgtggtggttccg

SEQ ID NO: 424589 - DNA, 153 bp, Homo Sapiens
ttgacacagagcggcatttctggtctcagattcctggattgcacaaatgacctctgaggggataacagaggactccacgcaggaagggttcaggcagtcatgttgcccaacatgtgcggtgacagcataaacaccagggtgacttgtccgggg

SEQ ID NO: 424590 - DNA, 119 bp, Homo Sapiens
tcatgctccagccgcccggagatcagagcttgccacgaaaggctgcttttagccctgatcacagggcagaggattctctagaagccctctcaggagagggtcttctgggcgggaagcgt

SEQ ID NO: 424591 - DNA, 149 bp, Homo Sapiens
aacaaccccggacaatgaagagaaatgaccactgctttcaacttagcagcaccggtttaagtgatcacatgattgtagttggcactgtttgaagaatgttccaccaaatggaagcatgaaagcccaagtcttgacttggtttttgagca

SEQ ID NO: 424592 - DNA, 537 bp, Homo Sapiens
acaaccccggacaaaaacaaacgcagacacaccctgctcaaccgagatcctctgccatcagctctgaagacagtgacgtgagcgtgtcccagcagctcaggccttggccacaggtgacccactacgcagcctgcacgagcccacaatcccccccgacatgtggcttcctccagccacaggcactgacgagggtgcggccaccccaaaaagaaaggccccagcccacagggagcgccatcgggcccaccccaaccaactccccgtgtgacacgaagggccccagcctgctacgtctgtctgcagctctgccacgagcatccttccccagcccacaggtctgcaggcggcagccacacagcctggccctggcagtggtgtcctccgcctggctccctgaatgttcaccagctcctgcgggttttcctctcctcatgctcctgggggtggggcacccatcctgcccgtgttgcctcctgctctatgttcttgacgtgggatggcggccagggactctgccctcgctcagtgcctgccctt

SEQ ID NO: 424593 - DNA, 445 bp, Homo Sapiens
  misc_feature (252)..(262): n is a, c, g, or t
tgtgcgtagagagaaagctcgccagacgactgtcggccggtaacgagagcagtgaggagaggcaaggcaggagacacatgttcttcagtttgatctgcgtaggccggagactttatgcattgagatagagccagatatattcataatcatctcttagagcttggccatcccagtatcttcagttctgtgaccctgacagggaaggtcattggtgcagcccttccaagcaaatgcagttaaatttaacagaannnnnnnnnnncaatatgccagacacagtggtaaacgtgtaatataaagatggctctgacactcgtttgaatctgaacgactaccaggaaccttccttcttattatccaaagcctttctcttgcaattcactctttcttagcttttataataagggttgactacttgaaaatatggttcaatggtccggggtgg

SEQ ID NO: 424594 - DNA, 115 bp, Homo Sapiens
tcaagaattagctataatcatgaatacggattcgctgggggtagttttacagccagcaaccgcggtcacccgattaacccaaattaatagatccacggcgtaaagagtgtttaag

SEQ ID NO: 424595 - DNA, 281 bp, Homo Sapiens
tcacaagtcccactgggcttcaatgccagatgctccaggtgctctttctcccagtgccaaatccccacacgtgagggttcgctgtggggctcagaactctcactcctataggtgagtctctatgaaccagttagttttcagtctgtggagcttctcacccgggagctatggggttgtttatattgtgaaatcgcccctcctacctcttgatgtggcctcctcttttccttctggagtagggtatcttttttaaggtttccagtccatttgggtggagattg

SEQ ID NO: 424596 - DNA, 364 bp, Homo Sapiens
  misc_feature (123)..(167): n is a, c, g, or t
gatcgaccgacaatctactaaccaggacacattcacctacccatctaccccttcaccctggttaaatgagtcaacttgatgcaaatgttctgaaattttaggtttgttcttatgcttctgctnnnnnnnnnnnnnnnnnnnnnnnnnnnnnnnnnnnnnnnnnnnnntgattcattgacatttggctgcgcctacatcatgttgaagttctcaggtcagggatcaaatctgtgacacagcagtgacaatgtgaaatccttccctttgaggcaactcctacctctgctgtgttcttttcctgtttttcttatctttgctttttattacggccacacctggaacatgtggaagtccccaggccagg

SEQ ID NO: 424597 - DNA, 244 bp, Homo Sapiens
tagagatcccgcctacgtggaactgccgaagtccagattcgagtctggactacctggacaatgtacacaaggattatctggacattactggatttgttcttgcttaacagtagggaaccccaaaaaaaggggtctcccagacgaaacacaggtggaggattccatccccaacatgtgctctgcagtcatcctgtaacaggaattgctttcaagaagaatgtggcgctcagccctatactgaagc

SEQ ID NO: 424598 - DNA, 599 bp, Homo Sapiens
catacacggcgctgacgttggccaggtccaagccggcggtaaagtgctctccgtgggcaaataccacggcaacacgcgcctcgtcagttcgatcaaattcgccataggccaggctcagctcgttgagcaaatccaggtcgaaagcattgcgcttggccacccgatccaagcccaacagcaggacatggccctgtaactcacggctgacgcgactgctggtggcttcattcatcgggtgtgccctcgggcgcggggaaggatttcggaccaaaggtctcaagggttaggtgaatcgtttaagcgttatgaccaacagggccgggcctttgaaaaatagaccttgccactgttatctgcaaagactgtgatgcagcgcggtttatcggtgctttccgataaaaaaagctccctttttcaggtatgtccggtatagtgcgcgccggcctttaaccgggccgcgtttaggtagcgcaattccccgaagtcagcttcggctgcacgtccgcacagcggactctcccttgacgaatctttttcattcattcgttttcgcaaatccccgccgacaaagcagccagggcgactcttgagtctcaaca

SEQ ID NO: 424599 - DNA, 382 bp, Homo Sapiens
taatgcgctgtacaaattcgcgtcatcatgcgtggtgaatagcccttgccctgatgcgcgtgtcaaccacgacggacatgatcaccacattcggcgcctcggccgaatgccctaccaactccttgaacgcctcgtctgacatcaccacatcaaaggcgcagccgttgttgataaaaacctgcgatttcgctgtctgcttccagaatcaggaacccttgcgggtactgggcaatacgcgtcgcggatttttcccagggtcgcggcttcgtcgccttcgtaggcggtggtttcgatttgaaagcagcgggcggcgtcggcggggcgagcattgcgcaagggtcagggtgggcatgggtatttccggagcagttccacttaaggc

SEQ ID NO: 424600 - DNA, 313 bp, Homo Sapiens
ggcagctatcgtttctgcaactggcaaccgcatcgatcatcgcggagttcgtggcactcacgcttgtgtaggttgctcgcaaatatgtcagccccctgtgcgcgatctcgatacgcattccgattgtggcactcgtgaatttcacgttcgcctaccatttttccagaagaaccgattttggacgcccaagacctgggatgcacttctctgctgtggccccattgctcaaagtgtccggctaccagctcgcgttcaatgtgcttaacttcttctcgcgcaatctcgacaacgtacttgtcggcaagtacctagg

SEQ ID NO: 424601 - DNA, 404 bp, Homo Sapiens
acgatgcgtgacgtaatggagtgaggggtgtgccgtagtataaggcgacacgggccttgagcgcatcggagagggcggctgcatcctcaaaaccgttcagcacgtcgaacatgccgaggcctttactggcgtccgcaggaacggcgagcatgcgcacctccataccggctttcagctccttgttggcatccgccatgtgctgcgccaacgtcttctcgccggccgagagaaacagcaagcgccactcctgcacctgtcggcccgcttgtccttcgatcattcgcccgggctttgccggtgccattgccgagcatgtacaccgtctcgccgataatgcgcgggtcgcacatgccgatttcatccagtaccaggaggccgtctgagtgcgcagcggacattgactc

SEQ ID NO: 424602 - DNA, 187 bp, Homo Sapiens
  misc_feature (168)..(168): n is a, c, g, or t
ctgcatcggagtatatgaaaccatgaccgagcgtcgtttcggttatgaaaacttcaatgatgtaaggcgatctgggcgtgaaaggcgacgaacgccgtaacgtaaaagaacgtgatgtggaacctcgcatcccatatctgcaaaccacgttggaacctggacatcgcngctgagacgctgagatgcc

SEQ ID NO: 424603 - DNA, 174 bp, Homo Sapiens
tgtaccggagctacagttgcaggcacacgcacagtcacagcaatgccagatccaagccatatctgtgacctacgccacagcttggtgcaacacaggaccctttacccactgacgaggccaggcatcgaacccacatcctcatagataccagtcaaccacaatgggaactccagc

SEQ ID NO: 424604 - DNA, 249 bp, Homo Sapiens
agctcgaagagatgatatttgtgaagttactggtacataactggggctcaaaaaatggtaacttgattctccccaggatccccctgacttctctccccaactctgctcccatcaccagttgcataagtcaattctatctggtattcctctgagcattacaccacttgcggaaatgctatctagtgaaatcatcatttcatcatctgagaacttgagagtctatgtggaggaatagcatttccagagatg

SEQ ID NO: 424605 - DNA, 220 bp, Homo Sapiens
cctaatggaactgccgcaagactaaattttagctcaatggggaaagagagagaaaaagcgggtagagcctaatgggagagtactattatataataatttactttaggggttagcagatgcaaactacacatttagaatggataagcaatgaggccctactgtacagcacagggaactgcatccagtctcttgggatagaccacgatggaagataatcgga

SEQ ID NO: 424606 - DNA, 340 bp, Homo Sapiens
cgattacatgtgttagccctcgacttcaggtctcgagggaagaatgcctagatacagggacagttgggtatctttgccattcctgagtagtaggaatagatacaaaatgcagcagtttgtcttttactttggagggattatcccaagcgtgctccagagcaggactacctgatgtctaaaaacttcactgaattgacaggtccctgaatctttgtagggttgctgtcgtaccttctggagcacgtgtatcttaccaaagactccagcacactagccactgcttgtttattttatctaagcaacatgataggattgatgtaatggaccagtgctctgcctc

SEQ ID NO: 424607 - DNA, 203 bp, Homo Sapiens
tctctctgccacttcatgagcccttggtatagcctttctagctccctggcaaagtccatggcgtcaccgccccgggtagccgcgagcgcgccaacatcaataccagcctttgcgagagcttcagtagaaccatcttgcgcgttcaggttgaagttgttctggaactcttcgaaccttttaagcgtgtcgagcgcctccgacgc

SEQ ID NO: 424608 - DNA, 186 bp, Homo Sapiens
actaggccgctcgctgtcctatagtctcctagaatcaattctctgagtccgtgcattcccagataaaggcagctattaaacgtctctgtcacacagataaaagaagagaatcagaaagtgccaaacttttcaacagagtttcacattcctctcttaggtggtcaatattaaccccatggcaaaagc

SEQ ID NO: 424609 - DNA, 383 bp, Homo Sapiens
  misc_feature (102)..(239): n is a, c, g, or t
gggagatggcagacatggcggcagtagtggacagtatacacattgtataaggacgaatcagtgatagacagcctattacggtattatgatattttcgaaaannnnnnnnnnnnnnnnnnnnnnnnnnnnnnnnnnnnnnnnnnnnnnnnnnnnnnnnnnnnnnnnnnnnnnnnnnnnnnnnnnnnnnnnnnnnnnnnnnnnnnnnnnnnnnnnnnnnnnnnnnnnnnnnnnnnnnnnnntagttattgatgaactacgctgtgtctctcttttctccatttccacagctgtacgatggatatggtatttaatcaggcgagtttatacatcatatatatcatatcaggacgaatatatatacacctcctatcattaaattgatg

SEQ ID NO: 424610 - DNA, 208 bp, Homo Sapiens
  misc_feature (111)..(160): n is a, c, g, or t
tgagtgcaggagtcgaatggatgagggacatggagagcctggggccctgcgcgtgaggtatgtgaggggcgtctaggggataggtcaaggtaggttttggtggctgctgcnnnnnnnnnnnnnnnnnnnnnnnnnnnnnnnnnnnnnnnnnnnnnnnnnngtgaggggggaagagggtggaggatgaggaccccttagcacatgggag

SEQ ID NO: 424611 - DNA, 224 bp, Homo Sapiens
tagaagatatctaatagcatcattgtggcagatggtaaatcagcagccagctttctaaagtcagtctcttcctcagcattctccacttagtatctgtatcttctacatcttcctatccccctcaggtacttgacctggtgagtaagtcaataaaagtttctggaacagaaggtccagagctggactcataccaagaattgtcaaggatgaggaaattacacttc

SEQ ID NO: 424612 - DNA, 375 bp, Homo Sapiens
  misc_feature (222)..(222): n is a, c, g, or t
acggattagttgctggatagtacgggaatgaacaatgatccgttttctgacatcatcaagctcacgcaggcccagtctttggttactggcggttttaccgcgtggcggtcattgtggcgctgcgttttccgtgccccgtgaaaaaatcaagtttttcgccatacgtaacaaggcaggttgttcgggtcacttttgcacaggggagccaagcccccagtgcgngttttctacgcggtgatgttggggctgcttgagcgccaagcgatcttttattcctcgccagccaatccaggatgttgacgccggtcgaacgccatgagcgtgtatttctgggtgccgcgtaaaagtcgcatcaggagcgagttccacaatagg

SEQ ID NO: 424613 - DNA, 387 bp, Homo Sapiens
gggacgaccgaaaagcatttgtagagcgtcatgcgcttcaggatgatcaaggcaatcggctaaatgtcacgcttagtcggctgcgaaagactatggaaagccgtttgtggaaactgagcggtggcgacattatagaagtttcctccgttatgggtcatacccctggtgtcgccgataatcactatttgaagatcaacgatgagatcaaggtcgacggggcgacatttgttggggaggcttttccggacaaactacgtggcataaacgttataccaaccccaccaggcggctgcaaagatagcctttacggtagtctggcaccaaaggatggcgtcaatcattgttctgaattcatccactgcctcggttgccctagctatgcaattg

SEQ ID NO: 424614 - DNA, 448 bp, Homo Sapiens
tatagaaatgcaacgtaatttctgaatgttaacttatatcctgctatttttcgtagaattagttcatcagttcaagtagtctgaggttgagtccttagggttttctatatatattatcatgtcatctgcatacagtgacaattttacctcttccttccaagttgaataccttaaatatctattgtatgtctgattgctgtggctaggacttccaatactatgttgaataacagtggtgagagtgggcatcctgtcttgttccagattttagtgggaaggctttcagcttttctccattgagcattatatttgctgtgggtttgtcataaatggcttttattatgttaaggtatattccatctatacccactttgataagagtttttatcatgaatggattttggactttgtcaaaatgctttttctgcatctattgagatgctcatct

SEQ ID NO: 424615 - DNA, 597 bp, Homo Sapiens
  misc_feature (69)..(78): n is a, c, g, or t
acccgtacgcccaaatgaagttacggaatctttgggttggaaaggaccttattaaaagttatggctgannnnnnnnnnaaagaagcggctaagcattggagctcagaatatatgctttttaattcactgaagtttaaaaggctagtccactagaaaagactcaaatagagaaaactctccttgctgcttttcaatctaggtgtgcaagctctacagctactactggctccatagctagcattcataccaatgcatacagattatccagtagatagcatagttatctatctactattactagttatctgtaatatctactattatccagtagaaagaatctgctgacatctgtattgttttctgtgtcctttaccccttctgaagttgtcatctctaattcttgtttatgtccagtaagttattttattgaaaagcagcctgttttgaaagatgtgtttttctcccacagatctcctgtgtctcatgatcaggtgtggagttgttaaatatttgggctaattcttgtttatttctataagccattttattgaaaagcagcctgttttgaaagatgtgtttttctgccctggatctgtt

SEQ ID NO: 424616 - DNA, 199 bp, Homo Sapiens
caagccgcgtccatcccatgcaccccctgctaccatgccactgcagcaactccagacagatcaccatacctctcattggtgtctggatattagagctcaccttccatgttcattcacatcccatgttcattcacatctcctcgtcctaacatgattacgcatctgggagacagggacttgccttacatatcctccacag

SEQ ID NO: 424617 - DNA, 621 bp, Homo Sapiens
tccgtacgcccaaaccaagaagaaaaagagcctagtaaaaagccctcacccagggaaaagccctgggaccccctgtcatacatgccccctccatatgtctcacaaaataggggacaggaagatcaaggggcagcaggagggttagaggaagaaagacctggagaccatggggaagctgaaccaactgctcctttaaatccttatccaaatttgaaaaaagaattagaacagtgtaagagggatattgaaaacttccctatccctttcacacagcaggcatctagcatgttcccttttagggaagttctcgtgggacagggagagattggctttgtaaatgctcctcttacaagtactaatgttaggaatttcaagaaggaaatgaaaccactcctagaagatcccctcggtttagcagaccaactggacaaattcataggacccagcttttacacctgggctgaaatgatgtctatcttaaatatcctgttcataggagaagaaaagggaatgattaggagagtggccatgactatctggaagaggcaacaccctcccaggcaagaagtcttgacagtcgaacaaaaaacttccaaatgtcaatcccaagcgggataataa

SEQ ID NO: 424618 - DNA, 518 bp, Homo Sapiens
atgctttggcggagtaaggctggcttctagagatctaagggcagagtagtgcagaatgggaggttcagtgcattcaagacaataacattttattcaatccccttttcagatatgtaaaactttacaaaaacacagatatatatgtacgcaaactctgtcccaactacacagaggcaggggccatgttctgagaaagataaatacagacaatactcaaacaacgtcaacaagcaaacaggcttttgcaactaaacagaaagtgccagttttattgtctcattagctgtgaccttccattattgaaggttatatctacactgtggataagaattaggtacttcttgttgaacaacataattactcttgttcacacatcccactgcagtggtttacaggattagtcattaagcagactatattatgagtctttatctggtatcaatttataacgaattgtaaaccagaatgaattccaaagacagacaaaatagggatttaataaatgcataatatttcat

SEQ ID NO: 424619 - DNA, 500 bp, Homo Sapiens
agagtatcccctccccgtacgcccaaagatcagttaaaaggctgttataatgatgcagagaagtggagatctgctttgagtggctcagtctaggggagcagggaggcccaccgtgggcccagcagtcttccccatgtattaccagtcatatgaaagaacttagaaaagcatccacaatgtgtccttcaccatggatgccgtgtttgtgcacatgaattggagacgtaaaaaatgtaatgtttccttagttccactagttaaaaaaagaaagtattgcagagggaggatggatgctcgccagtgaaaatgccaggtgtcttccacaagagaaaggaattggagttgggatccagcaagttgctcaaaagggcttatgcaagggtgaaaagaagaatctggcctcataggtatctgaactgtcctagaagaagactgtcttaaagtaagatttgcctcgtgtctaccaagcgtatcttcaattgggcgtacggcgagagtac

SEQ ID NO: 424620 - DNA, 415 bp, Homo Sapiens
ggtccgctctagagttatcccctccccgtacgcccaaaagcatgccatgctcctgccacctagtggtaagctttaagagcagtggtttgttgaacaagtacttaagcttgtgacctgttttaagttacaggttgcatttacttgttgacagtgctgtctgttgccttatggaggtgttgcctaggagtctggagcattcatgctgcttctcctaccagctcacaaggagaaaccccctctttagtgagtggaaactcaggcagcagagtcagtggttcaggtagtgctaaatatgccatggaaaaaactcttaaatgatgacaaccaattggacccctctccagggagctatggtaagctgcagtctcttggcacatgtttctagttgagttgggcgtacggggagggtaccgag

SEQ ID NO: 424621 - DNA, 251 bp, Homo Sapiens
ccccccgtacgcccacgtagactcatacaatggtgaataccattctaagcactttagagacatcaactattctaatgtataactacgacgaagagattatcacctgtatattacaaacgagaagccaaaagcttagagaggccatatgccttaggggtgaaaagttgttcaagtaatacacaaaaaatatgagcaccagcagaaggagatcaggagttgcccagtgccaaggatgacagagattgaatgca

SEQ ID NO: 424622 - DNA, 150 bp, Homo Sapiens
tatccccccagttcctttctgatcaaataattatataatcctcctaaacacttttgaaaatctgaaattggtgtgttttttagttgttgccctgcactgaacttcctgcttataatgaaactggcaaggtgttttcaaattgtcacagtc

SEQ ID NO: 424623 - DNA, 432 bp, Homo Sapiens
  misc_feature (235)..(247): n is a, c, g, or t
cccgtacgcccaaatgtggatgccttttctttctcttgtctgattgctctgtctaggactttcagtactatgttagataggaggagagaaagtggacatccttgccttgttccagttcttagagaaaaggctttcaactttttcaacatttttcaaatgtattttgtattctatgaattcttcagttccagaatttctgtttggttcttacaaaaaatctatctctttgatgagnnnnnnnnnnnnngggttttcccaaaattatcttggggcttactgagctttttaaaatcaatttattgaattttttgggattttgaagactttttttgattaagatctattgctggagaataattgcgtttttctggagaggacatatttcttggcttttccaggttccctgggcccatatgtggatatcagttcaac

SEQ ID NO: 424624 - DNA, 436 bp, Homo Sapiens
  misc_feature (106)..(210): n is a, c, g, or t
  misc_feature (271)..(331): n is a, c, g, or t
tccccgtacgcccaagtccccgccaaaggaggaggcaccactggcaaaaagcataactaattgcatacaaccacgaagaactgtttttgagatggagtcccacttnnnnnnnnnnnnnnnnnnnnnnnnnnnnnnnnnnnnnnnnnnnnnnnnnnnnnnnnnnnnnnnnnnnnnnnnnnnnnnnnnnnnnnnnnnnnnnnnnnnnnnnnngtgtgtaccatcacacctggccaattgttagacattttttgtagagatggtgtctccctannnnnnnnnnnnnnnnnnnnnnnnnnnnnnnnnnnnnnnnnnnnnnnnnnnnnnnnnnnnntgacaagtgtgagccactgcaccagaccctcattaagaaatcttcaactaggttttcagacacaacatctcatttgactcaattgggcgtacggggagggtaccg

SEQ ID NO: 424625 - DNA, 329 bp, Homo Sapiens
ggctcatttcagtttgttgtcaggcctgttcacttgattgtgtgagcctgccttcaacctcaggcagctagacttcaaatttctgggcctcttgtttttctatatttttgtctgaattttgttaatttgtgactcaaactggctgtatctcccatttgaagattccttttgtacatgtttttcatttttgttatgccatttctttgatccatctccatctgtatttatttcattgactttctcttgtagttttttccttttcagttgaggtggaagactgccaacatcctctggggttacaccccttacactacagacttttttccttg

SEQ ID NO: 424626 - DNA, 337 bp, Homo Sapiens
ccactctagagtatcccctccccgtacgcccaacaatgcattgccaccactccagcatcatgtttctcaaacacagatctgctctctcattcccatgcttcaaacatttcatggcctacaaaataacacccaagctcctcaggaaaatcacccaaatgacccagaacctacatccagtctatctttctcgtgtcatctcctaccactcttctccttacccacccttcttcacaagcaccctcagccacacagaacttctcaccaatttcctgaatccagtatatactttggtgcccctctaccttagttcatgatagtttttttgggcgtacgggga

SEQ ID NO: 424627 - DNA, 471 bp, Homo Sapiens
tcccgtacgcccaacccacatcctgcatatacgggtgtctttggacagctccaaatgcatgtccctccttctgcagacccggtaaactcaaactcaattcatcatctttcctgtcccttctatagtttctgtctcagttaacatcagcaccatctacattacatcaaacagaacctagtcaacctaccaccgaagtccctttccttgtctactcacatgtaaccaatcaccgattatctaaactccatcacctcgacatctttcatatctgattctttttcctcattttactatactgcctcagttcaggttcttctacccttgtactggactagtggaaaaatttggtatcagcacatgcagtttcatataccttcaacctatcatttccattgcagccaggaaggtcttcccaaaatgcaaaattctgtttctccctatctaaatcctgcatttgggcgtacggggggt

SEQ ID NO: 424628 - DNA, 315 bp, Homo Sapiens
tccccgtacgcccaatagtaatcatctacagcacatgtaccaatttctaaaatgtattaaataagtcagacacgtccataagagcttccaataaataattttaaacactatttcaaactatgtaattgccaaactctgtccccaatcacataaaatggaagctaagaagaataaaaatcatcagaacttagtagtttcactcacagatattcccaattcctactgaagacaaaaggggaagttcctcttcccagcctatcaccccggacattaggcctcccaccttttgggcgtacggggagggtaccgagctcg

SEQ ID NO: 424629 - DNA, 396 bp, Homo Sapiens
tccccgtacgcccaaaacaaggaggtgagtaatatggtaaaagtagtattttaataagattggctgcagtgttcaagttgatcgtatggctaagaggctgctgcaggcatctaactgtgggccagagagggcctggaccaggatggtggctgcaggccaaaaaggaagatgcctttgagaggtacctccaaggacgaatcatgaagccttctaacaccctgaaagtgggtgatagggagaggagaggagccagtgctgacacgaggttcctgccttcctgcctaacttccaagggtggtagtgttgctgggaaaaaatgaggtgtggggaaagggagctagtttaggggaatgaagatgagcccagcacaaacattctgacttgggcgtacgggga

SEQ ID NO: 424630 - DNA, 284 bp, Homo Sapiens
ctacaaagcccattcaggggcaagaaatacctgaaatggaaataacactccattaaaggctggcttttaggggattggcagaatcaaatccctgtgcttgaatggcatttcgaagcactgttgattccaagaacttttctctctggtcaagtcactccgaggagtcattttcattcgcctgactgttcaggattttatggcatgtaagtgacaagcactccctgtaacacatcgtgggagggcacccgctaaaagagagctcaaactgtatgacattagatgtt

SEQ ID NO: 424631 - DNA, 337 bp, Homo Sapiens
  misc_feature (195)..(241): n is a, c, g, or t
  misc_feature (275)..(284): n is a, c, g, or t
ccgtacgcccaaatgaagaaatgttaatatctgtgctccctaaagttagcactaagttcaaggaaacagagtttctacatcacaacttcactaccccacagttgtgttcaacgtataagagtagtctaatagaatacgccacatcaaaagaaattgtttaaggattttaatgtaaaggtgggcttgagttctggnnnnnnnnnnnnnnnnnnnnnnnnnnnnnnnnnnnnnnnnnnnnnnnacccccagtttaaaaggcggggggccaatcccannnnnnnnnnctggattaaagggattttttttccccaagatcccggggggggtggtttaacgg

SEQ ID NO: 424632 - DNA, 531 bp, Homo Sapiens
ctcttgctctctctcctaaggtgcctctctctagttttccagaatacctgctttagtttatagggtgaagcacaggttctttctgcacctctgtaaatttctttataggagtttgaaactcaagtcccatatggtgttaccagtgcctggacttggaggcccagccttcctgttgtaccagcgtgtgcttgtttacgtgtgggcaagaccctttttcagtgcttctctatgtctgcctcccaggaactccttcagttacatggcctgatatttgcccaggaggaggggataacatacttatagtcaaagggttggaaatatttcagtatggctggagcatactgggggccatgtcaaggagaaagttttatatgccatgttggggtatttcaattttgtcctggagggaatggggaatcgatggaggccttaaagcaggaactgacatgattgatgtgtgttttaaaaacggtattctagaaaaatatggagggtggattgggttggaagtaggaagagaggaactgaaat

SEQ ID NO: 424633 - DNA, 615 bp, Homo Sapiens
  misc_feature (353)..(483): n is a, c, g, or t
aaagtagtgactattcctttgttcttagtgacataatttgcattgggtagctagagtgaaacacattaaagacaatgaatttaacctacagagctgggaaattgagctaaataatcttggatacttctagagctatagctaaaattgcatgctactgcttatggtagaactgagagttgaatctcctcaaccattaagatggggtggcagcattttatggtgagatagccaaagaaacctgaatataaatttactggtaggtggtggtataaaaatataattcaggagccagaaaaacttggtttaaattctagctccacttacaattatggacaattaagcttttaacattnnnnnnnnnnnnnnnnnnnnnnnnnnnnnnnnnnnnnnnnnnnnnnnnnnnnnnnnnnnnnnnnnnnnnnnnnnnnnnnnnnnnnnnnnnnnnnnnnnnnnnnnnnnnnnnnnnnnnnnnnnnnnnnnnnngaaatatctgacattattttcttaaattaactaaaaatggtctcaatttctttgggggtattatttaattagggtttttacataggatacaatgctgggaacgtatagatagctcatactcaaatttttaca

SEQ ID NO: 424634 - DNA, 480 bp, Homo Sapiens
ttctctagagcatcccctccccgtacgcccaatccccgtacgcccacattttgattcagctttaaaatgctatgatcatttgtatctgggtctataacctctaaaatagtaaagataagataattcttgtcttttcaatcagtgattaggaagggaaatccagaatactgtattgaacccttcctagaaacatcctaaaattgttctgcttaatgagttgatgttagatgttccacttaccaacctgttggcctgattataatatgatctttatcaaaaaccagtagatatatagtatgtaaatggaaacatcacagtatcctagatcagaccgcagtagttgctttcaaaaatggctgtctctttgaaaaagttcatgccatcctcttaaacgtttttttatcccagactaattttctgctcaactgggtatttgggcagcatgcattcatttactctgtgtttatgtgatttgggcgt

SEQ ID NO: 424635 - DNA, 203 bp, Homo Sapiens
tgaaggtattctccttgttttgtttccaactatcaatttatttgaagttaaacactaagtgaataataatgttctgtggcttgagcataaactcaaagatcggacctcctggttggtcacctgggtgcatgtctaagtcacctatctattcagtctttcccctcatgtttttgttttttgggcgtacggggagggtaccgagc

SEQ ID NO: 424636 - DNA, 370 bp, Homo Sapiens
gctcgctctagaggatccactccccgtacgcgcaaaaaaatattttttggttggattgcactaggaaatctctcccacctctcccttttctctttctttccgtatacaaaataaaaggcccaccatagagactaggcggccgaaagactaggagggctgaggaaaagaaataggtctctggaggtggaactaaaactgtgcagctgcctcttcctggcgatggatgctgctttgggagggccagggaggctgcagggggacagtgttgggattgtcaaggaaaaaggggtaggaaggaaggtggagggattgatctagtaccagggagaatattccactgaactgtgattctatggcttgggcgcacggg

SEQ ID NO: 424637 - DNA, 606 bp, Homo Sapiens
  misc_feature (537)..(537): n is a, c, g, or t
cagctccagaggatcctctccccgtacgcccaaatgattattttcataagactgaacaaaaagttaactaagagattccaaatgatcaacgatcttagcagagttcacttaaagagtcaaaattatcaagcaggctatttgaaatatgaatactcatcaaaccttgcaccaaatgtatgttacccttcccaaggtgaaccagcgatggtagcacatgtgtgcgatttataaatgaatgcaagtacattgaaggagcctgctcaaaaatgtttacagaaagggcgtgcaatcaaaaatggttccagaacccggctctaattatgtgaaccctgaattgtgaagccaagacaaattgggattctcaattatttcagtacgtgtcggtcagactgcaagtatcttaagaggtggagtgactctcccaagttctcatggcgaatcctgcatttgattcagtcctggctccccacaagtctgcaagaatgggcgagtccattccctgtctgaactttattttctcacctttaccaaaagaangttgaaagaggtgatcaggaagggttcttctgactcgaatgtttcataatcaggggtttcccaagaata

SEQ ID NO: 424638 - DNA, 473 bp, Homo Sapiens
tctagagcatcccctcctcgtacgcccaaatgaatgttgggcggttctggaggcctcagggaatagttcctcctagggagggtgagaggcatggccgtgcaaatgaatgtggccagaaagacatctatctgccttttaaaatgggctttggagacttccagggacctgggtcatccaattctgttggttgtgtttaacatgaacggtaaaagttggaaagcattcacatttggacatgctgtcttgaccatcttcggaatggttcttttacaagcgccattcagaggtagcggggcttggtcctctcagataagccttttgcctctgtcttgtgacaccgtgtttgagagggtattgttggagttagttggaaaagtgttgtcattttttggggtagtacctcgatacttttaagatgaggtcttgggcctgtggtttaaaaatgatacatggaaaaaaatgatacttgattg

SEQ ID NO: 424639 - DNA, 224 bp, Homo Sapiens
tccccgtacgcccaatgtcatgtggtactgatagaattgaatgataagtatgtgtaagaacttctatacccagttctatgctaactgctatgtgtaaggacttctgtgtccagttctatgctaactgctataagaactacaaaataaatcaaagacttggcattttccatggaatgtagagtatagaacgtgaggggggtaaatccctaataaatttaactagg

SEQ ID NO: 424640 - DNA, 482 bp, Homo Sapiens
  misc_feature (448)..(448): n is a, c, g, or t
tggtggttccggtttttgcaggcttagagaaaactgtccatcaggattgtgctgtcttgattttatttgatcattcccacccttttccctttgctgtagccccttgacctgtctcctgggcagttctttcctttgctaaatgtgagtacaacaagtaggctttcctttcctcctagagagggggaccttggagcccctccactgggtcagagaaacttccgtagctgcagcagatcagtaacaggagagccgagctttactctgaaagcctctattttcaataatgttgtgtttgctctttggataatcatttaaataattaaacctcagtataggtcatgttcttacctaggtttgcacttaaatagaaggaaaaacatctcaaaccattttgttagttttatagttctcgtaactacactttaagctgtggttttccacccacagngatgtcatctacattatatgctgaactgaaatga

SEQ ID NO: 424641 - DNA, 107 bp, Homo Sapiens
atagcttatgccctccttactttctttgctgtggcaaaggacttaatgactagtctcctagtagatatttgataagatgggatagatgcataatagggtaccgagct

SEQ ID NO: 424642 - DNA, 404 bp, Homo Sapiens
ggagtctgagaaacataaatgtgcaatttttctactctactgaaaacacatgtccaccaaaagcaattccccctttcttctaaagtaaaatatgatcatctttcaatcacttagaaactaaaagcttttatacattccaaaaggcctagtttctttgtggagcttaaacaattgtgtcactaccaaatcttctttcctactagcagaaagaaccacataggaagccaaatccaaattcagacttagactaacacagaacaggtctgtgataatataaagtctatccctgtacttatctttattaggtttctataattagagtcgagttgctttttacgagacaaaaataaggcaaatagctcagaaagaaaagacaaaataccttttagtttctaaatacatac

SEQ ID NO: 424643 - DNA, 308 bp, Homo Sapiens
  misc_feature (95)..(214): n is a, c, g, or t
ccactctagagtatcccctccccgtacgcccaacctaactgaccaacttacctcacaatattttttaacacagtgatttccaaatctaggtgcannnnnnnnnnnnnnnnnnnnnnnnnnnnnnnnnnnnnnnnnnnnnnnnnnnnnnnnnnnnnnnnnnnnnnnnnnnnnnnnnnnnnnnnnnnnnnnnnnnnnnnnnnnnnnnnnnnnnnnnaaaccaatgcggccggttatttaggaacgattctatacctctattctactccagctaactcaccctccttttccttcatttgggcgtacgggga

SEQ ID NO: 424644 - DNA, 124 bp, Homo Sapiens
  misc_feature (81)..(81): n is a, c, g, or t
  misc_feature (85)..(85): n is a, c, g, or t
ggttaacaacttaagaacacatatctatgcaacttaatgttgagaattatacaattcaattaagttttaagcattaaatancagntttactaaattcaaaacaccttttacctcattttatatt

SEQ ID NO: 424645 - DNA, 250 bp, Homo Sapiens
caccgacagccgactcctagaccactaagagctctgtgactccttacctctctccaattgtccaggaggtgacaactcactctattccacttcattccttctcaggtcggctatctgcagtgacatccgtagatatctgacttgatcaactgcagaagctccttcctcgctgaaatgtactcgttaatgggtaccgagtctcgtaaattacgatacaatcatggttcactaggctgtattccgggagggt

SEQ ID NO: 424646 - DNA, 123 bp, Homo Sapiens
gaatatcgacaagatgaaagatcaagaaattggaaaactattgaaagatctcagctcaaagtttaaagaaatttaatgaaacccaagcagaataagtacaaagaagactacacacatgcatgt

SEQ ID NO: 424647 - DNA, 331 bp, Homo Sapiens
ttatacgtcgatcctgcgtcttgtaacgaggaaacgctataacacatatcgcgtcagttggactgtggatggtgaattagggaaaagtatcatatattgtcagattgcctaaaactgataactgtgctccagttataagaaaatgttaatatgccaaggaaatgcacattgaattattttgtgatacgtaactttcaacatacattcagaaaatctatgtgtttagcagcaagacaagatatggggcacaatattagtaattgtagcgtttgagtagagtacacaggacttcattgtataattcttctaactttcctgaattgtatcgtta

SEQ ID NO: 424648 - DNA, 188 bp, Homo Sapiens
gggatctgatatactggtctcaagcattcaccctgccatcggcctcctacatgctgcgattacagagcgtgtgaaatatttcctctagtagcagtgtgctaggattggaggggacaagagtgaattagggagaaaagaaagaataacattccagaaagaatagcacgaacatcaaggaactcaatata

SEQ ID NO: 424649 - DNA, 153 bp, Homo Sapiens
aatagatgccgtctatttccattgtacgaagagaaaccacaactgatttaacccttgccacgttgttgtgcaaatttcaatgtataacagtcattgttactaaatttaattagggaatcagtaacttaaaaacaaatattggaccatctctct

SEQ ID NO: 424650 - DNA, 102 bp, Homo Sapiens
atggagctactgcggggcgtgccacgatcgagcagattaggtctcagtttcagtttcagcttgctgtcttagctcttaggtgctccgggttcaataactaaa

SEQ ID NO: 424651 - DNA, 530 bp, Homo Sapiens
  misc_feature (68)..(201): n is a, c, g, or t
  misc_feature (260)..(316): n is a, c, g, or t
actgtctctcggtcttcacgatctctgtgttacacatcactcgaccataagtccatccagtccattannnnnnnnnnnnnnnnnnnnnnnnnnnnnnnnnnnnnnnnnnnnnnnnnnnnnnnnnnnnnnnnnnnnnnnnnnnnnnnnnnnnnnnnnnnnnnnnnnnnnnnnnnnnnnnnnnnnnnnnnnnnnnnnnnnnnntagtctagcaagccatccagtcatccatctgatcaccgcattaatccatccattctttnnnnnnnnnnnnnnnnnnnnnnnnnnnnnnnnnnnnnnnnnnnnnnnnnnnnnnnnntgccctacatccagccttatacctgttgagtacaattgtttcctctttaagggtcatgtggacaatctctttaaaagccaggtttgacagtggggaccaacacgtacaatagtagccagcccaagtgaagcaatatgggaacatcacggaggaaaagtgaattatacccttatcaaacactctcatcgcacctcacgctttcctcttccaaaca

SEQ ID NO: 424652 - DNA, 134 bp, Homo Sapiens
acctcagatgagtagtaatggccaaccttcgatcttgacacttaaggaccgtagagaaggtcgaactttcagctgatgtgagcccggtgcttccctttccgttgttggcatcgctacaccctgtactcttctct

SEQ ID NO: 424653 - DNA, 411 bp, Homo Sapiens
tgggtgatctagaggatccctaacgatacatcaggcctagatttgatgacatgtgatagaaaacttaaaaggtggcttaaagccgcaaagttatattctttcacataaaaaaacattcagagggtaattcctatggtccgctccactttcaccctcaagctcacctcatcatcccagatgccttgggaatgtctgggactgtgtccacatgccgggggcgggggaaggggcagagcaaaagagacagcgcccagctgagccagcaccttcaagaagccttccgggaagtcatgttcaagacccagaatttggtcttatggccctgcctagttaaaaggaaatctaaaaaatatggattttattctaaatggcactgtgcctaggtagaaatgggggctcattactataaag

SEQ ID NO: 424654 - DNA, 187 bp, Homo Sapiens
agtcggattacactgactggacctctctaacgctgcagagtattactttgacgtgagccaaccgtcagttgccctacagtacattttaatgggtggaaaaaattagcctcggtaaggaatttggctagaggaaaacaattagaaaacgaggaaggtaggatttatctccagtgcctgcattctttta

SEQ ID NO: 424655 - DNA, 199 bp, Homo Sapiens
acactcaggatactatataactaggtaaacgaaattacactgccgaatgacagtcctacaccgggtatacagaatgtaccgtgtaacagttgtaatcctacatggttttgtatccgtatgcgttatttaatatacattatctaatagtatgagtattacagaattatagtatcatgttccctcaactgaatgtatcgtt

SEQ ID NO: 424656 - DNA, 181 bp, Homo Sapiens
tcggagtagtcacccagtacagcagatggaatccttcttcggggagtaataagacctggagaagtatgccacaggttatgttgagaattcactagtgatggagctctgagtgtacatgtatgtgaggaaaaggaggtaaacaaggagttagaaagatgtgatgagaccaggtggtgatgga

SEQ ID NO: 424657 - DNA, 228 bp, Homo Sapiens
tctcagtaactgtcctgtcaccccaccctgctctcagcccccacggccatgcttcttaaagaccctcggcctgtgaaggccacatttcagtgtccggcagacggcaggctttcagcacacgatggccgaatacttacgaatggggcatttatagcacttccttcagccttccacatgtacacatatacatcaggcaagattaagctggcagggaacaagcccacgcat

SEQ ID NO: 424658 - DNA, 202 bp, Homo Sapiens
tgaaagatacgggtcctagaagcggcagagatctaagcaggagcaagttggtgcatgcatttggtggtacagtgtaaatatgtgtaactgatcacactgcgggcacgcctcatttgcgtgaaagtctgcaccagacttactaattgtagtagagttaccccccaacccacgaaaaaaatgctactcgggaagaaaattttca

SEQ ID NO: 424659 - DNA, 166 bp, Homo Sapiens
  misc_feature (57)..(108): n is a, c, g, or t
tatttaactcgtaagtcaggactacggctggctgggatatggcagctctagcttggnnnnnnnnnnnnnnnnnnnnnnnnnnnnnnnnnnnnnnnnnnnnnnnnnnnnatacattgcaataagctgtaacagacaatccgaaggttccctccagatacaaattctc

SEQ ID NO: 424660 - DNA, 128 bp, Homo Sapiens
acagctaggggtacacttgtctcccacaacaaagctgcacagtcgagatccaatcaaagaacgtcctggtgtgcttctacacctatgccccatttagctaggatttacttgaatgtatcgtatagggt

SEQ ID NO: 424661 - DNA, 163 bp, Homo Sapiens
  misc_feature (47)..(84): n is a, c, g, or t
gtattgtcgcccagcctgttctatgagcgtccacggctcaactgagnnnnnnnnnnnnnnnnnnnnnnnnnnnnnnnnnnnnnngacgccaccatgcccaggcacccagtttcaatatccttgtctctgttccccacccccaaagagatagattgaagttgcc

SEQ ID NO: 424662 - DNA, 171 bp, Homo Sapiens
tatactgtgtcagaagctcaatcaggaagaggtcccaaaccttctactggctgggacaggagtggctctttttaagtctagaaacacttgtgcccggactttctgtttggaccattgtgtccttttgagagaaggtagccctgattgttagtaaatttcagttaattgaag

SEQ ID NO: 424663 - DNA, 146 bp, Homo Sapiens
tgaaccccatatatgcttttctattcattataatacctagccagatcacatggtcttgtagcgaatacttatcaagtttcccttgaattgatgtgtcgagcttctaccttagaaatccgtaacattctagtgtactagctactatg

SEQ ID NO: 424664 - DNA, 168 bp, Homo Sapiens
tagcgcgtaatctactaacagtctctgatttgcctattccaaatatttagtataagtggaatcatacaatattcgtccttttgctatctggcgtatttcacttagcacaagtgccttcaaggttcatccatgttatagcatatgtcagaactttattcttttttatag

SEQ ID NO: 424665 - DNA, 165 bp, Homo Sapiens
tgcagaggcgttagccacaaatgccagcagcgtccccattggaaaacactttgttctgtaaccattttggtgcactgttactttcatgttcgctctgaggacagatctctgataatatacatctgtaaaatactcatttcagctctacttagccctctgaaagac

SEQ ID NO: 424666 - DNA, 504 bp, Homo Sapiens
gaggcgttagggtgcttcttacagtctttcaagaatggactttaggactccttcttcagcctttgatgatgtaaatggagttagggcctcagtttttctgtgatatttggctggagtagagcagttattgtctaagtgttttctctcttgctgggctgccccttttctagtcctttggccagagagagcaggcttttgtctcttctctttttatctgtgcatactggcatttctgggttgctggttcttcagtttcatgccatggatataggaagggagaagaaaactgagggaacccactaccacgttttcccttgggacacgtctgtcttatagaaaatgacctgagcttttagtagtgcttagtgggaggattagggggaaaggatgtttactccatcttattggcagcagaattcttctgagctatattaaacctggttaagacttcatgtatttaatggtcttgtctagtaaaatttctactatatggtattcgggatt

SEQ ID NO: 424667 - DNA, 430 bp, Homo Sapiens
aggacccgtcagaggcgttagttataaatgctcataattctcaagatttcaagttcatctcatgtcatgaaattttaagtgtattgaaggaacgtgtaaaacatcttgggcattttattctccaacttcttgctaataatactttttaaacatcagttctcaagttaagtcattttctactatgctaaatttcagcaacccaaggttgaggaaactctccagtagtgaaacaaagggaagaaaagtatgaccttctaaaattctccacaggcattgagtcagcatattttaatcactgatccttccccaaacaggtattattctctcttaaaggaaagagaaggaaccaagataagggccctactcgaagtttttcagtaacagggtcaagacaggaaaagaaagctccctgtcaaggtctatcctttgt

SEQ ID NO: 424668 - DNA, 618 bp, Homo Sapiens
cagaggcgtatagagggaaactgtacacgaaatacctaaatctgaaaattacaattcagtttaatagcatttagtgctcacctacaaatgcattcattacattttactaactaaagaggattcaaaaatgtgcatctttaggaagctcattattagggaggcaagatttatatatataacacaagacaaaaaattcaaacatgacagaccataataaataaatacatggttcagaaggtaaatgctacatgataaagttcaatttttggcatatttagacagttcgttagcagctgataactagctttataaaaccagagatttccacattgatttccggattactttgaaacaattgtaattaatcttgatctttgcagaaaataaactccttaggggctattaattgatgctcacatctcaaaagagggaagaactctaattttatcctataggaaagagtatgcccatgtggaggtatttttaccttgaagaattgtacacctttattatatgtctcagcatatgataatggtaagaaagtttgtaggtctataaaaaacaaatgtatctgtccacaatatctttgtaagagagagggcaatgggaaggacagca

SEQ ID NO: 424669 - DNA, 197 bp, Homo Sapiens
gtattgcaggtactttggattttattctgagtgagatatgaaggcagtagagggttttgaagaggagtgacgcaatccttatttttgtaaaagatgactctggagtagctgttaagaacgaagagaaggtagttgaagggagaaacagaaaattcaacaataataaatgaagacttcaatactctgctttctctctc

SEQ ID NO: 424670 - DNA, 204 bp, Homo Sapiens
ggcatgatgatgggtcgcaggatgtgtacctaacaacagtatactagaacgaagaatggtcaatgcttaccactcacaagaaatagcttttggaaaaacaaagaaatctaaggcagcactcctgcaacatagagttttccttctaacggctgacactgcaacagagtttttctgtcagcttctacctctaacaaaagcaacagg

SEQ ID NO: 424671 - DNA, 271 bp, Homo Sapiens
ggacaggtctcagataaaacacaggatcttaactatattgatggaattatttatcaacaggcaccttgctgagactcagagcactgactgcttttctaccagaaaacattttgaagacttataaacaacaagggtgatctggtatgtcttctcctaactggacacaattgtcttttttttaaggattaatatctgtggtaagttccactggcaactgtatagtcacatttattttgcaccatctactgttcaagcccctaaacgcctctgc

SEQ ID NO: 424672 - DNA, 145 bp, Homo Sapiens
gacagagatccaggcgttagatcagagagaggcatggacaagtgaattcctctttcccagcctccactgagataaaagcagaggcttccagttaccacttattgagtctttctctatgcaagatactatgctaaacgcctctcca

SEQ ID NO: 424673 - DNA, 182 bp, Homo Sapiens
ggtttacaagtgatggagactaaatctaaacctcgagcagtcttatgcttaaccactttgactgtgattcgtcaaaatgtgtagaataaacacaatttgcaaacatgtgatgtctcagactcactcctaagacggaattgctaaggtctctgctcttttattttaccttctctttttacttc

SEQ ID NO: 424674 - DNA, 160 bp, Homo Sapiens
ttacctacaggcactgaagtcagcgctggcagattaaccttacacaggcatcctggggcagtctagctccacacaacgttatagcataacaacaacgtggaagtcactcaggaacatttgtgcatttcagcaacaggctgccaaggaagaaacacacggt

SEQ ID NO: 424675 - DNA, 343 bp, Homo Sapiens
cagaggcgtgagagaggtgatagccatctcccatctccttctcctactgacgtcatcccacattttctccggagacaaataagggtagagttcctgggatagttttcaggctgcctaagataggagtgcagtggcctcccgagtccaccccacatctcaggctttggacaagtcgtcaaaagtgagagggaggtaatgaaataaatcacctagctagggttaaagggcaaaaagaatttggagactgcagctcagacccagatctatcctgggcatttgcagtgcaaagctgcgttttcttcgccactaccgaggtcttgcacactagcctgtgtataaacat

SEQ ID NO: 424676 - DNA, 293 bp, Homo Sapiens
  misc_feature (16)..(16): n is a, c, g, or t
tctagaggatccctgncagagcccgtttaggagtttttaagagatacctgcttctcaaggaaggacttgaatgcttagcaacaaccacaacaaaatatttgtgtagggactactatgtacctaccaatgctctcagcacattgtatacattacataaattaaagtaactcataacaaaacaatggctggagagtgaggagtgattctgatattttggtaatttatattcagtcaacagtggtcacagcttctactcactcaggcgtgggttgttaggagtgagaggactgtca

SEQ ID NO: 424677 - DNA, 335 bp, Homo Sapiens
  misc_feature (58)..(67): n is a, c, g, or t
ttctagaggatccctgcaagaggcgttagtgcagaggcggggttacagtttttcttgnnnnnnnnnnaaaaaagaggggggttggagtgtaccaatccggatccaaaacggaaagggaagacagttcccccctaaaatacttagaggggtttctcagagtcctttcccataaagggaatataatggaaccacatctcagtaaggtgagatgagatggctaaaatacttacagaacataaaaaaacagctaaaacaaagctcagtaaactctctcaccctcctatggatcccggtgggtggcggctcttttttcccataaacgcctcggcggggat

SEQ ID NO: 424678 - DNA, 324 bp, Homo Sapiens
aactttctcaagggtgaaggaagcatggagattcttaagaagagagacacttcctacctttcttttgggaagcactgtactgattctgatcagcagcgtacagaattggagccatagtagaaggaggtggagattggagagcgcctagctcagcacccttggcgactagttgtagccctgactccttggagtgatctgtatgtcactctgtatttggacacagctgtttcctcgggttgcatggtaacaaaccaaataatttgcctttaggctcttttgcttcactatgtctgtcatcttttacacaactaaacgcctctgcca

SEQ ID NO: 424679 - DNA, 332 bp, Homo Sapiens
tgcagagcgttaggattgaggggaaattgcccaatcgtggtccagaccctccatgccactggctgtgtgcaattggagtcccggacccagcgaccagcaagaccactcccctctcagggtgaccctgggcctccaggtcacaggtctccactaaaaaggctgcctcccctcaatcctagaccccgagttttcttttgttcacgtcattgggccattgccctatgtctctttggaagaaatgacctatatgaaaagctttacttctgggattccctaattccttcatcccttaggacagtgcagtttttcatctcctgatcttggatccagta

SEQ ID NO: 424680 - DNA, 449 bp, Homo Sapiens
gcagaggcgttaggaggcagaggctgtggttattttaccaaaaaagtctagttacatgtcacattcaccatttagagaactaaaccagtacacacacaatttccacatcaagacctgggctcccctgaatcatctctttctagacaccatctagcgcccagttctagttatgggaaggaggaagtggtgggggctggggagtcagataataaccttctgccacccttgcctctctgaaggccactcctttaccctggaatattggagaagtttagagagcaggaccagggcaagagccagtgatatcccctagcaccagtgctccagcattcaaaatcaaaccagccgtactacatcaccacaccaacctcagcaacaaccaaaacaaatgacagacaatgcaaaacaatcctcagcctgccactctaaaggtgaaatgagacatgtaa

SEQ ID NO: 424681 - DNA, 176 bp, Homo Sapiens
tgcagaggttaacacctggaggggtagaccaactatcgcaactaaactggttaccatttgagtgcacactatataccagacaccgttagacactgtgcagacgttctctcaaaacttttcacaacgatgacaggttgtaagacaggctgtgggtcttcaggggtcgcgggcatccc

SEQ ID NO: 424682 - DNA, 483 bp, Homo Sapiens
ccgtcagaggcgttagcatttccaatgaagagtaaatccgctgtggttgggttgatgagcgtggtcacagtggtgaaactaaatgcttggatttctgtgatcagatgtggtcatctccactcatcacttcctgaagtcactgcccatttcgtcctgcaatctgtgactctcacctttagacccagctttggaagcctaactgcagagacattaatgcatgtaaatgtgcaaaatatgtaattttgccccacaggcagctttggtgttctcatgttatagttcttaatctaaattgtaggtgctaaacaaaactacctgccttaatggtaggcagaggtatttgaaaaattaatgatctacttgtttgctgaatgtccacaatacaagctttgatttaaaaaaatcatgttaggatagtatgtttattacatactatttattatcatacttaatatttcttgcctatcaaaagtaaagacctga

SEQ ID NO: 424683 - DNA, 152 bp, Homo Sapiens
tttagaaactcctctgtgttattaagtccctgcgaatactcttgcacaacctgtccagtagacatgcccagccaagagaacatgccagcataaaagtgctgccaggcttgcctatcagtgctaccaagccatttgttttgcacttccaagaa

SEQ ID NO: 424684 - DNA, 198 bp, Homo Sapiens
aaccagcccaaaggctcctgtgcagcttcccagtgagaaaaggtgagactgtcagcaaagagaaagtgaactttgcccagctctctatgatcacatgctgccacacacactgaggattgagaacagatccaagggcaaccgcagacgcctaaagctaaagaaggtggtctaaggttgtataaaaaaatccagatgcac

SEQ ID NO: 424685 - DNA, 130 bp, Homo Sapiens
caacgcgttagttagttatgtcaattgattgtccacaggcagttacagatcagacccttattctactctatcccccttctcactaatgcactcgacaggtcttgaaaaaatagtatgtggctgcttgaat

SEQ ID NO: 424686 - DNA, 288 bp, Homo Sapiens
gttattaagttacactgatacatccaagtttatttaatatgcagtgatcagcacaaacattaatagagataaaatactgatgcaaataacacaccccaaagtaacacatgcaattatttaccaccattaacaatacagtagttacaatgacactccaaacagaaaagcaaagtaaaaaatcaaaaccccaatttctattcatgtaattagacttatacagaaattagaaggctaaataacaactagttaatcacctaatttcacagctatctgaagtggcgctcgtag

SEQ ID NO: 424687 - DNA, 176 bp, Homo Sapiens
tacgagcgcaggaatagaaaattagaggatctgcaatataggtagagcggataacattttaaagctggagaaggcttttactttgcgatctggggaagtagccaggttgtaagggagaggatgttgaatttcaagtgcaatgtgggaatagcaactagaagctggcgtcgtaagag

SEQ ID NO: 424688 - DNA, 142 bp, Homo Sapiens
tacagcgcatatcttgtagtagctaatatcaagaattgtttaaaaagagaaaactgaatttgtcaatcattctaaaggagttcaattagtgatcccccatcaaaaattaaatatttctaccctcatagttacactgttgtta

SEQ ID NO: 424689 - DNA, 189 bp, Homo Sapiens
aatgaggcaatatcccacagagagttaaatgactagccgaggatcagccagataagtagagagtggaactgggataccatctcaggcagtcaggtaccagagcccatggtatataaccagtaagctctcatacataactgtttgtaatggttaacttttgaactgaagcttatatttgaattttccaaa

SEQ ID NO: 424690 - DNA, 139 bp, Homo Sapiens
ttacacagcgccaggtttgtactttaaaatgctattttgattacaaagtttacttcctggcctaactttcctgggtaaatgccctgtgcctagaggcagtgcggtgaggcttatggctttctttctggttgtattaggt

SEQ ID NO: 424691 - DNA, 275 bp, Homo Sapiens
gcgacagagacccctcctacgagcgcacagtcacctgagaatcatcataagccatatgaaacgctaactcagactttcatagccactgatgacttttaaacatattcctatctttctctcattgcatttcctttgactatgcacccacacagagatggcgcctggttctatgaactgatgcatggggggaataaactcacagatgaatctgtaccccatggaggtccctgcaactgttctgatgctgaggccaggaccaggcttgcaagacttgg

SEQ ID NO: 424692 - DNA, 446 bp, Homo Sapiens
acctagaggatcccctcctacgagcgcaattacagttagctcgtcacttctttctacagtagttgaactcttaattttatatgagtaggtgattgacacttggtcataacttaaaaggtaccaaatgctgtaagtgaaagtctcctttccagtactgtgctttagctataagtttaccttgctaataaaaaatctgatgttatccattccttggaatgtcttccagaaagttagatatagcctttgtatgtccaagcagatgattatccccctcccccttttaaaatctgtagtgtagactaatgagattgggatatatcatatgaataaattgtctgatttaatccatcgacagtgtcagctccaccgaaatagtgatgtttggttggttcatcgcgctatgatttcgcagattctagtaacagtcgccacgtgagtataggaag

SEQ ID NO: 424693 - DNA, 120 bp, Homo Sapiens
agcccacaaaacagtaatagagaagccacataagcagatgccgttaggagccctgactatttaagaatgtaaacaacacaattttagaaccagtggcgctcgtaggaggcgctcgtagga

SEQ ID NO: 424694 - DNA, 296 bp, Homo Sapiens
ctcagaggatcccctcctacgagcgcagatctcattaccccttgtgaactatgaacaatatagaactgttatacccaaatggaccacatattctctcacttctttgcctccgctgatctctctagaatgctctcttcaaatgcctgggaactccttgtcgctcattaagatgaagcttaaatgttacctcttcctttgggaagccattcttgaccatttcaggctggattagctgcccttggtggacacaaacatctcccagtgcatggttctaacagaatatttatcgaaacggt

SEQ ID NO: 424695 - DNA, 138 bp, Homo Sapiens
cccgccatgtactgacatgagtgtgttgccacagtatgcaacgaaattcgatctgtgcaggaatgttccctgacttacctcccactgttagctactctcttctgagtgctcacatcactcattctccagggaacacac

SEQ ID NO: 424696 - DNA, 102 bp, Homo Sapiens
atcgtacaggaacagatcaggtaggcagcataatggctgggctgaatagggatgatgacccttctctgggattgttcatgagcaatgctggaggaccgaaga

SEQ ID NO: 424697 - DNA, 201 bp, Homo Sapiens
taaataatctcacttaatcgagtacctcagaatgacactgtatcgaccataccaggaacgtatgcaatatacctgactcagcacaagtcagttctcctatcattaaatactagaagcaacaatcagatttagtcactgctttcagtgagcttggtcataatatggaaaatggtaaatacataatcacatgattgaaagtca

SEQ ID NO: 424698 - DNA, 101 bp, Homo Sapiens
taactgagtgccaaacactcataatgaaaaatgatgagagatgtattaggtctaggatgatagtatcttccacagtatcttcctctgatgggcatttcagt

SEQ ID NO: 424699 - DNA, 162 bp, Homo Sapiens
agaggatcccctactacgtagcgctaggtgggtgttgaaagtactgagtgtatgaatttattaaacagtgatttagggatggattacacttgctaccttttgtcaactgattttctaaaaactttttgaattagtaggaggggtaccgagactcgacattcg

SEQ ID NO: 424700 - DNA, 300 bp, Homo Sapiens
taactgtgagcgcgaattctaccattgctcgagttgatagccgaatgccagtcgttaacagtaaagatgctgccaaatcctctcccatgaggctgcgacgtccggctattccacagtgacgtatgagagtcctcgtcccccacagctacataaacaaagcatgacagcaaacctgcacgatatacacatcacacagatgagaaattttatctactttacaccttttctcataggttagcatttttatccccagctatattgtggtataatgcgcataaggtactgctgaatgtatcgttc

SEQ ID NO: 424701 - DNA, 462 bp, Homo Sapiens
gtaggtgtcgtcgccgctgtctatccagtgggttaccgagcacgatctgttagtcctgtgcatcggagtcaccggggagtcagacgccggatcttgggcctctagtccaggagatctctgcatttccggcttgggaaaatactggcttaacaattctttccaagtgattttggtgcacacaatagttagagaataatttctgtataagattttttctaggctgcctttcatctacaaaatccaatgcatagcttagacaagaatatagtaggtactgaatcaatgtctgtgaaaggcaaggagggagggggaaaaaagaaagaacattttttaccacgcagtgctccagagtccagagacaatataaaggcactaaatacacactctaggagcttagaatgtatttagccaagaccatttaccctcaattacaattctgagaaaaaaatagaagcaagcaga

SEQ ID NO: 424702 - DNA, 273 bp, Homo Sapiens
gttgggggtatgggaaagttgcaattagcatagcacgacagccgaaaagaattacaattgcagtctcccactcttggtgccctcccgcggcatgcgtaggcatatttcttaacaagggtgaggtaaaacagaatctgcattaataatactattagccaatgttaattgagtgctcactatgtgtcggggagtatctaagtgttttaataatatctcacctatcattcagcctcatgacattaacacttcaataacagctctatggcgtaggag

SEQ ID NO: 424703 - DNA, 167 bp, Homo Sapiens
gtggattggggacatgggatcggtgacgcggggaatcttaaaatggtttccctcttagattctttttggccaagacttctctaatacttattttttataattttatctggtaggtatcttagtaagtggctttaaatcttttggcaagaggggcagatatgatacgt

SEQ ID NO: 424704 - DNA, 408 bp, Homo Sapiens
acacgagtgtaaattgatggctagggaatccctaagctggggtgtctctgatggctgagcagaagaccaacaagatatgtttccaatgggaatatttggagaagaaaaaggcacaggagggtgagataagctcccacacaccccaggctgactgaaataccatgcatgcacaagaaccaaccaacctagtgcagtgaaaagtgaaaacaagggagacgtgaaaattgtctgcaactctgactgcattctccaacccataggaagattacttggtagagtgaggaagacttagagggcccaagatgttgagcataatctttgccacaattatcgactgatcattaagctgggtgtgcacatgaataatctctaagaaggcaggctaacaagtaaaacaaggattaaggt

SEQ ID NO: 424705 - DNA, 443 bp, Homo Sapiens
taacgagtacgctcagtctaacatacacttccaaccaaatcacaatatatgtaatgtgaaattgtcagaatggcactgagctaagagaagtgcctagtgtacacattaacagtcagcagttctcttgctgcagatgggagtcatttcctggaaaagtggacactagaagcgaaaaagcaacgttagccatctgctgccaatagacaacacatctttatgaaagttaaaaatatatattattaatttcatgttgccttgaaaatagtttccctggcaaaactaaagccaaaaattatacctccaaataaaagagcaaaagtgaacagaatacttttaatactgctgggttgtgattttgtatactaataatattgtacttattcctattaaaagtatgccactgaaacaaaagcaattaaatcaaatgcattcacacacacacc

SEQ ID NO: 424706 - DNA, 194 bp, Homo Sapiens
ctgtctagaggagtcccctcctacgagcgcagtcaacttccagaattgtaagcaaataaaatggttgctttttaagtcattaagcttggcacagttttattacgtagcagtaaacaaatcatataaaaaaatacacgcttaattcttgattatctatactaatagagtgcacatcatcaagaccaagacaatcg

SEQ ID NO: 424707 - DNA, 125 bp, Homo Sapiens
cgaggatcccctaaagctagaaacctaggcctcggaggctttagccagttgccgacaaactgaatgacagcttctgaatggctcctctatcacttccccatacgaaaacctttcccacagacacc

SEQ ID NO: 424708 - DNA, 223 bp, Homo Sapiens
cctatggagtatacggtgggaggagcaacgccgtttctctttggagctgagaaaagtcaatctctcatttacctatgacaacaacagttcagttcctcatgcaaatacatagacaacccaaactgagattcatttagggagaaaaagcaatagagaagaccctttaggatgcatctcttgaactagaattaggatccttaaatcacagccccctagaagggag

SEQ ID NO: 424709 - DNA, 254 bp, Homo Sapiens
agagacttgagctggccctttgtgcgtcctaacagtctagggagggagtagatattaaagaatcacacaaatgcctatacaattacaattccaacaagtgctgagaaggggagtgacatggtacaatgagagcatagaatagggaggatttgacttcaacaagaggactagaggtttctgtggggaggtctctgctgatccttacgttcagaattctctccacaacatccctacctggttaacacctacttata

SEQ ID NO: 424710 - DNA, 201 bp, Homo Sapiens
tcctagagcgcatctgaattatttcgaccaccttattaaaggttgtcctggagaaaagtagaattgggatgaccttgtaaccccagacggaactgaatttttgaacatgccttagactagctttgaaaaaagtctaacttgttaccaagtcattcttttaaggaagaactgcgattgatctttcccgggcgctcgtaggag

SEQ ID NO: 424711 - DNA, 186 bp, Homo Sapiens
atatgcggctttgggcatgagcgaccatcaagagactgactgaccagtcactgcaagttttctaccgtagaatgataggaaactggtcccttgatgtactgtcttcaggagggacattgggctggctgatctgagctggaaattgatcttttatcttactgaactggcgctggcgctcggtaggag

SEQ ID NO: 424712 - DNA, 188 bp, Homo Sapiens
cagaggattaccctacgagcgcattcctagaactggtgtggttcttcctacgagcgccacctcaagtgccaagagatcacttattaaattaaaaggatttccaagagtcagggacgtctctcccagcctgggggtgtccttcccaaactgctacattcccaagtaaattaagaagtcccagccctgaa

SEQ ID NO: 424713 - DNA, 314 bp, Homo Sapiens
actaggagctgcatgtaaggtatgatattgggcaaaatcccagtcttagtgtgttctagcagtgtgtgctctggagtataaacaatgcctctgagtttgagccacctcaaggcaaaggtgctggtctttcatagccctgcagtcactcagtcaatgactaaaagcctccctagggcaatgtaaactgccaggcgcttctggttctctgggcccatgcacaaagtgatgccagtcacccaaagacagtcctcaagagtcacagatgcaagctgttaagcacacaatagctataggatgggtggcgctcgtaggag

SEQ ID NO: 424714 - DNA, 113 bp, Homo Sapiens
ctagaggatcccctcctacgagcgcactttcatatatgtccaacgttggctttccccaccaatcccctggatagcacttcctagtttttctctctgtcctcttcgctcttttc

SEQ ID NO: 424715 - DNA, 389 bp, Homo Sapiens
cgccagtttaatctctctccaaggtgaaaggcaaagaattctatactatggtgtttcattttggcttcatcttaaaatttctgggaaaatataagcagaaataagcatgtttttgcaagacaatcaactggataggtagccaggaaatatcaagtcttaaatttaagaacaagccttaactcaattagagctccaattaaaaagtggaatattcaggaagcattcagccttccccaaaagaggttaagaggggaatggagagatcagaaagcaatggatctccactgggatgtccatagaaggataggtttcaggagaaaaatagacattttactaatcacctcataacctcctaaggcaggtgtctaatggcactcgtaggaggggta

SEQ ID NO: 424716 - DNA, 297 bp, Homo Sapiens
tacgagcgcatgatagatgccattgttcgcaagtttctattttctttgtctgtacaggttgtcctgacttcgtggctgggaggaaattgaggatgctgaagagtacttgccgtttggccggtggggttgagccagtcagctggctcctgttctcccatgggcccctatcggggctgggtcctgtggctgtaggagaggggccacatagaggcaccgttctaagttctgtggggggacagcacagttcctctggtcgccacacatgccctgtctgactcatctattatctagactcat

SEQ ID NO: 424717 - DNA, 278 bp, Homo Sapiens
ctctagaggataccctcctacgagcgcatgttgaaaggcaacagccaagactgccatgtggagaagcagcccgggccacgtgggaagaccatgtgtaggtagctgctccagttgacagctgagcccaggcaccagacttatgagttgagaagcttccaggggattccagcccctcataattcaactcactcccagctgttggagggccttcccagcagaggcccagccatcacagagcagagacaagccatcccttctatatcatggcgctcgaggag

SEQ ID NO: 424718 - DNA, 163 bp, Homo Sapiens
tcctacgagcgcacgtgactttcagatgttccactggacagaaatgtaggtgaaaaatctgagcctagaatctaatctcatgtgacatattaatagaaaggtttttttgcaagactttcatatatattgaaagcatactgcagcaaaccgccactgtgcacat

SEQ ID NO: 424719 - DNA, 142 bp, Homo Sapiens
tagtgaataaaccagaatttgctcaagattcttcaagatgtaactaactttccaaaagacttacatgcattaggaatcctattagcgatacatggaagtcttttcaagacaatctcaggaatattaattattctaaatgcta

SEQ ID NO: 424720 - DNA, 647 bp, Homo Sapiens
  misc_feature (74)..(125): n is a, c, g, or t
gctgcccagaggatccctcctacgagcgcaaatgtagttctgtgtagtacctgtggaaacatcttaaagaagtnnnnnnnnnnnnnnnnnnnnnnnnnnnnnnnnnnnnnnnnnnnnnnnnnnnnagaatagtttcaaaaaaatacatattgatcacagtgtaatgccttggatttatgtggccttgctatactactatataatttaggacagtaactgctagctggggtgtgagttatttattggaagctcctttttagggtagaaaatttgaggagaaatctgaagtggcatgatttacccgcagaagtcctggttggggatagtagatggtgttgaattctctggcccagataggtgagcattcctgactacagatgtgtgttgagtggttctggtgcctgcctcattgtcattttcatagtttatgaagtaatcctggggagctgagacggggagtgtatccactcactatacaactcctcattggactaggaagatagtccagtttctactctgcttctatttgattggttaccttgtggcaggtatttaaaacaggcatttcctatcaacaggtaggcctctaatgtgagcaactgatcctcttacatactgcttaaatcagagaactgttgcccaagaac

SEQ ID NO: 424721 - DNA, 447 bp, Homo Sapiens
gcctggccgagacattaattttaatatctacctcaacatatcatgataaagataatctgagtattgaaaagtgtagtttgctattaaatttatagtagtgaactccaagataaggtatagaaagacaattttgggaattcacattttcttaatctaaaaaaagaaatacactaatcttcaagaataattaatatacacactgcctagcggcccttggtctgcatgtcagtattcatttctcacaccccttctcaaggtctcctgagggcagagtgggaatccaggcacagactggcagtgacaccatcactccttccctttccggctacactgtttagtttcaatgatacaaatcgtctcaaaacagaaagtggtctaaatatattcctgcaaagacagtcaaaataatattacaaataatattgggcgctcgtaggaggggtaccg

SEQ ID NO: 424722 - DNA, 220 bp, Homo Sapiens
  misc_feature (56)..(139): n is a, c, g, or t
acgagcgcaggtttgccaccgaacagttgtaaattcgagaatacccgccaatctcnnnnnnnnnnnnnnnnnnnnnnnnnnnnnnnnnnnnnnnnnnnnnnnnnnnnnnnnnnnnnnnnnnnnnnnnnnnnnnnnnnnncaactcacggaacagctaagtggaaccagatgcaccgatgaaaagtatgccctggcgtgggagattggcgctcgtagagag

SEQ ID NO: 424723 - DNA, 137 bp, Homo Sapiens
cacactgtatatcatgagttctagtaagctgcatctacgcaaatgattaaaccccgaagagggggtcatgaggaacccctgaattagtaacaggattggatcaaaagtgcaggatgacaaccttaggacttgaccat

SEQ ID NO: 424724 - DNA, 114 bp, Homo Sapiens
cgatctagaggatcccattagcacactgtacccggccagaaactttcttaaagctatttaaaaaccgatcatttggtcctcatttcccattttggctttgtttcttcagtgtgg

SEQ ID NO: 424725 - DNA, 190 bp, Homo Sapiens
tctacgagcgccacatgaggaagtagaagggtagggaaaggctggtgccattatactctaaagctccttccctgcccagagaaacaaacatcaggaatatggaagaggcaccccctctccaaaggcctgcaggtaggcatagtataatgttgagtcctgaaaagaaaagttaaaaatatttaaaggaggc

SEQ ID NO: 424726 - DNA, 186 bp, Homo Sapiens
  misc_feature (58)..(82): n is a, c, g, or t
tcctacgagcgcatctcctcgaattaactagacatagatctatttatctttcttttcnnnnnnnnnnnnnnnnnnnnnnnnnggggaaaacatttttcccctttcccccccggggggaagggcggggcacaacccttggttccgggcccccaaaagagggggttcccgccccaaattccaacccct

SEQ ID NO: 424727 - DNA, 438 bp, Homo Sapiens
ggatgtcttctaacattacctacacaagtatggtaataaatatataataggaagacactcaatacacattgtggtggctaaatgaattaactgtcttctaggtctcaacccagatctaataaatgagaatcttgggattctcagacattgctttattgggagagaaaacttgctatttatgacccaaatagcacctcccaatcccaacagctagttaggacaattgggacacaaatcacctttaaaatagatattctctgttcttaccacagaatatgtgcttttgattggagggttaaacagtggggaaggtatagatgaaagaggagtttctaacattttcataaaggaatgcctgataacatgacaatatagttcctttaattattcttaaatgattaagcatgtataactatcagaagagcttctacataatca

SEQ ID NO: 424728 - DNA, 245 bp, Homo Sapiens
tagaggatcccttatctttatacactactgaaatcagattgtatcaagtactttacctgggattctagcatctacatgaaattggcctgcagtctgccttacttacacttttaaggtcagtttatggtgtcaagattataactccattaaatgaattggaaagtgttgccttatttcctgtactccataagaatttgcgaaagattggaatgcatctgtttgttaaacagtttcataaagctgtc

SEQ ID NO: 424729 - DNA, 328 bp, Homo Sapiens
aagtggaaatggatccagcttgagaatgtcacagccatttaccccagtcacagcataggtagcgaggcagatgcacgtgtagaacgtaaagatcctggttcatcatggcgcagcccagaagtttctgttccatgtgccccattctaataggatctgcagtcacttgtgcccattagcaccactccaagaagcccacacaggtattcaaatatgcttgtaatctgatggagcgtgtttcataatgtagtctgcagaccacctgcatcttaatcctaaaatgatgattccggaatcagaccctttaggggtggagcccaagaatattcat

SEQ ID NO: 424730 - DNA, 171 bp, Homo Sapiens
gaaaacaggtatggaacaagaataatcattaaacctattagttaaatgtaaggtttagtgaaaagtagtgaaaatgagaatgtaaagtaaaaagaggttcttgagaaagatgtctcactggggtagtttttaaaatgcacaactgaaactttttaaaaagaacttttattc

SEQ ID NO: 424731 - DNA, 188 bp, Homo Sapiens
ctgtatgaccagattaactaagggtgaagcataatttacatgagatcgtgatgggctcagaaagcagccaatatacagaaagcccagggcaggcattgcccctgaggagacagcgaaggcaatgggaccaaaggctatgttaaggtagacttgagctccacccgtagtttcactccttaggtaaagcc

SEQ ID NO: 424732 - DNA, 314 bp, Homo Sapiens
ggcagcacactatttccagatgggcatgcaagactgttttatttttaaggagagctttcgacggcttgtgtcttattacaaaagtactatttgaccattatagaaactgccgaaaacagctagcaaaaggaagagtataaaacagccactaatcctattacccagagagaaccactgctgacacttggggatctccagagttttgcatgtgagtataaagtatatggtagcatttttttaaaaatgtgatctcactgtgcagagtggtttgcaaccactgtaccatgaacacccatccgcgtctacatattcat

SEQ ID NO: 424733 - DNA, 298 bp, Homo Sapiens
ggactgaccggaggcttcgccctatatgagccctcgcccatgatgatggggctgacggagaagcacagggccttcacccacttcctgacaggcgtgcgcaccatcattgggagcatgtacacagagactgcactcatcgatacactcatctaccactcagcacgagccatacagagaaaaatcgatctaggcaggacatcgtagccaccctcggagctacctctgactactgtatctccctggcctgcagctgtaccgcagcctatgccaccctccaccttctaggacagccacagcc

SEQ ID NO: 424734 - DNA, 378 bp, Homo Sapiens
ccgtggctacaggtgactacccaccgccagaccaggctagctccaatttggccctttctccgccacccggacacacccactgcgggaaccgaggacagccctggccagttttggggcgagggggagctaatgctgctgcttcttccagttccaggcccgagcagggaggcggatccagagtttcgcccgtctcagttcgacgcacgggactcctggcggtggagagggcgttaaagccgtatctagcgcttagggaccccggtgggctgccgggtaccctaaacttgggtcggggtggtgatgtcacagacgcttctctttcagcgctaaccggtggccttgaagggatcctcgaaaagccttaaagcgggaggtgcc

SEQ ID NO: 424735 - DNA, 225 bp, Homo Sapiens
actaacacctgtgtcagaactactgtaaggaccctttcctcctgcgagaggagaacagtgctaggcctgtctgaacgtgatagacatgctacaaactgccaaccctttaggctataaactgctcacacatgggccaagtgtcactctcataagaaggtgtgattttttttaagctgccagcagccttgaagccacctgggactgcacagtatgtctgtgtgtgcc

SEQ ID NO: 424736 - DNA, 355 bp, Homo Sapiens
tcaacagctgtgctctggttatccactgctgtgtaacagccaagacagggttgatgaaaacaaaagccccggtcaattccatgtgaatgtctgaatgtaactttacagtctatgtatttaaaaccatgtttatttcttgttcctcaaaaccagctctcccctgtgttggggaacagctccaccaccgcatcatggtgaccttgcatgtatccacttaggcagagtcttggcagaacgcctcatggtcttcctggatgtgggaggctgggaagcctgtgtacatagccattgtgaggagatcttctgttcacctccttatctctccctggaagctgtcatgagacagtttctcata

SEQ ID NO: 424737 - DNA, 216 bp, Homo Sapiens
acacaggatcaagaagtaggtaaacttctgaaagctcagcatactagaagcactcaaaccaggaatatgccaacaacctgatgcactgccaaaagaaaacgtgaagttttcctaagagttgtattttagtacagcggcgaaactggaaagggcacttggggtttattagaacgaggcagagtataccccaatgtcccttcctctaaatgcagtgga

SEQ ID NO: 424738 - DNA, 302 bp, Homo Sapiens
cctcatcttgaatacttctaagacaggaaaatactgcctttcatggtgggtatgtcatgactggatgatagaaagccgcttacagtggaaatctgtgcttctgcaatttctacacttttatttaggttctgcctttcgaagtcatacaaaataaatttactctttctattccatataatagtactttatatatttgacaaggttcctgaggtcccctttctttttattagcttccagccttttagcatttttgacattcctatctatgatgcttaacgctcttagggtgtgggtggcggacc

SEQ ID NO: 424739 - DNA, 310 bp, Homo Sapiens
ccccaaccgcctctcagccatgcgggaggccttcgccaggagccgcaggatcagcaccgacgtgtgacctgggcccgcccccgggatcctggccttgaaggtcctgagacaatggggggattcctttggcacacccacctggccccaggccccaagtggggcttggctgagccctcctggaatccctgtcctcaggggaggcccaggcttggggagcccccaggctcgtggcagggataaggctcattgaacacaaatgtgtcctggggggaggcacagctggggcctgggtctagaaggaccaggtgac

SEQ ID NO: 424740 - DNA, 141 bp, Homo Sapiens
ccgctgggccagatggatcaaaaacatctcccttaccactctgtcatggtccaaaagtgtcaaccatgataagctgcagcctattcaagaagtacaaatcagaatgtggttgatctagaagctataacatgtgaggcactg

SEQ ID NO: 424741 - DNA, 448 bp, Homo Sapiens
  misc_feature (344)..(344): n is a, c, g, or t
tgggcgatcaaataggggtgacagaacagggcctgaattattaacaagcaataggttggactccagtgctcacattagttgctttgatcagtcagctgcttattagcataatccagagaaagaaaggacctgccttgttgtaccctggatgctttcttatcctgatgattgcctcagaatttgcatctgctccttattcaattgactctacgtttgcagctgcctgaaactgcacctaccttttggctattgtgaataatgctgctatgaacatgggtatacaaatatctgttcgattccctgctttcaattcttttgggtattgttggactgtgaaatatatnattggtctttgttccaatttcctggcatacaactcctaagatccttggaatctccaaagtgatgtctttttgtgtgctaatgagttgccagatggctggcagct

SEQ ID NO: 424742 - DNA, 119 bp, Homo Sapiens
gtatgtgtactgactgtcgtggttgctcatggagttgaagcaggataaagaaggaagtaaagttatgaggggaatgagaggacagtgaaaggcagtaagatgacagtagactacagtag

SEQ ID NO: 424743 - DNA, 621 bp, Homo Sapiens
gaaagtggaaaaatgagatttatggttcttttaatgcaccacaggtctgtctatacaatccctaccttttagttaaggagcacaggttaaaatgacttgtccaaagacaagcagcttcagtggcttgtcctaggtcccttagaaacaaagagataatgagataataagagagaaaaaaaagaatactcatgaattgattggtcaagaaataacttctataaggatttatatactattggttctaagactatcaggtaatggacgatggttaagttaaccaagtttgttgaaggtgaagtgtgacataaatgctataaatgaggataatccaatggtctgcattttcatcgatgcattttcaccaactaactagtctgctcaactaacaggtgacttgttagcctgatgccgtatgtaatgatgacttacatttctttcatcctgaaatgtcatctggtctgctttacaatgaatagaaacagctcctgagtctgtgaggctgacacgtgggcataaattgtggctgtgaggtggccccataagggccacaaggcatattagaaggtccttcatggctacacatatagatggcttaaaggctgaattctactggctaaagcc

SEQ ID NO: 424744 - DNA, 175 bp, Homo Sapiens
ccaggtgaattcaggcggttacagtaagtacccacaggcacacacacggtttgggcattcccggaccgaatcttatacgtgcctcagcccgcagaagcctgcaccctatccatggaaacagaaagtattaacagaaggtaccatggaggagaagcatgaagacaagagaagaatg

SEQ ID NO: 424745 - DNA, 288 bp, Homo Sapiens
cgtcaagatatacgtggttcactatggcaagtcaagttcatgcgtcctaacccaatccagtgggggtaaatgaatgcgctgaaagagactggaataaccacgttgataaggatatcacaatgtaattactgaaaagatgccacacttaatgaaactggaattttccctttttttctattcttctgagactagactgccttggtactgaggagacacccatccccaatcccagattcagccaggacctgactctaactaatcatgatggctgattattccagctggcta

SEQ ID NO: 424746 - DNA, 399 bp, Homo Sapiens
accgcaccctccccgctcccatctcttaaaaagaagagtcaaatctcagaagggacttggaaaactgcacgaccaacttttagttgtgctgcacacgcagcaagcagctgggcaacaggtggcgaggcatttgggttcaaggaagttgttttgtttgtatgctgcatgcagcactaacctcaaacacgtggaggccattgttgcactaggcagcatagaagggcaagtgctgcacgcaatgtcttcaagtcaggcctccagtcacgtttccttccattcattttcctgagcctgcccccaacaatttaaccgggacatctgatcctgtaccaactcccctgctaaaactatcataagcccccagttacttctgtaagaatttacaatgcacctggctac

SEQ ID NO: 424747 - DNA, 348 bp, Homo Sapiens
tgtgagacaggccgcgcagttaggtagtttggagcaagggcttggaagaccctgctggagtgtggaagaagtcaggcgactatgggtagtggtgcagcagccatgtactggtatctgttctcaggcagcccttgcgtgctcttccttacccaccagctccactcccagctgttcagcctatgctaaccggcccagccaccagaagctcttgccaccagagtcctaggtggagagtttgacagtaggggcttgtttacccactgggcctgggccatactattggtcacatgtgacattctgagtcttctgttgatcttagacaagtgatctacagtaaggtttgcctgg

SEQ ID NO: 424748 - DNA, 296 bp, Homo Sapiens
tatgagctagggaatacagtaaacaggcatatagcaacaggggagatgcaagaatggagaagacaagttgttcacgaatcctgcttctgttccctcactgtctacaaggaccacatggaacagtgaaaaccacacaggcttgaaccctatcgttacgacttcatggccttatgaccccagacaagttccagggatgatgctctaaccataggcttactatgtggaatagaggaaaacagacgtgaaccaaagtgctcatgcatggagctgtgaactacaatgctggcccctcaggt

SEQ ID NO: 424749 - DNA, 453 bp, Homo Sapiens
cctagtcagatataaagctggagaggtaggttctgcccctaaagatcgaaggtttggcagtctttcctattgccaaaagaacgatgtcggaggccacatccatctccctaggtgtcgatgtgacgctgtctccacgaactggtttgtgggggagcagactttgccacaggaccgtgtttgagttccttactctttacacattctcagaactctttctccccctgttttcctgccactttctataactaccgtaatcatcctggatgtgtagatgcgagatccacacagtgccctggctcaaattttacccaggacactctcaggacagggttaaaatacgaccccaatcttcacaatcccaactctgctgggatgagttgccaagtagaggttggcattgtggcttccgaggacttgacctgaattgagcctctgtctccgctcacctggcta

SEQ ID NO: 424750 - DNA, 320 bp, Homo Sapiens
tggaatgctgcgaagaggttaataatggtcgtttcatgaaaaggattttgtggtcatgtaagtttagcaaatgccaaagcaagccgagtgaaaggtgttgttatcatctctcctaagccgcttttctttgctgacctgctgagggagtctgcaagaggcgggggaggaaatgccccttcctgagctttcctgcacccagcaccctttccatggaacacctcccaaggccagtatacgaaggatgatgctttgggagtgtggtgtctggcaacctgcgtctgccactttctgggcatgcacgtctggcacgtcttccttgg

SEQ ID NO: 424751 - DNA, 382 bp, Homo Sapiens
ggattatatgtggaatggtgagtacattttctaggtatgttccttgggactcctgaccaatgtcagcatgtccgcaatgccccatctagattctgccctgaaagagccaaacaggagagcagtagtgtctgccacatctttgtggaatcctgcccttttgcggtcaacctcaactcagggaaagtaaaaagtgcattagaacctaatgaaaatttcaaaagatcttgaaagatgcccaccagcagcagacagtgacatgatcagtgcccatggccaggcatatcacggaggtgtgcagtggccacgagaaacaagatgtttgtaaagcactctgagctcttaactgtgaagagtcagagaggcagaggcaccacagtcctgg

SEQ ID NO: 424752 - DNA, 103 bp, Homo Sapiens
tgaagagaggctgcatccaaatgcagcacggggcagacagaaacacagttctcgccaccaagatccccgtgctgtctccagcagtgatcttcaacccaccacg

SEQ ID NO: 424753 - DNA, 121 bp, Homo Sapiens
gcggtatggtcaccctgtagtatctaatctgtatagatgtgtagacatgcctcgttacctacttccttacccctccctgtattccttacctcttgccatattcttaatgtctgtaactatt

SEQ ID NO: 424754 - DNA, 139 bp, Homo Sapiens
gctacaaaaaatttcaagctgaatcttcactaacaactttatatggtttgatgtttcctgtgttgattgttgagaatgcctggccactgagaaaccaaataggaggcaaattttttttgcaacgagcctccctgccggg

SEQ ID NO: 424755 - DNA, 303 bp, Homo Sapiens
atagctcctttttctagtctaaccagtggctggatttgataatacatcttgcactgttttgatgagaggtgatacggtccaggggttaggagccagaaaggtctggagtcagacaaacttcatcatcagacctgagctgccacttcctcttgtgtggtgatcctcacaagccatgaccctctctgatcaaagtgtccacagcacttcaggagactgaaagcctgtgtctacaagcactgacaagtgggacgctggaggcgttcagtcaacattgttcttaataatattgtctgtcgccgggtg

SEQ ID NO: 424756 - DNA, 317 bp, Homo Sapiens
gcccgactctatgtggatccccgcgaaaggtcatcattgctgaggggctggcaagtgtagcacagaagtggtttagggtcatggatagctgaagccacacatggttctgtgtttctgtggagccatgcaaggaggtcctcacagaattacttgagaccaccgctccttttaggatccaatagaattgcaattctgtggtaatattggatcggtttgaatgggccatacactctggatggtgtcagctacgatgtagtgtaaggccaaaaattaaggcccagtgtgatttgccacctggatgcctggtcatattggta

SEQ ID NO: 424757 - DNA, 305 bp, Homo Sapiens
  misc_feature (98)..(231): n is a, c, g, or t
gtgtacaagatcacggcgtctttgatcaaaccacataccaaataacaccaaccacaggtctttaccatcaactgagctcgcgatcagcaagacgatgnnnnnnnnnnnnnnnnnnnnnnnnnnnnnnnnnnnnnnnnnnnnnnnnnnnnnnnnnnnnnnnnnnnnnnnnnnnnnnnnnnnnnnnnnnnnnnnnnnnnnnnnnnnnnnnnnnnnnnnnnnnnnnnnnnnnnngggaggattattactgctatcatattcacagctaacatttatgggcatgcttataatattccagggacttcatg

SEQ ID NO: 424758 - DNA, 265 bp, Homo Sapiens
caactggccgtgcgtagcacactatgttctactgcctccgttatcttcatcatcctgtttcctctatgtgggaatcctccggagccccaggcctggcacacgtttgaggaaagaaataaatgatacaggaagattgccaggtggcatcatagggacaaggactgcttcatctgtggggtaccactgctggggagagccagagctgagaccctggatggagcagggtaccaggggttcccacgaggccatgcagcctgagatcagg

SEQ ID NO: 424759 - DNA, 294 bp, Homo Sapiens
  misc_feature (156)..(156): n is a, c, g, or t
  misc_feature (240)..(241): n is a, c, g, or t
actctacaggatcttacccggcacacttggcaggcgcagagtagaaccagtgactgcctgaaatctttgggctccaggatgacggctccctctctgtcatcctcccacactctcttctgcccatcccttcttccatggatgggaggatcccgttgnacccgtgccgtctttcttgagctttgtaactggtaaatagagtctgcaaagattcctgctagagcctagaaagattttgctctnnttctttgcgtggtagctatgtgtgtgttcccggggtcctgggtacctgagctc

SEQ ID NO: 424760 - DNA, 165 bp, Homo Sapiens
  misc_feature (59)..(120): n is a, c, g, or t
aagcgcagagaaattgttgcatgggtgtcctccagtctaggatgatcattaccttatcnnnnnnnnnnnnnnnnnnnnnnnnnnnnnnnnnnnnnnnnnnnnnnnnnnnnnnnnnnnnnnttgtgcctattcgtgtgttgccggggtccgggtaccggagctcga

SEQ ID NO: 424761 - DNA, 197 bp, Homo Sapiens
  misc_feature (126)..(139): n is a, c, g, or t
gtgacccggcacacacattaatatatacaaattttacttaaatatgcctgaaatttaagaacaactctaaatgactattaaaaatatccacacattaaacttttggtttagtagtaaccccgatcnnnnnnnnnnnnnnggggtcccggacccgaattcggaaaccggggcaaaagtggtccctggtgtaaattggc

SEQ ID NO: 424762 - DNA, 284 bp, Homo Sapiens
gaggattccggacccggcacacagtactaaacatttccggcaagaatcattaatggatgctacaactagtcggtgaatgttcaataaaaacaggatactcatttccccataagacacttactaattagcaaaggagaaatattaacttgaccgtagtgaaaatgggcagaccagctcaacccaggatcagagttcccatccccagtgatgggacagacaccgtcacccacttcctggtgggatataccaacagggactggccacatcagtggtgttgccggggt

SEQ ID NO: 424763 - DNA, 366 bp, Homo Sapiens
attagggaccggcacacatcacggcatagtaggtatgtcttatattgagtggacttccagataggtagatgaggtaaatcacatttctgtttctagcaaatcatttgacaaagtcttccccagctgactcatcagtaaagcggtgcctggctgagtatttacttaggttcatgcacagatagcccaagatccaaaaacagtgatgatgaatgattctgcggctacctaaactagctgtccagtggaggggcacaaggctctgcaccaggtcctgcctacagaccaatgaactgaagggaggcttagaaggcacacttactacattgcagatagaacgaagaaagaatagcccagtgttgccggggt

SEQ ID NO: 424764 - DNA, 214 bp, Homo Sapiens
caggaccctaaccactgtcgtctacttcccctgggatcctgaagattctggatggcaggaacgagctcttatttgactattttcacccctggccatgtgctcagcacatcagcacgtgctcgatggatgtgcaggtgcacatttgctttctgttgttggaaaatctcgaacctcatttctaaaatatcagttttcccgagaaaaaccttaatga

SEQ ID NO: 424765 - DNA, 170 bp, Homo Sapiens
ctaaggatacctctccccctcacactggtatgattcatgactgatatgggtagctgtaatttttctaatgtccagttagaagggaaagaatttaaatttactacatgccaatcatattccaaagccatacttagtattaaaaacacagaaggagtccttttacatttaac

SEQ ID NO: 424766 - DNA, 132 bp, Homo Sapiens
ggatcttaaccactgtcgtctacttcccctggatctgaagatctggatggcaggaacgagctcttatatgactatttcaccctggcatgtgctcagcactcagcacgtgctcgatgggatgtgcaggtgcac

SEQ ID NO: 424767 - DNA, 367 bp, Homo Sapiens
agggagaaggggttgagggggctgggtcccatcaaaccagtccgatcccctctgcggcagaactaagatcaaattaaccgccttcccgcccgacagtcctgctcatttatttcgtattttactttcttccaggctgacgtccatctcctcaaatttctcaggaatgtggggaagctcctagccctgcctgcctttctagagggcttcttggatttgcagcttctaacaagttgctctcgccacggagaagctgttattatgacaaaatatttggggcattatcaaaatcacacaggctgctgggctgctgtcggtttctcgccagggccagtaagcaattacatttggagttgctacgtgttgtttg

SEQ ID NO: 424768 - DNA, 129 bp, Homo Sapiens
gttattctaactgggtgttcatacccaaagtaacccacaatacaggctggccttaactggatggtaccatccctttctgacactgctctggagcccatgggcgaaatttccagctgcagcaccacaggg

SEQ ID NO: 424769 - DNA, 197 bp, Homo Sapiens
cgatctagaggatcctcgaggtgccttagaatacattgatgaacatatgactccacctacaaagcatatagcagtgaaatgagcaccacgactgtcttatttttactgaagtcagaatcaacagtaaacttgtaagggccaccacagacgtgtgactaccgggacagacatttgtccaagggcaaagtggctcttcc

SEQ ID NO: 424770 - DNA, 304 bp, Homo Sapiens
  misc_feature (136)..(179): n is a, c, g, or t
  misc_feature (199)..(199): n is a, c, g, or t
  misc_feature (252)..(252): n is a, c, g, or t
  misc_feature (271)..(271): n is a, c, g, or t
  misc_feature (273)..(273): n is a, c, g, or t
tgagtgccttagacaatggagtgggagatgttgttggagacagagatcagccaggatttctttcaggtaagactctaggccttcatttttgaggcatccttggtgttgtggataacagtgcctggtcagtggtttnnnnnnnnnnnnnnnnnnnnnnnnnnnnnnnnnnnnnnnnnnnnctaccagtgtgggagttaantaatacctgtctctacagaatggttagtgacgaagttaagatgagttgagcancgatatgttgttcctagtnanccaggtccctgttatatataggaaactattt

SEQ ID NO: 424771 - DNA, 106 bp, Homo Sapiens
accagattcccaaaattccccctgaaaaaattccagatccttggccaaattggtcaaaatggccggggtggggaaattaaatcccaaaaaaacctttgggaggtgt

SEQ ID NO: 424772 - DNA, 541 bp, Homo Sapiens
gcattagatgtcatacatatattataaatacatgtgactgtcatgtcttccatcctgatcttagagctattgatacctaacagatgtctaagtcacattagacatctattagaaaatgaggctctgttagaaattgccaaggacattggatactggtaaacaaacaatgaatggacatatggacaaacattaatcatctctaccactaactgagctctccaatgcaacaggaactgtgctcagacctttatgatagtacagtttcatatagcgggagagtggaagtggttattatccccagtttacagatgaagcaatggaagctcaaagaaggaaagtaactcaccaaagagtccagttaacgagtggaagggtcagcaattcaaacccatatctgtgcaattccaaagccttgctaatctaccatttcacactattctacatcttcactcagctcaggattccaacaactataatcaagatgagccttacctgcctatacacaactggctctctcctattccctggtctcctccacctc

SEQ ID NO: 424773 - DNA, 177 bp, Homo Sapiens
aggtgccttagaatataatacaactcggtaagctactcaaagataaacaatcctcttagacatgtgtatcttaataataagacggtagaagtctttttcattggttaaatattatctgcttatttatgtgtcatgcttcatattaattgggattatttgaggagttttaacttgtgc

SEQ ID NO: 424774 - DNA, 142 bp, Homo Sapiens
cctatataacagaggaggagagagaatcagctctggattgtgttgagcagctttccataaagtggatggtgcactgatacagtgcttgagttcttggcaggtcagaaacggcaggatgcaaagtcagatctaagggcactcg

SEQ ID NO: 424775 - DNA, 175 bp, Homo Sapiens
ccccccggtgcccttagatttataaaatttatggtttgtcagattactatgaaagaaaagccctcagagtggaaatctggccacgataaaagtctacgaatgaataggaagttttcttaaaatgcagtgcttaaatatttcagtgagaaaaagatcttaggatctaccaagttgg

SEQ ID NO: 424776 - DNA, 443 bp, Homo Sapiens
cgctggcgcctagaggatccccgaggtgccttagaaggcggcatatttaggacgtatattattttaaacacggtaactagaacaagctctattttgaaataaaatgcagttagatatatccctgagccacacaggctctgagggtaagaaattaatggttacattccattttatactcctggcgtttatcagaagaaaaccaataaaatgtttgtgagcttagcaagcattcattcatgttttggccaactggtgagtatcagatacatattgtacaaccacctgaaattaggaaccaggtattgtatgaaggggatttggcttaattgttcatttaccctctgtcacgagtctgtttgggggactgatgagaagactatggaccttcccactggaagaaaatatgagatgacctcagggacaggagacactcaaggacctcg

SEQ ID NO: 424777 - DNA, 298 bp, Homo Sapiens
cggtgcccttagaaccacaaactaaggagaaaaagaccgttttgatacggagtagcaccagagactggcctccacgccgtccccaagctgaagcttgctgtgcggggttctcgtttctcctgggggagggagagggcctgccggctgtgcctcctctctgcaccctccttcccctcccagatttctggtggtcaagggcacagttcatcctccggacaggaggggaaggagtttgggggtagggccccacctcgcaggcaccttaccaagataagcagaatccactcactggcactgc

SEQ ID NO: 424778 - DNA, 262 bp, Homo Sapiens
cccccggtgcccttagagtttaagatgaaatggtccaggctatgtttataacgttaatgtaaaatgccacacatgcaacatatttagggggataaagagagaggctgatatttttctttcttcttacatcgataaatcatccctatacattcaagcaagtagcatatgctttcagttcatagaattagctgtgtaagcttcctggagcaatacacagatgtaacagcataggaatatggggaaagtaactacaaagagtgat

SEQ ID NO: 424779 - DNA, 152 bp, Homo Sapiens
ccgaggattccgaggtgccttagatacagaacatgcctctgacacttgggggttgaatgtatctagactggaagaaaacttccatcagcatattcaacgaacaaaatgtaagtacttatattatccaaaacacaagagaaatggataacagg

SEQ ID NO: 424780 - DNA, 282 bp, Homo Sapiens
aggtgccttagagatacaaaggcaccatggccctttggttagaaagaagagattgtggaggctggatagaggcctccacaggatagacaggagtcaagttgtttttatgaagaaatcctggaggaggcaagctcatcacctaaagaaatgaacattatcctcatatcagagcctggaggctaaacactggttccagtatttctcattaccccattccattcccatctctggaatttagatggaatctcagcctcctctccataacctcagggtctaagggca

SEQ ID NO: 424781 - DNA, 507 bp, Homo Sapiens
aggtgccttagacacctccttcgtactcccttcatgcccaaaggccacttgccgtgcaccggattggcagattgacctcactcatacgttcccccataaagaaagtctgatatctcctcacgatggtagataccttttcaggtggatagaagcctttcttactaccactgaaaaggcacacaccattgcctctaccttcctcacacacatcatcctttgattcagcctcccctcatctatacaactggacaatggaccagcatatatctcccaagtcactcaacaggtttctaagtctttaaacatcatatgggtttatcacattctctatcacccccaatcctcgggtcactttgaacaggcgaatgcccttcttaaaacaacagttaaccaaactttccctagagatcaacaatgaaaactgaatatcacttcttcccttggcccttatgtgcctcagggccctcccccgaaaacctctaaatctaagggcaactcggggtaccg

SEQ ID NO: 424782 - DNA, 359 bp, Homo Sapiens
atggaagttaggggactgttctttcagcatctatttaatgaatctgctgtatatttgatatcctaatgtgtcccaacactgaactcctaatctttcctctaaaacctgttccacctgcagccctctctatttcacttgatggcagttatatccttctcgttattcaggataaaaacctgagactcattcttgtatatcctcttactcttatatcccacatctaatccttaagggaataatactggcaccactagtgaaatatatcctgaaatctgatcacttataccatctaaatcgctaaagtcatctgtacccccacctctcttaagtgccaccatcatccttagcctagatattag

SEQ ID NO: 424783 - DNA, 302 bp, Homo Sapiens
cgagttagtctgcagaaattttttttacattccatttcaaacactgtcttgaattaccagacataatataaacacataaggtgccaaataacctattaatctagaggaaactttttctttacaggcttcccatctattcacaattgtgctgcagagtgtatgatgtcccctaaatatgcaggtggaattgtttttttgcctatttggtatatgtaattaactgtagtcgcttctagaaaggatagacaaaatttctacaaacttcacagagaaggaaccaaccatttacctcttcactcgaa

SEQ ID NO: 424784 - DNA, 300 bp, Homo Sapiens
cacgatccccggttttcgagttaagcgattatctactccatacccaagatcataccatctatgcgctatatatattgtggcccatagcttctatcctacggataagatagtgaaatgctgttcccccacaacctttctctctggaacttttaatttcatcccgagttgacgaatgcgggaatagcatgctttaagacccttgcatccaataagctaagaacttttggcccattttttttgggccggtaggttggagtgtgtgctgttgttctgcctttatcctcgcttctctctaaaccc

SEQ ID NO: 424785 - DNA, 416 bp, Homo Sapiens
cccgtatttcgagtgaatgtggctagaaagggttatgagatatattaatttctacacatatttacttgacctttaaactcttcatgtaaaattaaagaaagacatctttattcatgcatccattatcggcgaagcaatgttctaggcattgttaaccagaatctgtgggcggagattttaactaaagtgtgaagctctttgaagagagaactttgtcagcacgcatattgaggcagcttaaatacacaacaaggtcccagatagagcattataaaattatgaaatatttattttcttatttggttcctagtggatactacaattgagcaaaaacacaatgtgagcttcgatactacttattacacttaaatcgtatgtatattgcttcactcgaaacccgttttgcgtattggtcg

SEQ ID NO: 424786 - DNA, 229 bp, Homo Sapiens
gggaggtgtgggagttagaagtaagtattgtatgtggtactaccagtaagcactcaaaaactgctcagtatctggaggaagccaattttctcccttgattcagttagtatttcctcgttcatgtttatctcgtgaagggtaaaccaacagaaaactcctttcaaaaactgaacaaagaagtacctcagactacttaacctgcagtgttctcctgttagcttcactcgaa

SEQ ID NO: 424787 - DNA, 271 bp, Homo Sapiens
taaatatatctgttcatcaaacaaaaggaaccagtttttaaaacatctctcatcattattctaagatttttggttgttgctgtgttggtagtataaatcttagggaaaattactaagctatgtttgttccatatgactttacttttactttatttcagataagtaaaattttataattaaagcactatttaaaaatggcaacttagttgaaagcgagaacatatctgactttttcttaaactctagtaatataagttggacattagatctg

SEQ ID NO: 424788 - DNA, 421 bp, Homo Sapiens
acgatactcttgaaaagcacgttctattgttcaaggcccatgatgattagagaaaagcctcctgacaagaattaccaggataatgcaggagtcaggcaggcccagactggagaagcggtaactgctagcgtctcaggaggaaggaatttcaagccaggaggcttcagaggaggcaagtggcctgtgagctctgggggggtcagtgttgagtccactggagacacggtggggtcaccggaagcaaatgaggacatcttctggccagaagggactcagacggggctctccggggcgtgtggagaagccaggcccaaaggggcggggcacggctgctgggcacagtgctggctctcgagaaggggccgcagccttcagaggcctcggcctgcccatgatgcttctcggccccttcaggaaatct

SEQ ID NO: 424789 - DNA, 375 bp, Homo Sapiens
  misc_feature (221)..(240): n is a, c, g, or t
ttagtgtattttcactaatttgtgggggtggggataggtagaggccatattcatagtactttgggcagtgttctctagaaaatttatagtacttttcgtgttattatacactatcacctattaaggtaagtatttggttaaagtgctgtagaaatggaggtgatgagaggttctcattgattacataatttcctatatagtattaactcataatgctttcnnnnnnnnnnnnnnnnnnnnctgaagttttttcttaagtttgttatttggttctgtggattttttaggttccggtgtgttaattgtaagttgccgcccattcttggagcctacctttagaaattttacctttctgaactgtgttttcttgttctt

SEQ ID NO: 424790 - DNA, 264 bp, Homo Sapiens
tgtgaagtccacctctgacaactgtcaggacttgatgacacatcctttgatatcatccttacccctggcttcaccttactgtcttatttgtattttcggtttgcaccaatggcctccttaatgtttgagggagctgtgctagatagaactctaaaagctgctagcaataatttttcaagcaaggcaaagcataatgaaaaaaattaatatgcttttcaaattctattatctctaattcccacctcactatgctcttcactcgaa

SEQ ID NO: 424791 - DNA, 277 bp, Homo Sapiens
cgggagtagtccagataaatgtacggatcacattccttcagtgcgtgccactacagtctagcacacactggcgcatttctgagaatgttttgtaagctcaatagtggtgatggatatatagctccatatatttgtcatcactcagagaatggtccacgcagaacttgcgtcacattctattacatgtaagtcataccttaaaaaagctgatttggtgacaaagtttaatttatcttgtggatcgaatagaaaatccaaatacttattaaacgtggaa

SEQ ID NO: 424792 - DNA, 426 bp, Homo Sapiens
ccccgtggatagtcaaaaaaaatttgtaccacaatatttattatgataagaaatgatcctattccccattgtgaaattctcttcatttcttatagtatttataattttattatacagaatgctagggatttgtctattagagacgattaacagctaagaggatttcatgtgtttccattatttgttgtcaatctgtgtcattttgaatattgtatacgactttcacttggttttataaccattggactccaaactgcacaataagccatacgaggcagggtttcctggtttgtagagacatgtccttggtctatgccaataataaagccatctccctagcttttgtttgtattcaggtaaatgaagtttatcttggaaaaatccaaaaaggcaaaaataaatggatttattttcttgctgctgaac

SEQ ID NO: 424793 - DNA, 275 bp, Homo Sapiens
actacaagtgctcaagaaggacaagaaactatgaactactgcaggctctctccatcttattgagtcacctgatgcatctgacctttgtatgttactaacaattctccgtctacagctggatgggataattcaggctagactgcttacaaacactaacggttaaaccgtcaggctggcgttgaaattgccaccttggctggcttagaatctgtctatagtcataccagtactgttgacggaggccattggcctattctacaggacagctttctcgt

SEQ ID NO: 424794 - DNA, 484 bp, Homo Sapiens
tgtcctccagcaactctgagcaaatcaacattctttgtctttggatggggcacgtatttattgactccagtcatttggtcattgcacagcttctctaagagaactagaagttccctagaaactgtatatcacaattagttctgagaatactatttcaaacaagaaagttactatattgacattttttaaatcatccaaagcttttatttttaactcagtgttcctgtttaatacattgatgatgatggctggaggaaggtggtgtgtaggaaggaaaggatacattgctttctcagccacagccgctttaggaaacatgccatcccccacgtggctgtaattagctgtgggcccacctttgagtctctgtggagtatttagctgtgcattcccagacagcctgtaaatccccagcagcaaagggtcatggggccagaggaaatggttctcccaaggctagggggaagggaggcaaggaagacac

SEQ ID NO: 424795 - DNA, 221 bp, Homo Sapiens
cgtgagtcagtcaaggtcacaaacctgagtgactagaaaacttagcagcatcactaacacccagttgatgacgtggaactggtgctctcctgggagagagcttcaattctcaacctactaagttgaaggtgataggtgctatatctaagtggcagacagagatcagggcataggtgtctacaggggcaagcatttggagccaggcagaagcaaatgcagct

SEQ ID NO: 424796 - DNA, 100 bp, Homo Sapiens
gatcatcatattaataaaatatactctaggaaaccaacaaattaggatcatattttaaatatcatgactactctaaaactctgccaaggtatttttaaaa

SEQ ID NO: 424797 - DNA, 309 bp, Homo Sapiens
gtttgtgaaaattacatctttttattgagaacaaatacatcaattatctaatctattaattatatccttttggggatcggagggtggcagttaggtttaatatatttataatttcaccttgttatgagaaaaatcttggactgtaacgttcctctctacccacaaattgggaatgtgcctagagaccaaagaatgactcagactagtccagcttggcaagtagataacgtttattaagacttacatatatgagaaggcatatgtggttgggaaaaatataagacttaatttattgggtacagaccgtcg

SEQ ID NO: 424798 - DNA, 164 bp, Homo Sapiens
tctttgattaagagtgttacacagtatacttagcatttattgagaatattctcccaaatggtggcatttgcagtacaagtcagctaagattgctagtgctacttagaagatctcaagcaattcaagatgtaggattaatctccataaagactggacattggatc

SEQ ID NO: 424799 - DNA, 195 bp, Homo Sapiens
cgacggtctttacctacttcaagtaataagacactttcctttttttaaccataatatttacttttcttacactttcatctttattatgcaatctatatggacttggttttttcaagttgtggaaatagggatcaagatgtatattacctgtgaatatccaactgagtcagcaccatatattgaacggggtaacag

SEQ ID NO: 424800 - DNA, 439 bp, Homo Sapiens
agtcaaaatatttcttatcttccagttggggaggtgttttgggacaggaaagaaagggagatagtaataccatcccagagaaagaagagaagtatttgcattttgttctctagagttgcagatatatgctgtatctcttctatattgtaatacattgcacaggagattccgtgaaggaaatgcagtacaatataatgtgtgtgtcttcctctcatatgcataaaggaagacaatacatgttggtaacatggatttgcttgccttgaagaattttcaaggtgttattcattccatctttatatagaccgaatttactgagctgaaaaagatatgcatttgtttccttctgtggctgttttttgaggatgctgaatccttcccattttttgccctggaggatatcaggccatgaggcgattttttatttattatttctgaa

SEQ ID NO: 424801 - DNA, 258 bp, Homo Sapiens
acggtctgttacccggcctgatacattctctttttattcaataattagatctagttctagtatagcctgttgaacatagcaattcagtgaggtgattattaaagtggagggcaccttaaaagatttatggaagtcactgactgtatggctgtgctaacttacattttagtcttcggttttctattattactcctcatggtttggggctcttatgtcagagattgagttgaacgtcactatatagagggtagctctata

SEQ ID NO: 424802 - DNA, 421 bp, Homo Sapiens
gtctaatgtttcctacgatacaaagctcagtgacttaagctagaaaccaaactgtttcacatgattcttacactcaccttaccctctcttaccaaacaattaccaagtcttgtccattctacttccaaaatctctctcaaacccacattatccacattatactttcctgcatatccacattatctttcctgcaatcacttgctgagaatataatagtcttctacctggcctaccctaaacctacttttgtccctttactaatattactttccataccattgattaaataatgttttaaaatagaaactctgttaaaattcttcaatggataaagtataaaatccttcaccagtgcacgcctttcatgatctgatcctcgcttatattcccagcaccatttcacatcatttttcttctccat

SEQ ID NO: 424803 - DNA, 103 bp, Homo Sapiens
tgtaccgggggctgggacgcaggtacgggatgacagacaacgccgattcatacgtgcatccaaactcagcaagatcagaaggaatacgtttcagtgttatttc

SEQ ID NO: 424804 - DNA, 322 bp, Homo Sapiens
cgacggtctttaccccccagttaaatatttctggaaaagagttctgttcacaaaaaattttggaatcaagggaaaaccttattaattaagatctttgataatgtggattctaaataatttcgggctaagttgaatgaaaacttaccttttcacccatgaaaaaaggagctctgtaactatattagtagcacaaacgggttcatgtgaatgtttaccctgcttaagagtaaacttttcagagttagcagcagcatttgcatacaataaatgttctaattactaatgatccttgccaattaattaaaagtatgtctgtcatggc

SEQ ID NO: 424805 - DNA, 135 bp, Homo Sapiens
acgtctgtaccaacgagctagaattctaagcagacaggaaccatgagtctagaactacagaaatcagtatttctccttcccccatattttatcaatctaaattttccagagtagggaaaggaagaaatggttctt

SEQ ID NO: 424806 - DNA, 360 bp, Homo Sapiens
actcaaggcactgatttctgcatcttcagcctcctcatttcattaactattaaaattaattccctgtagagataatttgcatcaatcaacagaatagaagaattagaagagcttctgaggcttttctataactaaaagagcaattcttttattgactaccataaacattagatttactaaaaggaaaaggtgttttaaattgaaccacccctctaatttattcatcttagttctgacaacatgtaggttagagttactcatgttactgaatctaatttaaaaagtgagagggaaagtactgaatatttttcctctttgaaattacatgttgtttgcaatattagcctgcctgtatttttc

SEQ ID NO: 424807 - DNA, 420 bp, Homo Sapiens
ctgtacaattcacagctggttttgtctacttgtttctacgtgtgttgccatcaaatagttcttctgtaagggttatgccctgaagaaaaataacagaaaattttatatatatgaactctaataagataaggacacatactgcactttgcacagtcatgagttatgaatcaagatttttgcggtcgttggaatagagagacgaaagtagcagaaaaatggagttagtgcatggtgcacggtactgaaggcggggctgatatgtagccatagttcctgaggcagcctctggagttgctgatggctagtgtttgtcctgataactctcaatgtcttttctgatttgttgggactgtaccatcctggctgtcaaatttctgagtatcaccctgtgtattcctctgccaaacccaagagaacttg

SEQ ID NO: 424808 - DNA, 366 bp, Homo Sapiens
cgaggtctgttaccggctgcaatcatcatatttaatggtgaagtgtgttcacactaagatcaggaatcaagcattaatgttgattcttatcactcttatttagcattatcctagaataactagcttacctgttaaggtattaaaaaggaataaaaggcataaacgttgaaacagatacaaaaaatttttcattcacagaatatgagagtatgtacattgaagaatagttcaacaactagatactagtaacacacagtttaggaacttcagaaaataaggtcagtatttttaaaaagcacttgtatttctgtaacctagcagcaaacagttaaaaaatgaaatacatatttatactaccatcaaaaa

SEQ ID NO: 424809 - DNA, 449 bp, Homo Sapiens
aatgtgtccgaggaaaccgaggaagaggactatctgggcaggaaagtctgtgtttgcaacagttatggagtcacaagctgtgggtagaagcaggagttagagttatacatggggagagaggagcccagttttaatgacagaaaagctaagaaggaaaacactgtcacgcattatactagctccaacactgagacagtgtcttaactgacgagggtgaattgcatctacatccattttctttatgagaaactccataacaaagacagtggaactacaggaaggaaaaacggcataacaggagtcatctgagagtttattactgtatggagagcaggcaggcaaataagaaaaggagtagaaggaagttctagagggaagataccttgggctaagggtgctggtaagctacatagattctataaagtacataaggatgggatgccacctcc

SEQ ID NO: 424810 - DNA, 399 bp, Homo Sapiens
actaaatatttaaaagcttcaaggcaactgataaaagtgaacatcaagacaggaacacagttaatttttaaatgatgtacaaagacaaaaatgccataggaattctatcatgtgcttaatataggagaaacttaaaatctttccttggtatttccttcattatactaacaacccatcttgtattactgatgttgtgaaaaattatctaaaacttagaaatagtcaaaaggaaagggttagtgagtatccttttatttacccccttaaggagttatgtgatttactaggcgtatgtacctctgtttaattaactactcactattaaaatactttacaattctgtaaaaatagaggttggctggtagaaaacaatgctaaagattcttatctaagagccat

SEQ ID NO: 424811 - DNA, 133 bp, Homo Sapiens
tattgtgtccgagaagagtgaaatttaaaattagctgggacaagaaaggtagaatatatgacgtagagtctcatgagtctagagaagaggttcccaaattttctacagtacattttttcactgatgcccttag

SEQ ID NO: 424812 - DNA, 179 bp, Homo Sapiens
gagggaacagacgaagccagatgggtctggaggtccaggcaggagaccagcctgtaccaagaccccatcgtggagtccttcaccaatggcaaaacactgatgtgtggactgtggtgtacactcatggcattcaaaatgttcccaagtccgaatcgaaaacataatcctgcacatgtgtg

SEQ ID NO: 424813 - DNA, 348 bp, Homo Sapiens
ttatatatgcaggagcattttagactttctcaaagacgtgattatttctgagggaagataaataggatggaatcagaaaggaagaatagggagtttctagtatgcctgtggtatcctaattcttatcctagatgttgtcacaaaggtatccactttataacatttttattttgtcacattatcttgcagctacccaatatttaaattaaaatattatgtagatatatggtagagtttaaattttgttttaaagcaaattcttctaagtaagtaagggaaattactcaaacttgaggaataaattcccaaaggaaggaaagcatggtgtgttcaggaaactgaaataat

SEQ ID NO: 424814 - DNA, 194 bp, Homo Sapiens
aacattagagaaaagagattatggatgctagtgctttataccttgctccctttgctttcttgttctccttttcctttagtgtcaactcttttgtcgttcatatcacacttgtttccgtagttctttctttccacgatcttcattggcatgctcatctatttgtctttgccttttgctgatcctgcaaattttgg

SEQ ID NO: 424815 - DNA, 150 bp, Homo Sapiens
ctaattagcaggaaattcaagtgtctcccccatagattgcttattagctgcaagtagaaaaccagcaatttatacagtggagaaactgggatcaaattaacatcactaatgagagacaaacaatatcacgtgcctccagatgtggtctct

SEQ ID NO: 424816 - DNA, 294 bp, Homo Sapiens
  misc_feature (82)..(248): n is a, c, g, or t
ctaacatttgcaggatttatcaaatacccatgattctgtccctcaatgtaggctgagtcatcccctcttagatgagaggttnnnnnnnnnnnnnnnnnnnnnnnnnnnnnnnnnnnnnnnnnnnnnnnnnnnnnnnnnnnnnnnnnnnnnnnnnnnnnnnnnnnnnnnnnnnnnnnnnnnnnnnnnnnnnnnnnnnnnnnnnnnnnnnnnnnnnnnnnnnnnnnnnnnnnnnnnnnnnnnnnnnnnnntgctggacagacctacatctgtgagccagttgaggcagttgctcac

SEQ ID NO: 424817 - DNA, 109 bp, Homo Sapiens
ccacatttgcaggaagatcttaattggattatagcttgttagttggtcgtcctcaattagttcttccttatcagttgatactagaaaatccatggtgggtctggctaat

SEQ ID NO: 424818 - DNA, 166 bp, Homo Sapiens
cacatttgcaggacatacttcatttgtatataatatattatttgtaaattaaataaggaggctagtatattaattgaatgttgtatagatctcgcactagaaatagaagtacttctagagtatctgcatataatacaataaaatagtttacctatgacaattagtt

SEQ ID NO: 424819 - DNA, 322 bp, Homo Sapiens
ttaaattcgctggcaggtggagtctctccaatctcatcgaatttagttgagacgagggcgtttgctatgatactcggacgtggcatgattaatgggacaatcttatcaaatatggcttccacagacacaccacatggcccgccgtggacttccgtacaactcactggaagaaatacacatatttgtcctttgcaagcatcctcagaaggccagtcattgtcgtttctagacgacatgctgcgaagtttggagtcaggttccactttcgcccctttgagagtgggtggaatttacttggccgtctccactggtcctgcccagg

SEQ ID NO: 424820 - DNA, 292 bp, Homo Sapiens
agccgcccccatatttgcggagtgtatcaacctctgcttctagtgttgtctacatctaattcagggtcgccataagtgcgactcaatgcgttcttggattgcatatagcatcttccactcagtgtccactagctggacttgtaaattctcaatctggtcagttttcacttgcttgtctaccttcatttcctttgctcccagtatcatagcatcaaccgtggtcttggtatccttcaatgactggatagtgtaattaacttgtttcatgtagaatgactcttgggtgcgatcg

SEQ ID NO: 424821 - DNA, 367 bp, Homo Sapiens
  misc_feature (62)..(296): n is a, c, g, or t
taggaaaccctctaggagcccgggaggcctctgcttctgggggagcatgagagaagtggcannnnnnnnnnnnnnnnnnnnnnnnnnnnnnnnnnnnnnnnnnnnnnnnnnnnnnnnnnnnnnnnnnnnnnnnnnnnnnnnnnnnnnnnnnnnnnnnnnnnnnnnnnnnnnnnnnnnnnnnnnnnnnnnnnnnnnnnnnnnnnnnnnnnnnnnnnnnnnnnnnnnnnnnnnnnnnnnnnnnnnnnnnnnnnnnnnnnnnnnnnnnnnnnnnnnnnnnnnnnnnnnnnnnnnnnnnntacttgtaaacccattgaaatgggtaaagttgtggaaagaagcacattattctgagctttcaggtttactg

SEQ ID NO: 424822 - DNA, 295 bp, Homo Sapiens
  misc_feature (228)..(228): n is a, c, g, or t
  misc_feature (247)..(248): n is a, c, g, or t
ccggatcatgatttgtatttttgtgtggagctctaaggatgagtaagatgctggataacaatgatatgcctatgggcctatccttttcctttgcttaggagacacattccactcccatgaagaaaggttcccagcatgaaggtcagagcctgagacgagaaggttggattagaatagtcacgacagcatatatgtcctgtacgagaggtaggacccagtggttacctnatcaaataacggtcttctnngctgtacgcttgaaaggacatcttctatatatgcgcaaggtaacatc

SEQ ID NO: 424823 - DNA, 182 bp, Homo Sapiens
caaagtgtcttcaaaacatagtagtaaaaaaccagtatcacaaaactgagttacaagaatacttatatgtaatatacagtgcatcccttacctagagaagtctcattaacaacactcacattattactagagggtgcattattgcaatagctgcaccagggcacagggaagggcaacaatca

SEQ ID NO: 424824 - DNA, 185 bp, Homo Sapiens
  misc_feature (122)..(140): n is a, c, g, or t
tgcaggacgtctgaggactttacatgatacttcatggattgggaggtttttttactctaccctattggaatacaaactatcatagccttgtgtgagagtttcagaaattatttggcctttgnnnnnnnnnnnnnnnnnnnggttggcaatccctttcccaacccccaggggtttccctcccaaac

SEQ ID NO: 424825 - DNA, 303 bp, Homo Sapiens
caggagcacattggttataagatatagtcatttcagagattaactgtgaaaaagtacatcttaaatcagtgagatacagtgtttcatttgtataaggatatatttgggggttttgattgctttaaaaacatttacctttattctgtatcctttactcctagccccaggtgcatgtcagtaattacccacagactgcctttttcaagatctacttaagagttttagcgcatagcagaaagaaagattaattgccaaagccattaattacagatggctttgcctagttagtgctcctaattagtt

SEQ ID NO: 424826 - DNA, 303 bp, Homo Sapiens
tcggcaggacaaaaaacagcgctgctttgagttgtttattctaagaaaatactctactttcatttagctgcttttgtaaaacttcattagagataaagaacacaggctctgtaatgaaaagacccaaattcaggtcctgtttcactactttttaaaaagctatattgcacagaaatcattatggagtgtagtgggtagacaaaaacagattagcagatagattaacatataaaactgcattttgtatttatcttacccaaacttgttttctgtagtactccccatgttggtatataggcaact

SEQ ID NO: 424827 - DNA, 234 bp, Homo Sapiens
cccctagatgcaggaccattaaaagtatgtgatgcattagcacattcttattttgtgataagagtctacaagaatcactcttaaattatggcagcagcctatccccagttcctgggcttaaacacaatatgacaaaagaatcataagcaatgtgttaattagcctgtttctgattttaccttcaattccacatatttcatgattttcaggaaatctgtttattctttgttattc

SEQ ID NO: 424828 - DNA, 404 bp, Homo Sapiens
catggcaggactgtaatattttctttccacatttcctagatgaaaaaaacaacatactataatgggcttccagtgtttgtttacctaacatgttatggtggaagaattgtttgcagtcatttctttatgtagcttattatgaaagtaaaaagcaggaagttaagagaaatgattagaaatgattacttcaagtgataatgtattcagtattcatacttttgcagaatgctttaaattattgcactacatcactttttaatgtagagatcattgtgcatttacatggtttaaagatattaatttcacattttcccaattaaatacaaatacagtacctcactttattattagtcccgtaaggatgtagagaccatatcttgtttattattgtttctccaacacaa

SEQ ID NO: 424829 - DNA, 429 bp, Homo Sapiens
actgtgttcagatacaatagcagcataaatcgagctctgctttcttatcacagtgaagcagctgtgccaagggtgtgagacacctccactccatgtacccaaagctttcttattctcagtgtttgaaatagattcagcttcaggtgagtgagtcttttgtgccttctttttctctgactcctatattcatatccagaaatacctatgaaaaacatcaaagaaaaaaatctatctccctcccccaaatccaaaggctaatcaaaataaaatccccagaaagactggattagttaactgtgttctcaaattgaatttgagcttccgaataaagacacatgaaaatgcaattaaattaaatctaatgcagaaacattttactaagttgagaggcaccacaattttaataaaactgtgggaaattatgctatt

SEQ ID NO: 424830 - DNA, 151 bp, Homo Sapiens
aataaatatatagcaaactttcaacactacataatttgttccaacatttgtttctgcaatctactataatgttttctatatatcatctaacaatatttgctgacaaaggaatgcatttaggcttcatcgtatgctctttcttttgtattgt

SEQ ID NO: 424831 - DNA, 358 bp, Homo Sapiens
gcaggatatttttcgctgtcacttttttattcagacaaaactagttcttaagtcttcttaattaaaaaatggtataatagggctcatcctagaaaacaatctactcagggtgttagatgttaaactgcccaagataatttactacaaagtatctaggaaacagagattttcctcaaataatcaattatccacaaccatggctttaatattagtccatgttccagtaacagatggaaaaggatcttctattcaacttttttgaaaccttgtcttataatcataaggcgaacagcctttaaaagaaaacgcttaagctacaaatggcctagataatacatgtggccttagattcccagtc

SEQ ID NO: 424832 - DNA, 355 bp, Homo Sapiens
tatcatttgcaggacagatgatttcttaaaaaaataaggaacatattttccctgatatagatattctaattcttgctactaaatttttagagtaataaaaacgttacctaagtgaaaataaaatagccattaacttttaattacccagatatttctaccttttccaaaaatctccatgtgcttacagaaacatagccaaaggcttcaaaacaattcctgatctgggaaaaatacaaacggatttttggacgtccacatgaactagacatgttcttgtttagaaagctggcgtttatgacaaattttccgaaatgaaatgaatctaaatttgttgatattacaaaaataacacaat

SEQ ID NO: 424833 - DNA, 209 bp, Homo Sapiens
caggaaaaggacgctagaaccaaaatgtgtttagccacagttatacatgaatacaaactgacaagcttcactattttatgaatgaactgtatactcccagctatatacttttcgtatgagcaactagatcattcacttttacgaagcttactcctcaacttatgactcttttaagaaatggtaactttggagcatatagccttttttaa

SEQ ID NO: 424834 - DNA, 280 bp, Homo Sapiens
gaaggataaagtttgtgctgtgcattgcccaaaaacctgtcatgactcccttgagagtctagatattaagggtggtaggtgactgcaataaaaaagtgtatgtgcttctctgttgtaacttagaactctatgatgctggcctgcaggtgcagaggcagaaagagaatcatttcttaactgtagaatggccatgcaatgcgggccttggttctgttactctcctgtattgttaggtttcattcattcaacaagcattatgaaagtgcaagtgttggactgc

SEQ ID NO: 424835 - DNA, 378 bp, Homo Sapiens
cattgcaggatgtttgcaccccatgaaaagagttaaactatagtacagaagaaacaaaatgtacaagtagtatttttgcctggattgcagcaagtcctacacaattaccaacaccccaaagctacctggtactctgtggatttgtgaagtgttaatgtaatgtatctgtgacaagttaaaatttaatgcatggctccggtagcataatcgaatcgatgttatgtaacctaagagaactattccagtaagttctgatgtgctggctgcttacggttcagggggagtttttttcggaggttactgagtatttaggaatcatcccttcagacacttgctcttttgccacagaagctgcagttatcttatccctgctttcgg

SEQ ID NO: 424836 - DNA, 156 bp, Homo Sapiens
tgagacacttacggccatagattttttttcaatcaattactttcttttgcatctgttgaaattgttttttttatataaactctgatttatatggtgaattcatttgattcagtttcaatatgttaacactaacatatttgagggtaacacctcaaa

SEQ ID NO: 424837 - DNA, 296 bp, Homo Sapiens
  misc_feature (54)..(62): n is a, c, g, or t
cggagacacttacgattcattttattcttaaaatagtttataaatctttatgannnnnnnnnacaaattaggttattgatattaatcgcaaattttactggtaggtatcttcttgtttttgctatagatagattccatacttatctagagtacctcccattatgccttattcatatatcggtgaaagctattgccctctatctacataaagttacaaatggaatatcttctaggaagacagaattattacttagtctatattgtctagatgatagaatttagtatcattatttaat

SEQ ID NO: 424838 - DNA, 193 bp, Homo Sapiens
atactaaactatctttttagcaatgtgttccatcttcttaccacaaactatattgatattttcccatcttttagaatacaaatttgttacaacagggtttatgccagggtattcttagatctaggtgattcacagaatccccagtaaatcttttggacaaacttccatgaatcaagcaaaatctacattttgc

SEQ ID NO: 424839 - DNA, 106 bp, Homo Sapiens
ggtcgtctctagcacgatcccccggagacacttacgcattagaattggtgaagtcagtagttaaacattcacatgttaatgagtgtgtggaaagacaataaaccat

SEQ ID NO: 424840 - DNA, 277 bp, Homo Sapiens
cagtagaagtcagattaaccatatctttatttactttagttttaaatgctatccagtggactctcagtttactgagggtgatggaaatcagtgttcgtattctacctccctcctttttcccctcttactcttcctagatttttgctagctggagattttatacatcatctaagcatatcgttattgacgatctgttgttaccctaatcctattttagtcttagtacctactagtttagttcttttctatgtgctcactgtatgttgtctccgggtct

SEQ ID NO: 424841 - DNA, 214 bp, Homo Sapiens
cggagacacttacggctacctccgcctcctctagaatattgatccatgatccagtatttctatattaacccactccgcttgtttcttctgacgcttcagcctagagatcaaaagtagtttctgacattctaagagaaaccagtcagaggaactaaatacactccaatattttgttcactgcgagtatacctgtactcaatttcgtatagttgtc

SEQ ID NO: 424842 - DNA, 321 bp, Homo Sapiens
actacgcaagtggttggaaataacttgattttagcaccattcgtgatagagtagttacaaaaatagacactttttgagtagtaataaattcacttagtatttgtaaagacctggagaatataattctgttacctacctttatgtgtgatagttatctacctttatgtgtgatacttaggattagttgtttaaggaaccctttctgtagtactataaggcatattaagtaatagttatatgttacctagtattttgtagtgtttctttgatctgttactttgggtttgctaaaagatgttaagcctccaaataaaaattttt

SEQ ID NO: 424843 - DNA, 208 bp, Homo Sapiens
gggcaacattgctattgtttgccctagacgtggtcttgaccctcctgtggcttcaggctttctccttctttgccctcggcccacccaaaagttgctgggatttgcaggttgtgaccttgccattgccctggcttttcatattctcatatttcataggagattaagctttttagagcctttcacattttgagttgttgaccttgtggat

SEQ ID NO: 424844 - DNA, 237 bp, Homo Sapiens
  misc_feature (98)..(182): n is a, c, g, or t
ccggaccggtaacacttacgtaaatatttaatatgctgcctggcacataaatactcaatgtaagtattatgtggactggcaggaaaagacattccttnnnnnnnnnnnnnnnnnnnnnnnnnnnnnnnnnnnnnnnnnnnnnnnnnnnnnnnnnnnnnnnnnnnnnnnnnnnnnnnnnnnnnagatccatctggcgtccacatagctgagatcctcaccctcttataatatcacaac

SEQ ID NO: 424845 - DNA, 275 bp, Homo Sapiens
agtatgctgggaattagtaacagtacagaggaattgagtatctgagtgatactgagtgtggtacccagctacggaggggtgactttgctggccatctctaattttattaagatctttgattattttatccaggtgacaaaattctccaatcacgactcacctccagaagcttaaaacataattgtttcatatactgttaaacacttaagagatttgtaattttccagactttcaatgtctttacttgaatgtctgccttgcttagttactgtaag

SEQ ID NO: 424846 - DNA, 490 bp, Homo Sapiens
  misc_feature (43)..(63): n is a, c, g, or t
tgcctccacttctttatcgaaggataaaattatacagcttatnnnnnnnnnnnnnnnnnnnnnctcaatatctcaatcttgttatataatgtcaattcccagaaaagcatatcattgttttccttcggcctcttagatacaaaataatagagtttggggttggaaggggaggtggtatttgttgttgtttctttttatttcagtgtttctgtctcctttatcctcaaactagcaaatttccgtgccttgtccatttttctttgaaatatctctttctcccttcatatttccagtgctaccgtcttaaccctactattcattaccttctagctgggaaattgtagtcattcccctcctgggctctctgatctccttttggtctccctacccacagccgccatattgatcatcagttaacactatttcattatcttactaaagagtgtgcagtgattacacgtggtaaagtttaaattctcctattttgtaa

SEQ ID NO: 424847 - DNA, 598 bp, Homo Sapiens
  misc_feature (22)..(22): n is a, c, g, or t
  misc_feature (423)..(487): n is a, c, g, or t
ataactagtagtagtgaagccngatcataatcagatgattgaccctagagactggccctttaaccactctgttatgtcaagatgattttgaaggcaaaactgagacacagggtacatatcatgtctcaggatatataaattagtacatggcagaggcaaaagaaacagaagcagctgagttacaggttgctcatctgtgaacttttaatgtagtagtagaaattttccttgatataagcctagtatttcaacctctttgaatttgttacattattttgagtttggagagtatatacagtattgagtaccaacagagaagactttctagtggtgccatcgaaacactttggggaaagtaaccccatattttaaagtgtagatgctgtagaaataatataattaaaattaaggttgtaaatacannnnnnnnnnnnnnnnnnnnnnnnnnnnnnnnnnnnnnnnnnnnnnnnnnnnnnnnnnnnnnnnntgcgatacaatcaacatagtatttgcatgtaactacagattctcctatatgctttaaatcctctgtagagtactcataatacctaataagatgtaaatgctaggtacattt

SEQ ID NO: 424848 - DNA, 321 bp, Homo Sapiens
gcccgaccctcagccccaagcacattttggctgctccctctggctgttcttccagcctcagtgactgttccttgctccaggtgttccacagtactctaggccattctgcagcttcagaggctcttctctcatctttccacctgttccatgggctctgtcccttccctgatccctctgcccattctacagcctcagcaattgtctcctgcttcctctgactgcaatccattctctgggtcgtatttcacatttcttgttccctggtatcgctgtcttttgcctgtgcccgagagtacagggcccgagatcagggcccgagag

SEQ ID NO: 424849 - DNA, 460 bp, Homo Sapiens
agggccccggccctttagagataaacctacagccccagtacctggcccatctgattctagagggccacccacccagctgaagtccctgttcaagtctcctgccccagtgcaggcagtgtttcctaacctcctccccctcctgcacccaaccaggcccagaacacttcctggtcatgtgaacagctgacagttacaatcccccacacactgagagagcatctgtgttcctgagtggactgaattgctagatgtagtaacattgatttggtggctataggtttcaaacttcaagtcagagatcatagaactttaagccatatagaatcctagaattggaagactctgagcagccatctctgcacccagcagccaaggagtggccatcctcagcacctggcagggcatcagcctcccactgggagtcccggccacctccagggcccgagaggtgatcctctag

SEQ ID NO: 424850 - DNA, 300 bp, Homo Sapiens
tactctcggcccctgccctcgggccctgtgtccagcatctcacagccaattgccattattcttccttggcaacttctgggatgctccaaagcatttattctgagtgagcttgggtagagttctgtggggcgctgagctgagaggatttgttctggaggcctttcttctgggagtgggtcgggtggctgttaatctttagaagggcacctccagcaaatctacttagctgcaacagaatcagcattctttgaaggggcaggggacagccatgacaccgcagctttcctgtccagggcccga

SEQ ID NO: 424851 - DNA, 210 bp, Homo Sapiens
atatagagctcacaattctgtcctccctggaagctacaattcaatcatcctcttccaaacgtccaaatcccagcttcggtgaggctatctcacacagcaacctgcctgggagtgacctgcatgcaaaacttcaagagtttgagggaaacttgagggaaacttgcagaaaccagcttgccaaggaaaaacgctcccagtgcgttcaatgaa

SEQ ID NO: 424852 - DNA, 238 bp, Homo Sapiens
gcgagactatagagtatccgtatcgctcgcttcatgcagatgttatcaggtaatcacatggatgcatactgtgaatctactacatgagcagaaaattgcagggaatgacaaacgggctcaaccagaaataagtaaaaggttgagggagagcagagcacctagatggggtaacaaaggaaagattaaaagcttagtgatgacaataaagacaaagtgtacatgcatgaagataagggga

SEQ ID NO: 424853 - DNA, 183 bp, Homo Sapiens
aagcctgccctgcgttcccaaagtaaaagaatgacaagctgttccttttaccaaaacacttcgtaatctcatccaattgcaaaaagagttattagccaaccaggtattcccagtagtgacagtggatataactgtgtagtcattcacctctgcttatatgaatactttacaacctcttttgcc

SEQ ID NO: 424854 - DNA, 190 bp, Homo Sapiens
accagccttttatttttgtatatacataatactttattaaatgtacggctgactgacatcataaagattacccacaatgttcaaatttctcattcgtgcaatgacttaagagtgagaaatccttgaagatcatcaaagagatgttatgagatgatgcaaaaggagatactgatgatttctgaaaccctcc

SEQ ID NO: 424855 - DNA, 431 bp, Homo Sapiens
gatcgctccgcaaaatgtttaaaatcctgaaattatagaaacgtggctttagtttctacccattcaaaataatatgtaatatatggaaaatgtttttgttgaggaagaaagataaatgagactgtgaccatcttaggcctcacaatcagacaacatttaagtcatattggtatttggtgcaaaactggattcataaaaaattactttggcgacaaaatgacacagtagtctagatattgatactcaaatattctgggtattaaaactcagtcttcttcaggttatactcccagctaacttactttgggacacgttctcggtctatactgagtctgtgttcccaggcttaagtcctcaaacttgaccgagtaataaaactaaccatgatttctttaagttttagtacctgttatttcacctttcggtcgaca

SEQ ID NO: 424856 - DNA, 401 bp, Homo Sapiens
atgaaaaaggtgtcaaaaatatttatgaatgaactgaaaacaaaaataaaagtgcttttagatgtcattttttatgacagtgcttccctttctgatactacatataaaagtttttgtattaagttttggaggagatagaagtagtgaaggtaaaacttcttgttttttcctgttgtttaaaatgttaaataagcagaagctggtttattgtctaaatgacccacaccagtcctctgttggacacagaagtcttcctttagtggaagctatcagtcattttgtctcagcacattcaactgttgtttgttcagattttttgtaattcaaaatactttttgatacctaatgcatgattttttgtgagttgtcctcagtaatttgtaagtcttacatagggaaac

SEQ ID NO: 424857 - DNA, 135 bp, Homo Sapiens
agcagcaaatgtcccctttcctgttcagagatgacatgaaagactgtgagttaatgttcggaaatattttggtttttttggaggataggtatcaagttcaaatataactagcactctaaaataagctaaactgaa

SEQ ID NO: 424858 - DNA, 241 bp, Homo Sapiens
acagttaccgtatgagaataagaagaaagttttttgggagctttatagttcattttccttgctcatatgtaattggaaaatcagagaagcggcattatatattcgcattggagttacagaactttctgttttgacagattgggttattcataggtatatcgtaaagcatttcttgatggtataatacaggccagtgtggtcttgtactaccccttagtgaagccttaaacgatggtcagta

SEQ ID NO: 424859 - DNA, 190 bp, Homo Sapiens
ggctatctgtacaactcccaataaacccttttatgtagagctctcgaaggccagtctgtggcaccactctcaaagactgcttcacacatcttttttcttcttgcagggaactggcaagtcacacatcttattcttgactccctcctttggaagcctgtttgtttaatgtaagccttttgtgtgcgtgtgc

SEQ ID NO: 424860 - DNA, 321 bp, Homo Sapiens
caaaaattttctttcaaattaaccacattcaggtattctattttatcttttccataatacttttctagcatcactctacatccaaccctatttatataatgtctttcaatggttccagctgagtctggactatgccaagtggtacttctgcatcactgttcaaagtaacccttttacctttaatacagtaatacactatggcttcatgaaattgaagccattctttaaaatcctgttttacttacacacgttccatgaagcattccctgatgagcctagctcacggtaatcctttccttcttcaaatttctgtttttttat

SEQ ID NO: 424861 - DNA, 298 bp, Homo Sapiens
tatcgctcgcagaaggaaaaattgatgtttttttagcagggggtgcactcattagattgctactaacccaaattcagggcatagagacagatagcagatgaaggcagacacgagtccagccccatccatatggccttaactccatgattgctaatagagtattttcaaggttatgggaacctaacacttaagtaaaaaattaatacataccatatatcccacaaatcggtagactaagacaactgagtttggatactacagggaaaaacatttactcttaactaagttgtttactact

SEQ ID NO: 424862 - DNA, 363 bp, Homo Sapiens
ttccgcgatcgctcgcaaaatcattgtcttctgatcaccacccctactaattattgctttgaagcctccttgcccatgtagaggtggctgggacagggcagaagaaggtggctgcgcaggttggctcagaggcccctgagatgggggatgaaggaggttaatttggcacatcgaaccccctcttctcataggagctttgaggtccttctcttgaatccagttggtaccgccccttgggctagcagaggaggagttgagcttgtctcctcctccccagtttccatagatttgccaggaagttggcaagtgggattctccttggctggtggaatttggggggaccaaaaggataggggtaagttg

SEQ ID NO: 424863 - DNA, 315 bp, Homo Sapiens
gagctcgttccgcgatcgctcgcaaaataagcaggacttgccaacctggtttaaggaattatcttttgcattcaatgtttttgctgtttaaaaatacagactgattccatttttgacgatgtacagtgggccttggcgccccagtggattcttcctttaagttccttgtcactatgggcatcttccctgattattttgctgttatctctttcctgtgggtttcttcagtaggattctatgtgtgggctcagttgtcacagaggagacagtgtcccatacctagggaatgcctagagcagcatccacattgttttt

SEQ ID NO: 424864 - DNA, 185 bp, Homo Sapiens
ttctatgtattagtgaggaaggggtttctttccaagtattatttcaaacaaatacatagaattttgtgggaattcagacgtaagggatgaacgactgaagcgtcagagtcttaagagtttgagcatggttgaatagagtgacctgtgaaagaccaaggctgtggatgtcagttttcatggcaatg

SEQ ID NO: 424865 - DNA, 264 bp, Homo Sapiens
gttatcctaagaagtgtttgggagtagcttttaaaatttctcagtggaacgagtgggggaagtcgtcctctgtcctttggttgtttactctgatcctattacattgtggttagaaaatgtgttccttaagatttccatttgtgagagtcaattgttgtttcttttgtggcctagtgcataatcagttttgaggcttcaccacatttgaaaggcaatatagtgcaatgattaagagtgtagtaacttatgccagatagtagagag

SEQ ID NO: 424866 - DNA, 144 bp, Homo Sapiens
ggtagaacttggagaactgaactattataattagagtgggaatcccagtatgccaagagtcatcctagcccagttccccttccatcactctgttagatggtctctcctcttcttatccttaaccatgtcggaatcacacttatg

SEQ ID NO: 424867 - DNA, 289 bp, Homo Sapiens
acagatattgaaagttttatattaattatattaggttacatttgatccctaattgcacccaccatgtacatgcttaattataaactcaaggaataaaaatagtcatgtattctccaaataagagtcacaaattagtcttattgtagttacatgctgatttgaaaggcttaagcaataagaatattggctattgttaataattcctgccatatgttctgtgattaacaaataaaaagataatttcatgactttttttgcagtgtggggggaacagcgtctcactccatca

SEQ ID NO: 424868 - DNA, 233 bp, Homo Sapiens
agaggttcgttgaatgatgaatggcatagcttttggtcaattatcatagatatattctagctggtagattttcatcttgcctgacttgtgtgtgcagtggacttgaggatgaaggaggcaggtttgatagaggatttggctggaataggttaagaacttgggcattacactctaacacacttaggttcaaactccagttctacttattggttgtgtgaatatgagcgagttat

SEQ ID NO: 424869 - DNA, 233 bp, Homo Sapiens
ctggcccctgtcacccctaccacagttttccagaatgctaacagtgaagacaggctgcaggtaggacccacacaccttgcaagccttcaggcaatggtgtctgccagcctgggagcctcttccgtcggtgacttgctagccaggagtgagttgttcactctctccataacctaccaacctgggtcccagaacccagcctctccccaactgcctccccaggactttgccatcag

SEQ ID NO: 424870 - DNA, 345 bp, Homo Sapiens
  misc_feature (299)..(299): n is a, c, g, or t
cttagatatttttcactggataggaaagaaattgaggaagtttataatgatgtcctcttgcttgttgctgaggtgaggggctgagttatctgcaaatatgaggagtgttctaacggaatgataaaggactcaagcagctgagtaaaatcaattgatattgcaaattatccacttgtgattttaagaatttcttggtgatgcaattttcccatctatacttgattgtctagagtattttcctcctctagtgcctttgctgccacactgattaaatcaatattgattgacaacctcagtgngatattttcatgtgccaggaagaatagtactatcagcagtacccaa

SEQ ID NO: 424871 - DNA, 178 bp, Homo Sapiens
gcctgcaacaggggtcaagatgagttttgcctgacttctttgatgtcctgaactttccgtagtcctttttcttgaatttgttcattataaatatagcttggcatttgtttgatcttttcaactgtcttcactgcatcagtagttttattccatagttcttgcagatatttgacaggct

SEQ ID NO: 424872 - DNA, 355 bp, Homo Sapiens
aagataatcccatgctatgtactgcgtagagttaaagagaagaggcgagagcatgaagataaaccagtacaatcagtcgttcacataccactaactacaatgatactcccgtttgcttcctgtgaagtagttactaataatcactggtgtcgctttttaatttcatacatcctttaactatcttcatataggtattgaaagagtcaacataaaagccacatccattttctaattttgaacaatagttagagaaacctaatatcttctcatatttttgtcttgcttctgtctcatgagttcccaaaatagatatattatctgaatgaagagttcatgggcaaatgtcacacttttc

SEQ ID NO: 424873 - DNA, 266 bp, Homo Sapiens
caattcaaatataccgcatgtccagattcatgagcagatttgatcttcagtgttactaagctgctttcagaatctctgctccagttatttccttgaattcgtgtgttctcacagattgcaactgagctttttgttaatttgctttatttactggcacatctaatatctgaatcagctttatcaggtattttactacccagatttcttcccacctgcacaattaatcccttttgtaagggattaattcatcaacattcaacgaacct

SEQ ID NO: 424874 - DNA, 338 bp, Homo Sapiens
ctggctgtacagacaaagtacaatcagacgcagatgactagctgccagggggttccagaaagagctctcagattgcctcaaaaacacattggagcctctacactacatatgctacagttacacgaaatgaggcaactctcttttaggctctgcccaaagaaatttcaattttgaagacaaaactgtggataagagacttcctcttccctgagtggacgagtataccaaagcaggctcccgaagggcaccactgtgatgacacatgaggctatcagcagcttgtcctcaaacctctcattgcccttcctcttccacccactggctccaggctatcaata

SEQ ID NO: 424875 - DNA, 328 bp, Homo Sapiens
agaggttcgttgaatagctctctgttttctgagttaagattttgtgttttggtgtgtgaagagtaagaggggtatcatggagtagatgggggtgaggtagaatgggaggtgtgcaagagaggacacctgaggaccgtgtgaaggcaagtgataatcagactaggaagctggctggacacaaccttccagtgtgagaggcggaggtgagggggcagctgcttctttaactaatcaagggctcaggttccagtaccttccttttatccccatccacagtttggcctgtctcttctcatctgcaaaatctcctcttttctttttccccctc

SEQ ID NO: 424876 - DNA, 241 bp, Homo Sapiens
cattctgctcaccatgccatacatcctggcatagggctgtatcctcccaaaggggattcctttgtctaattcataccaggccactgtattgactagagaaggccatggatgggtttctcactcttagaagggaaagaggaggaatggctacagcctccccaagccatagatgggactgcctcccactatccccagacacaaatggtaaattggaaaacctgtatccagacatttcttcagc

SEQ ID NO: 424877 - DNA, 429 bp, Homo Sapiens
  misc_feature (68)..(98): n is a, c, g, or t
gactcctagagtatcaccctaacaggctttggagcagaaagactcagttccaggcacagattgaccannnnnnnnnnnnnnnnnnnnnnnnnnnnnnngtgtcactttatgagattacccatgtgtaaaacaggaatgataatacctgcccagactacctcagggaatggttatggggttcagatgagctgatgaaccaagaaggtatttggagttcacttccagtcttaggagacaaaccatacaacaggttgactgaaagagaccatgggaaagctgttttgagtatagccttgcctcccttgagatactaaccctagttgaaattcttccctgaaaggtgtaagtaataaatgggctctaagtagtgttttctgctcatgagacttaataggaggggactttcacgtttaccgggcctgttgtgtt

SEQ ID NO: 424878 - DNA, 156 bp, Homo Sapiens
  misc_feature (12)..(12): n is a, c, g, or t
agaggatccccncatcatcgatacagttggtgatgataggcctacgaacaccgacagctgcttggatgatctcgaacgcgtaggctgcgcagcagctgatcgatcacgatcaccagcgaggcgatgatcgccatctgcacgataatgcgcacgctg

SEQ ID NO: 424879 - DNA, 148 bp, Homo Sapiens
tggattatagactcagtttaagagccagactgagcttcagataatcccatccactcactcatgttacacagtgaatctcccattgccagttgatacttcccccaggttgtatggctaattagtgatttagactgggcctaaatctctt

SEQ ID NO: 424880 - DNA, 299 bp, Homo Sapiens
cttctgtgcgaagaatcttttaataccgtcgtgagctggaaaacctctgcgagtgtgataatctacgtacccagagagatcaaagttagctttccacagaagctaattttgaacagtaagtataggttggcccagcggatgacagttggaggagtacaccaagaagaacaagggaggtatatatcaacagcaagttatggtcaagggatttccggttttgtgcagtgtaactcaatcataaaaattgcagaagagatatgtgctggtccactggctcttagagtggtagtggtggggaa

SEQ ID NO: 424881 - DNA, 358 bp, Homo Sapiens
  misc_feature (315)..(315): n is a, c, g, or t
gctgatctcctagagtatccaccctaacaggctttggagctggaataatacgtatctggaaattttgtgtaatggtttccttaaatagaccctttattcttggtcccctctaaagtctagcagagacataagtcaggctcttctcaaatagggactctgttcaatcaactcacgccaagaccattgattgggaacatccaacatggggaggcaggctctgggtctggtgtttgcagggggtcccggaggggctcatggacaggaaacaaaggagatgcaagcaatactcacggaggcacctacaaggggcatggnggtcatttgaactgggtcttaaagggagagtggtctggagtga

SEQ ID NO: 424882 - DNA, 247 bp, Homo Sapiens
tggcgcgctgcgccggcgaggaagaggaggaacgccttaacggcggcgacatgcatatcgaagcgcgcgccgccggggaggatgaagcggaagacaaacgcccggcataataggttaaaaaacgccccatcttgttgcgccatacgcaacacctggctatgatgcgtatagcgcaacactcatggagccgtcaggatgataagaagcttcaagcataagggactcaaaaagtttttcgaaaccggtt

SEQ ID NO: 424883 - DNA, 124 bp, Homo Sapiens
tcatgtgcctgcctcggacattcaacgcttgctgcgcgaagccccgcaggccatcggccttgcggcgcccgacatgccggtcggttcgcccggcatggattgtccggcctatggtggacgcaag

SEQ ID NO: 424884 - DNA, 343 bp, Homo Sapiens
acccttagcgtttggagaagggcagtgagacagaaacaggattatttgtgttcaggtaagaacatgttatcataggatgttcatgcacacaggacaaatagaaatgtcgataccctattttatttattatattgttttcatatgatataatattgccttgtctaaaggcagtatcttacctgatggtaaaaccagtctagacttgtttagtctttgtgttaaagggacagtaagcttacagatgctttagtcataggccagtacagctcaccagggttgtaggccagaactacacaattctataggattaaacatctatttgagagttgcaggtagtcagtgc

SEQ ID NO: 424885 - DNA, 371 bp, Homo Sapiens
tatccccggcctcgtcagcctgacaacagtgggaccccgatagcctgttccagtgagcgcatcgcctgactcatggcggactgactgacgtgcagctccttcgcggccgcactgaagctcagtagccgggccactgcggcaaatgacggcagggttttgagaggcaaatcgcgtgacgacacggtcgatcctcaatctgcttccgttcatgcggtgacttaagtgtttcttatgtgtcgcatcatgaatgaccgtttgtcaaggctggcgggtgcgctcaaggtatccacgccccgaaactcgctaccgaccaatgaatttcaagctctggccgatcacagccgacatcaacgacctgcggcacctcaggg

SEQ ID NO: 424886 - DNA, 356 bp, Homo Sapiens
caaggccgcatatattttgcattcctaactcttaaaaggctgtggttttaaggcagggtatatatgaagccattgtacagagcagaaaatggtgtttagaagggaaggcccagtttgcaaggctctgtggggcaaatggtgcttttgtggaaattagggaaagagcctccttccttggcacaaaattcctacagcagaggatctgcttgccaaggagcatgcaggctggattcagaccctgctctttccttccattctcctccttggcccagtacccttgtgcgggttacaatttgcctgtcatatgtggctgcctgattttagatagaagatgtatctcctctgtttcggtgata

SEQ ID NO: 424887 - DNA, 275 bp, Homo Sapiens
ataggtggttgcacacaatcacccttctggaaacagctaagacttgtggctcaggcgtttgaccttgctgacaaaggaagaggtcagggttgacgagagctccaggaagaatgaaagtgcctctggaaggcaggaagaaagttactgtaatactttatccttagggtggaacaagagtctgggaaagctctgccctataaagtccccttccccattcctcccaggtcccaggtgtggtggtataaggagagttggcccaatctgggagctgaggg

SEQ ID NO: 424888 - DNA, 353 bp, Homo Sapiens
  misc_feature (303)..(303): n is a, c, g, or t
  misc_feature (310)..(310): n is a, c, g, or t
ctctgggttccttttccagatggtttcttccttttagtggaaggttttccatttgaatgatcaaataagggaactgactacgtaagcagaggagggttagcctaagtggagaaatgaatggcttacaacaacgatttctagacttcaggcattctcctcagcattcataaattttaccatgatcaatgacttgatatttttaactgactccattttttttgctttaatgcattattcaaaagaaaatgcttacatcacttccataaatggaagttgaccttctttcgctatacaaagatgcanacctganaattaactcatgaacatcatcctaaaattctagccagatatgg

SEQ ID NO: 424889 - DNA, 348 bp, Homo Sapiens
  misc_feature (291)..(291): n is a, c, g, or t
  misc_feature (311)..(311): n is a, c, g, or t
catctgtgtttgaattttagatactcagtgggaacaactagaaaaagggaatggatagagaagaataaatcacatagcagcaggaatagaagattttgctaatttttcagcatatttggaatataaactgaggtgtgatgtggcataaagttaccatgcatagatctggacacaaaaagtgtgcagcaagtaaacttgacgagtgtgacatgaaaagttgtatttgatctcatagattaacagtacgttttaatagagtaagattcataattggaatcagaattgtaatanaaagaatagagaatatgtanagaacatatttgatgtgctatgctgagacaggagaat

SEQ ID NO: 424890 - DNA, 269 bp, Homo Sapiens
tgagagagatagatggtattaggtgcactggaaacctccagtttttcttgcatgcctgtccattcatattctggttaatctattctttgatatttaacataatggaaccaaaaagtaggagagaaaaaagcctgcagattttaggtatttcagaaatcatacatgatatctgaggtttattcaagaaccagtgcttcagaaaaagcgagaaagagaaaaagcactttgtaaaatgcatttaggaagtttctctttgacagtcacgctct

SEQ ID NO: 424891 - DNA, 229 bp, Homo Sapiens
cctcttcatctctgctctgaattcacacgaaatgtcaccagtgtgacttaacttactgtctctgatataataatttcaaactcactataatttgagtctgggggaaaggagggtgagtatagatatattctgtgctattgaaaccatgttccaaaccggattcttatcccaccatacctcaaggatccataaaatcttatgtaccaccttcagtgtgaatcctaaattc

SEQ ID NO: 424892 - DNA, 353 bp, Homo Sapiens
  misc_feature (248)..(248): n is a, c, g, or t
  misc_feature (329)..(329): n is a, c, g, or t
gttatcgtgttgactcgccctgtttccaatttgcaatcttcaggaaggtggccatgcgcctgccattcagcagggccacggacccactgccaaaggactcttggcttgcagtgtcactgaccctcaccatcctaagatcatccgaggtgaggcgctgaacacagagcctcaggcagcccctcagttctctcctgcaagtccagacaaggacttgctggtttatttcacttagattcctgcctcttggnggctttgagaacatggagtggtattgacataaccttagggatctatctctgtgaccagctaaatgcaattgtcaccatttngattattcggtgacgtcagacgtc

SEQ ID NO: 424893 - DNA, 296 bp, Homo Sapiens
tagctgactcttgagggaacccacctcagatgacatcaattttcactcctcttctatccaactaccgactagacacacgtacacatgcgtatgcaccccacagatcaaacttatttcattttctctacctgttggtcacggccttttcttcttatagcttactttattcccattattagacctgtttccatgttactgaaccttttccatcaaacctcaagtcctttatctttgtcaacaactccgtgaagcttttatcaatctgcctgtcagtaatctctctcttatctgaggta

SEQ ID NO: 424894 - DNA, 154 bp, Homo Sapiens
accaggaggtgtagacacctagtcgcccttcccggctgtctcccatacgccggtgcacaccacgcgttcccaagatgcacatccctttattaccgtgcgtcacctcagtctcccacttgctttggtagagtctagaaactaagaatttgacccc

SEQ ID NO: 424895 - DNA, 132 bp, Homo Sapiens
ctaactgagcataattgcgctccaaatgtactattccagtgcagcaatcctgtctgtagcaatagggaccagtcacacagcctgaatacaaaaagatagggggctcactaacaaggttgcctattctggtca

SEQ ID NO: 424896 - DNA, 210 bp, Homo Sapiens
ataacagtctaaagatttaccttcttacttctgtggatcgcttctgttggctgcctgcaccagtgagttaccttttttcttggtttattgggatattactatcagtgtgggtcaagttcacagatcaaaagtgctgtcattgggaaagctattaaaaatgcctagaaaagcttatatgatatgagactgggttaattagaagtgtttatg

SEQ ID NO: 424897 - DNA, 306 bp, Homo Sapiens
accttagatcagaaaatgtgggtgatacctagaaaatataaaacaaccgagatccaactaagaaaaagaagcaaaggaaactgcagcaaaggtagtggtttaggtcttcccaaaggagataaagagaggatccaagcttaaaatgcaaagagcaggggttaggggtgggatatcatcaattttatcatgtaaaatttgcattccaaatgacttagccaactaggcctctcctcctcttcttgcttaaagagttgacagcaaggctgtcagcttcaggattaagcccaggtactggtctaaagtatt

SEQ ID NO: 424898 - DNA, 397 bp, Homo Sapiens
  misc_feature (337)..(337): n is a, c, g, or t
tgtatagattccctctctttcttctcccagattactctagacatctatacacatttctggtttcttagggatgtgccagtccctagtagcttggaagggtaggttccaagtagggttgacagccctacttacatgaagaacactccctatgtttcccttctccccacggtacaggaggattgttctctctcaccctcataactatgcctaatctatatcagtgtctacagtctcatatacaaagggaagaatgggcttgaatttaagaaatcattggattcccttggttgtaagatttagaggacaaacgtgttttcatgttgggtttctgctatangttttttggctgtgattcttgaaggtgttttggtatcttttcctgtcaaagtccatgtca

SEQ ID NO: 424899 - DNA, 237 bp, Homo Sapiens
aaccatagaatgtgtggagatagacagacaggtagaacacatacatgcggcaaactattaacaactggtgagtttaccactcactgtactgctctttcaacattttcaataattcaaatttttcacatagaaattgaaaaaagagccaggcggggctcacacctgatcccagcacattaacaacataaccctcattcacacgaaacaccctatgtcatacacctatcccccattcta

SEQ ID NO: 424900 - DNA, 305 bp, Homo Sapiens
  misc_feature (51)..(118): n is a, c, g, or t
gcgttaaagcaggaaggttaacagtgcaagctcttacagccagagagaaannnnnnnnnnnnnnnnnnnnnnnnnnnnnnnnnnnnnnnnnnnnnnnnnnnnnnnnnnnnnnnnnnnnagcatcctagtgtctccaccatgaataccatgagggtgaatgagcagatacaggtcatgtgctcaacactcaagggcacacagaaagcactcagtctggtcactttcactatcatggtgatcttttcatgcacctgttacattgtgtgatctgcttccagtttccttggacttcatcttctcctcct

SEQ ID NO: 424901 - DNA, 247 bp, Homo Sapiens
acagcaaagtaacggcaagttctctttcaaagcctagcccactgttttgcagaaggtgttctgccagccccattcttatctccaacccacctaccccatctccgagatcaaagcccaaatcgtttctaagggaagcaattgtgaaatcattcccttctatcaagagcagtttgcattgtctccatgcagaaagtgtgcagtttaatatattagggtgggttgcggagtggcaactaatatcaaacaa

SEQ ID NO: 424902 - DNA, 132 bp, Homo Sapiens
gggtcatgtttaatccattgtcagttgctattataattacagtgattgttatctagtgaaagctttgctggcagaattccaccagaaggctaaaacttgcatccaagttttcattaagctattggggtttgt

SEQ ID NO: 424903 - DNA, 290 bp, Homo Sapiens
  misc_feature (145)..(193): n is a, c, g, or t
aaaacacaggcagaaaactaggcttgtggaaaaggtaaatgagtcagttgaataggccaattcctgaagaaatcatcaaaagaaaggctgtagtggttttttcagtttgcaaatgtcaaatcctgtcaagagcccattaggtctnnnnnnnnnnnnnnnnnnnnnnnnnnnnnnnnnnnnnnnnnnnnnnnnngtaatctttgaaaggagaaagctatatgcagtgctattgggtaaaattacagtataatttataataggaaaagaaaaacctaaaaacctacacctga

SEQ ID NO: 424904 - DNA, 222 bp, Homo Sapiens
ctttccagagtagtgcaggaaagggacaggaataatacttacagagaatggacatgctcaaactttatggagacagtgcttccacgcacaggcaaacttagagatctttatgggattctaatgccagagggcaggaccaacattctttagatcactgaagtcactctgaagagaaggctgccaagaagagggaaaggatgaaagatgcctccgcctctctct

SEQ ID NO: 424905 - DNA, 322 bp, Homo Sapiens
cactttccagaggaaggaattgttcctctctctgccttatgttttaaaaagctaatatcttttgtattctagaacctgtcttcacagatacttttctaagtttaccaaatcttaagcctatttttctttcattgcttttcttttcattatataaactcaaccctcttatataaaaaactaaaagttatcacacccagcctgggtatgggcctatattactcctttccttcatagctggacttcttataatgtgaaccgctatatctatattttcttgcttcccaaaaatatgttcaggtattgcagcctgggttttttctcc

SEQ ID NO: 424906 - DNA, 133 bp, Homo Sapiens
aaaaacatgtgtttgtaaaaggttggctaaaagtatctttagaaatgatctgatattttcctgagatgacattctttgggtaggaacatttgtactttcatctaccccccacccccaccttatgagctgtctc

SEQ ID NO: 424907 - DNA, 162 bp, Homo Sapiens
gaaatccactcagcagaaagttccacatttcttcccaggacatagttagttgaacagcagcctatggagcggatatgcagggacatgaagtaggttaaaagaaccggttgagttagccagataagaatcaccacaagcaacgccctcttcaacagacaccag

SEQ ID NO: 424908 - DNA, 261 bp, Homo Sapiens
cactttagagtagggaagaacctcagtaagttcaaggagaaagatcagccatgtgaatgctccaagttggagagttaggctgccatctcctaactcctctccctgagcacaccacagtgtggctgctccctttgtacacagtccaaacacatggtctgggctatttcgaagagcattaaagagcaaggagtcttctcctgcattactgcaaacacacctccttcccgttgctgtttccttttcccacctcaacatcttctc

SEQ ID NO: 424909 - DNA, 154 bp, Homo Sapiens
gatagcaagaagattctcagagatcattttctggtaaagaaaaaggcctagcaatatttaacagtttgacttaatccatcacttcagctggtccactagttttgacacaggactagttaatgatttgttaggaagtctccatctactctggaaa

SEQ ID NO: 424910 - DNA, 193 bp, Homo Sapiens
catctgtctaaaggccttcctataattctaattcaaatgatttctcatttggatgaattctctgatgtactctaagatatttactatgtctataagccttcccaaattccttatgtgcataggattacacagcagtatgaattctctgatgtgcagcaagaactgaattaagtttcggtccttcccacattcc

SEQ ID NO: 424911 - DNA, 289 bp, Homo Sapiens
ctttcagagtagctgaaccaaatttagaatgctctacttgtgaacgtgtaacacacagaaaaactgaacccttcacttttgaagctactaggggttggctttccagttggtctcagacagttattcctaatgacacaaaagaacatataaaaacttaaatgtatcaaaagtatcaaattttaaatgtatgtaaactttgacagaacagggatttagcagagggaagtatttggctaaatatttagagacacatgtatcaggatgtttgccgcagtgtcctttgaaatag

SEQ ID NO: 424912 - DNA, 109 bp, Homo Sapiens
cactttccaaagtaaagcagagggggatagacgacaggaagggagagagagccaagtggagaggagaggatagaaataagaggacaagccccacttaacagtatcgtct

SEQ ID NO: 424913 - DNA, 226 bp, Homo Sapiens
ctttccagagtagcatacaaatgtgtcacaatatccgcatttttaatatcgcatatctcaagcatatcagagcctgcttttagaaacagttaactcatggtctccaccctttcatttcccatgtcctcaaaccattctcctacaaatcaaagaatccatttttatcagattcaccattcttgtctctcactctttccactggttctgttttcttccactagtttct

SEQ ID NO: 424914 - DNA, 196 bp, Homo Sapiens
agagaggatccagacaccctttaaaggctttttgcctaaaaactgggcctttaaaaagaacataatctaaaagtgtacatactattatacgtggtttgcaaatctgagaatcttaagaaaatactaaatctctgcaactttgctattgacagtaaatcaatacctgtcatatttctgccacattagtattcatagt

SEQ ID NO: 424915 - DNA, 247 bp, Homo Sapiens
gacagagagacatatttttaagctattgattacaattatggtatgcctatagattgcagaaccgaggagaaagggaacattatgatttaccatcaagaaaaacttagaattggtgctgagtagttcattctaagaattaccatttatctgtatttgcccccattttcattgttactaggccaaaagtcatttcataattaataagttggatgtcaaaatcaacttgtgttattataaaattagcaat

SEQ ID NO: 424916 - DNA, 239 bp, Homo Sapiens
caggatggcctagtttaaagacaaagagtagacaatttatgggaacaatcacaaggtaaaaacagctttaaacaaagcagaggtagaataaatccagtttgttatctcaggagagataggcagagaattaaatgccagtatgaggcattagaactcagcctgataagcaactagggtgtgtcactgaggtgatataaatggcattttatgaggattaatctggcagaataatacaggat

SEQ ID NO: 424917 - DNA, 177 bp, Homo Sapiens
ctttttttcttgtagaaaatctaaactatactaattccactttgattgtaagattcaaggggagaggggatcccacaccaaatgctactgtctattaacataaatgtaatattaccttctcacatcttagctatataatattactttctcacaccgatagcctcttcaaatttagtg

SEQ ID NO: 424918 - DNA, 116 bp, Homo Sapiens
agaacctgacagattcagatcagaattcatctagaataagcaagcttaaataccaaatacacgtatcttgaaatgtaacaacagtaggcttatcctatcagatttttaaatacctt

SEQ ID NO: 424919 - DNA, 166 bp, Homo Sapiens
ttcagctcggtacccactttcagagtaggtttctgggaattattttagacttctctagattctttcctctccccaatccgtcacagtcattctgtcgctaacttttgccagttttaaagttaaatgttacaccaatctccctgcttctttctacccctactctgga

SEQ ID NO: 424920 - DNA, 448 bp, Homo Sapiens
gagctcggtaccccactttccagagtgcctaaggaatcaaatctctagttagatttgcactgcttttctctccttctcttcccctttccctagtttcccaaatgtggcttctagctcctatatgctcccatttgttactgcctcctctgggctctttctcttgtgtctataacacaccaacgcgcccagtctgctctccagctgcctctgtgcccttgccccgcctttgtggtctgtaacgtctcattctgactcttttcttctagagcttcaccaggccttcctctcttcctaggtcaacgatcctcctgccagccctcttcccgctcctctcttctcttcttgttctctcctgtcttacctcctcctgccatccctcttcccactcctctgttctcttcctgttctctcctgtcttacctcctccccatcccatcccagttcccta

SEQ ID NO: 424921 - DNA, 169 bp, Homo Sapiens
aggtccactgtcctggtcgattcccttaaaaagagctgtgcagaggacatgaactcttttttatagaacattctatgttttaagtattaaatgaagcctcagctccagcatagcgtttctgacaggctgactcacttcacatttaatgatggtatccagcatcttgtct

SEQ ID NO: 424922 - DNA, 215 bp, Homo Sapiens
ctttccagagtgcactttccagattagctggtattatggacacacgccgctgtgcccagctaagtcattttgttttcaattgcagcttatatttcaattcctaagaaatcgtcactgaatgttccaatactctggatacgcagccttgggaaatgtatttcttaagtccccagacacacacaactttgggactggcagtgtttccaatttctgaa

SEQ ID NO: 424923 - DNA, 153 bp, Homo Sapiens
ctagctcggtccccaggagtagcatttccgatatcccgcaatataaatcttcaatgtagctggcagaaatggtacaagtagaattagaattcctgtaattcccccaccccaggcaggcgtcggggttcctactctggactactctgcaaagtg

SEQ ID NO: 424924 - DNA, 181 bp, Homo Sapiens
aatggtactgctgattgatccctgcttggatttcttcaacttcatattgtgggggttttctttctctggtcttctttggctcttcctttttcgcccaacttttaaatcacaacatctttcagcattctgatctttactttttttgtcttctcagtctgcatatctcacaggcctactctgg

SEQ ID NO: 424925 - DNA, 484 bp, Homo Sapiens
  misc_feature (165)..(374): n is a, c, g, or t
tttgagacctcaaacatacactgtgaagcattcttccattgctactgagcttcttaaggtcaatgaacacatcatctgaagagcagtgaaagccccagtccccagctcccataggcagtacagggaagtggctgatggcatagacagaggaggtagccaactagnnnnnnnnnnnnnnnnnnnnnnnnnnnnnnnnnnnnnnnnnnnnnnnnnnnnnnnnnnnnnnnnnnnnnnnnnnnnnnnnnnnnnnnnnnnnnnnnnnnnnnnnnnnnnnnnnnnnnnnnnnnnnnnnnnnnnnnnnnnnnnnnnnnnnnnnnnnnnnnnnnnnnnnnnnnnnnnnnnnnnnnnnnnnnnnnnnnnnnnnnnnnnnnnnngatgctgttgctactattttgcctaaaccatttctgcaattctcatgagattccagtccagccaaattctgaatagcctcatgctaaacagcaagaagtcactcatgaga

SEQ ID NO: 424926 - DNA, 264 bp, Homo Sapiens
aaaaagaaataaaaataaacaagtaaacaaattgagtttattttttattaactttatatgaaattttggggaataagtaaagtttttaatttgataaggacaaaaaagttcctcaaagccaatttttaaacatgtttaaatatttgtattcaatatacaaggaagatgagaaatactcttttatgtaaagtagtaagatttgatttatataccacttctgagtatcaactcatggttcaagcataaaggtcttgctgggcaacg

SEQ ID NO: 424927 - DNA, 258 bp, Homo Sapiens
tttccagagtagcactcagttttctttaatacagttagcctatcctcataactaaatacaagcactgactttccctccttggaaataagtatatgtggacatctttagcataagataatatacgagtgttacaggttcttaacttgggcatatatataagccttggaggtcaaaaacagtgggttagttagtattcaaattagaaatttcttttccatgcagactagatttaacattgagcacagtgaattgactcta

SEQ ID NO: 424928 - DNA, 274 bp, Homo Sapiens
aaaaatggaagattaagttcctgaaagtcacagagttgatcaattacaagcctggaatacacatcttctaattccaaagcctctctaagctctaaagagaggatcaaggatgaggtagaattaaaaggcagaggactagatgtgaggagtccaaatagagtattcggtttattttgtatgtgtgtaaacatatgaagattaactggtaacacaaagattcttcatgaacaaattttagtaatgagctggaaagaatattgcactctggaaagtg

SEQ ID NO: 424929 - DNA, 196 bp, Homo Sapiens
gacaaatagatggaaaaatagttggatttttcttacacataccgtccaatatcttccataccatggacagtattttatccttacttgtttctaggacctaaggaacatagttggtaatacagaatcctgtggaactccaataatttcagagaaaattgaggatacagtatttttaccctctgcactctggaaagtg

SEQ ID NO: 424930 - DNA, 124 bp, Homo Sapiens
agagtagtatataccaataaatgtgggacgttagagaaaacaaaaagtaggggaaagagtgtaactttgatcttcctcctactccttccaagagtaggaggttagtggctgatacctaaccctg

SEQ ID NO: 424931 - DNA, 187 bp, Homo Sapiens
cactttccagagtgtacacactcatgacacactcagacacatctatgacacacccacttccggacacacaacattcacgcttactcatggacacaccaacactcatgacacccactcgtggacacactcatgacactcacactgactcatggacactccaatgcatgagacattcatgacactctga

SEQ ID NO: 424932 - DNA, 406 bp, Homo Sapiens
ctgctccatgtttcaataagctcattcctggagtcacaaaggaacatggaacattgtgtaacaattaatacagttggaggcgtcatgatcatatatagagactgtcttgccattaaaaataaaccaacgtgttttaagattttgctgacactctttgtagtaagacatcactctttatgatgaaaacttcagtccctgagctctcctcacttattgtattcccaatggagagacttatattctggggaaaccttcataaagattgacaaatagagaaatttaggacttttctacttaattagcagaacacaaagatgtctctagaaatttttctcaacacaatatgatttttccaatgaaaatctgaagtgcccaaaagagaagagttcacttttcagaagttcac

SEQ ID NO: 424933 - DNA, 122 bp, Homo Sapiens
ccagagtggaagagaagccagcaagttagacacagcccctctctgggaggccgcctctaaaatggaactagcggacgtaccttggtttgtacatttgaccatggacacacgtaaagatttcg

SEQ ID NO: 424934 - DNA, 287 bp, Homo Sapiens
ctttccgagtagatgcaaaaactgaagctgagtcacagagctagtaattggcagcactgggataatgatatcaaaccaaaatctaacagtgaatatgacatagcaaatttctgcaatatctcttctctattatgaaaactgaacacttcatgatatagccaaattgaagaatattttagagccagatctatgttttccaaagtaggttacacagaactttagttcctgaaaatgatccatatgaaaaatactctccagtgaaagaaactgagaaacctactctggaa

SEQ ID NO: 424935 - DNA, 347 bp, Homo Sapiens
caggatctactattgtgcaacctcattgtttaaagggtaataatttccctcaataacaactaagtaaatatgacccattgcctctgacctgtattccttgttatgtaatgaaatcctatattattcttgctttattgaagatagagatgaagaattattgaaaagtttgaatagaaggaagtagtgactccttagttagaattcctactggcaataataaatctcaggttatatatgatataattaatttggggggaagatacacttatatgcatcaatatttaaatagctgcagatctgataaaaaactctctctccacaaacatattattacttggttggagata

SEQ ID NO: 424936 - DNA, 176 bp, Homo Sapiens
ctcagctcggacccactttcagagtagagtggattctgttgtctgcaacagattactaactgatatgccttttttagtgtctgtcaaattggattgtgagcttacagtttaaatgaccctgtgcagagcgcaaagtagggcacaaatttcttcttctggcaggagtaatggataac

SEQ ID NO: 424937 - DNA, 131 bp, Homo Sapiens
actttcagagtgagattcagtaacaggcatcgaaaagcttacatatattcacctcctttgacctgtctatggaaatttatcttaaaacaatttctcttaaagcagtatcatagctaaaatggaatgtaaac

SEQ ID NO: 424938 - DNA, 236 bp, Homo Sapiens
tgaatggaatgaatcagtgatataacccaaaatgctcttcttaggcttcagtgcacaggaaacaacatatacaacataatcagattatgttacattttggctctaaaggatgcattttcttagtgtaccaacaaattatttcttttccttgcagtattggagataagaggtagatataccacaaaaaccagaaaagtataagaagaggaaaaacagaatattacttatgcctgccc

SEQ ID NO: 424939 - DNA, 444 bp, Homo Sapiens
ctttccagagtagtgatgactcagtttttcattcaaaaacacttactgaatgcttatgtcttaccaggggctgtcaggttttatggaaggtattgagtgtaaaacacagctctgataatcaagaggcttacattctagtggggagaggaggaagacacatacataattataaaaactaggtggtatacaatcaacctagcctcaaataaatcctcttttaaatgtatgccactgtcattccaacttgaaaatatatgtctttagtacatctcaggatgcctatgaaaggaaacttgtgtcaaaaaaacaacaccaggcatagaaatatacatgaattgtgaggatacttcattccacacattactgacaatagagagcagcttagaattcttgagctaactatatccatttgcagagcatggcctcccacacagctgtatgtag

SEQ ID NO: 424940 - DNA, 158 bp, Homo Sapiens
ctgtcctccatttagtggtttatccaatcaaagcagatttgatccatggcaccatgtctcaacatatgcttcagtgatctcagtggtagggtaagagaggataaaagagctttacattagcaattaaatgctttgacttaggttacacactctggaaa

SEQ ID NO: 424941 - DNA, 129 bp, Homo Sapiens
aggatgtaatagcattaaaagatcatcaatagaggactcaaagaaattatgacacatcactgcaataaaaatcaatgcagtttactaaaaagaaaatatggcacggagcagtctccatgatacaatatt

SEQ ID NO: 424942 - DNA, 153 bp, Homo Sapiens
taggaaaaggacagagaaagatgaaagtgacctataaaaaagcaatgaccttagaaccaaactaaataggacaccagtgaaggcacaaagtacactactaaaattctcccaaaggcttactcttctggtctgctctactcaaccactactggc

SEQ ID NO: 424943 - DNA, 251 bp, Homo Sapiens
tggggaatttgggactacttttttgttcattatcataagcagaaagagtttcttaaagttaatgcatgtctgacttctaagtaaaatctactgttcccctttctaatcattttctgcaccacaggcagagtcatctttccacttctctgtaaaacacattttcccttctctcaggatataatcccaaatcttttatacagttgaaatggctttgctgggccctgcctatctctccactgtagtctcagatt

SEQ ID NO: 424944 - DNA, 140 bp, Homo Sapiens
ctcggacccactttcagagtagcttcttcctccaaaacggagttttatttcctcaccttattctactataatacttcactttgaattctgtacctgaaaggagccatgagttccgaggtacaactactacaaacggactc

SEQ ID NO: 424945 - DNA, 205 bp, Homo Sapiens
  misc_feature (120)..(120): n is a, c, g, or t
  misc_feature (141)..(141): n is a, c, g, or t
  misc_feature (184)..(184): n is a, c, g, or t
tgtgaaaaaaagcaaagcacaaaaatgtactaacagtataccaatttctttttttgtaagaacgaagaggaaattatacctgcatgctcatgccaaaaattacagaaaggataaacctgngattagtaaggaagtaagcangaatggggtggaaagggaggactacacttcttttgtgtatagntctgacttttgtaacatatta

SEQ ID NO: 424946 - DNA, 113 bp, Homo Sapiens
atgtatatgtgtgtttggagaaggtggggaagaaaaggtagggaaaaccaaagtagaagatactatgcttgtgtaagactttctatctaagcccaagtacaaatatacatacc

SEQ ID NO: 424947 - DNA, 177 bp, Homo Sapiens
caaccacagaaataatagccccatacttgttattcatgaactgtacatgttgatatctcatttacagttatttgcattcaggcatgtcagatagtagagcagaggtaaatgtcagcattttttctagtctaatattttttctttgaaaatgaatctttttaaattttaagatattaa

SEQ ID NO: 424948 - DNA, 307 bp, Homo Sapiens
ataattctattccaagctctcctatttgtaggcaggtcctagtactgctgggaataattgttcttcacttggggctacagaattaaactcggcgtgatttcaagggggaagcgagagaagattgtctttaccttatccgtttccttcacagtcagtcaccaggttctaaaggtgttcaccttagtagtccttcctctctattcctactgccaccatccaagtccagactacttatcctctcacacccagataattgcagcagtcactgttctacctaaccgcaggctcttgcttgccagtgcacatg

SEQ ID NO: 424949 - DNA, 183 bp, Homo Sapiens
attgaagataaagctcaagtctaaaaggaaaacaaaaacacagggggaaggggttgtatacgcaataactctggggcagaaagaattacgggatgtgaagaacattacacgctgtttttctgaacagggagcagtatgtacacacccataacgatgtgagtgctgagcccctaaatatggaaa

SEQ ID NO: 424950 - DNA, 355 bp, Homo Sapiens
  misc_feature (137)..(200): n is a, c, g, or t
ctttccagagtagggtaagaaagtttgcatagtggagatgggtagaggagcaccatcaagtatctccagcttcagccagtgatgccttggcctttagctgctctttaaggcatagggcaaaggttgcagatacttcnnnnnnnnnnnnnnnnnnnnnnnnnnnnnnnnnnnnnnnnnnnnnnnnnnnnnnnnnnnnnnnnctaagattgtccccacttatggagttaatgatccctactgtacctccctcacaggattgtagtggggctagaatgaagaaatcgatgtgaaagtgttttgatagtaaaagctctttatgatgacaggtgattgctctttgcaaccatgagtgttt

SEQ ID NO: 424951 - DNA, 171 bp, Homo Sapiens
taatgaccacccctagagaagacagcaaggatttttaaaaagagagatgaagaatatatacccagaagaagccaagctttggcaagaaaacctttcgagtgtcatttaccatcacttgaaaaatatctaggaaattcctaggaaacaaagcttagggtgggatgaaaatgg

SEQ ID NO: 424952 - DNA, 265 bp, Homo Sapiens
ctttccagagtaggtgcagtgtctggcatggctttgtactaagaggtgacagtagatcatctagcaaacattcaagaaagttccatgtaaacaaaaaggtacgaaataaaacacatgaaaagagaagcaccagaaaatgactcgtctgcattatctaaactccagatgggtaagaacatgcagattacattgaggattatctttcaatgcaatttccacttgagaaactaaattcctggtttgacaacctcatttctacctgtgg

SEQ ID NO: 424953 - DNA, 270 bp, Homo Sapiens
aacattccattcgtagggtagagaactgattttagaagctacattcagtgccaagttgactgaatgcgattgtggctgtttaataacgtttttatttgggtatgttacataaatgcccaccagagttaaatgaataaggatttctctggcccttaggtggatgggtatctaggaaaaattaacaatgccacataacatgaaaggcttaatgcaatcatctgaaagtattataaaggaattagctgcagtgtttcaccctactctggaaag

SEQ ID NO: 424954 - DNA, 244 bp, Homo Sapiens
acattcggctcggacccactttccgagtagaaagtcaaagatcatgcatttttattcctaacccattaaataactctaatgctgaagatggtattaagtgtctaatatctaaagaaaatataaataccttttatagccatttggttttctaataggcaatagtatatttcaagctcagaaatctaagaataagcctttggtcttaactgtattcaactttttaccttgagatttcaatatatgt

SEQ ID NO: 424955 - DNA, 154 bp, Homo Sapiens
gagtaaataggaggttaagagggctgtgaataaaagctctagtgacaggcagggcataaacgaatatatttacaaacttttagaattatcttatataaatactataactttaatacaaaattttcaaatttcatttacaaaatctctgtggtta

SEQ ID NO: 424956 - DNA, 191 bp, Homo Sapiens
taattcgtgctaatgagaaaaacaaaataccatgttcaaaacagatgtatttgaaaacttaatgacattgttccaaaaactagagcatgtatgtatgctgtgcatcatctcagcagacctaaaatatccccaagttgtccctttacagccatcaatatattttacactctggaaagtgctactctggaaag

SEQ ID NO: 424957 - DNA, 387 bp, Homo Sapiens
ggtaagcataaagttttgaacagaatatcctgtcacctaccataaaggctaatgcaattaatcactcaaaatacaggcacccctgaagcaggggacctatttgtgggaggatattgctatgcacagtgaaagaagcacttgtactacccttcccctccccttgacccctgtggacctaatctgtctcatctgaaaggagccaaccaggtcatcctgcccattccctggtgttcaggcaggcagaccttcatttaaaccattcccagacgaatgacatagggtcctgaactgaaaaactaattccctcaaaatagatcctgaacatgacctgtgctccttccactgttctttaggcacttctcttgatctagaagttctttttggcat

SEQ ID NO: 424958 - DNA, 416 bp, Homo Sapiens
cctttccgagtagctttccagagtgcgttatctttttttctcagcataggctgtgattttcctcaagccttccttctctgttagcaatttcattttcaacagattctgttatgtttcctggtaactttttctgtaatgacattgtttttatccccaatgtcttccttggctctgtaattacctttttttatttcattgagtagtttcatcatcttgtctttgggatcctattaattagttttcaataatcttgattttgcatgaatgaattccccatactgcctctcctacccgagagccaactctaacccaggaattatcttggaggatggggagaataggcaaaagatgtcccattcaccattaagtgagacaataattttgctcatatgttatgccctacacctttccaactc

SEQ ID NO: 424959 - DNA, 366 bp, Homo Sapiens
gaagcagacatttccgcgagggtttgtaaatatcttcattgcttttgtctaattgcaaaaataatctgtcgccatgctcttttcaaaaatttccccaaataccgaaacatgtaatataagaagtgaagccttttctgccatcccagcccccgtagacacttcagaggctctttttccgtatgtgtttccatacctacggcactttggttagcagcgtgcatgcctacagaggtgaggattccgagctgtttagaagtgtggccacagagctgtggccacagctgggcttgagtcccatagggctgtttacctgctcagcctccccttctgtaaagtgtgggtgatagtagggcttgatcctgtgga

SEQ ID NO: 424960 - DNA, 165 bp, Homo Sapiens
catgtcttccttaattccttattgattttcccctttctgcaactatttgcctttgagaatatttctctgttttcactgagtttaaaagacttttctgagtcacttcatatgaacaccatcaggcatctttttctagaaaacttctgcactatcttaattttctct

SEQ ID NO: 424961 - DNA, 225 bp, Homo Sapiens
acaatgaagaatagatttttgagatgagatgcagtaaattgatgacattatttttgactcaatttatgatttgcggcttcttatttggaatattttctttgtctatagagtttccttaggtctcctgcttctcttccacctattctgtgttccttgccatatcttccctatacccaagctcagacttctagtgcattgcccagcattcacttctgctgttatatc

SEQ ID NO: 424962 - DNA, 162 bp, Homo Sapiens
catgctcctgccatttccccacaagcatgctgcggccttgcgtgagaggaccagagatctcctgtcgtcttccaggcttgctgcaagtgcagctgagatgaacataagtaatagactcattaattgtttcatcgtgactcaggaaaaccactctggaaagtg

SEQ ID NO: 424963 - DNA, 155 bp, Homo Sapiens
gaggatctgggaagaagaaggggactttggaatgccattcctggctgtgaggggaaagaatggagcaacaagcaaacggtatttttgaagctgataaaatttgctgtgataatctacctgggaggctggctgaggcgaggctggctgaggtgggg

SEQ ID NO: 424964 - DNA, 158 bp, Homo Sapiens
ttctttttctcatctcctctggatacagaccacttcaccacacattctactaatttggaatattaggtaaactttatgtgtcatgtcttgaccagtgtctttattattctgctctaataccagtatttaactttcccagtatctattcctaaatacag

SEQ ID NO: 424965 - DNA, 183 bp, Homo Sapiens
tccagagtagctttccagagtgtaaaagatattgagtgacaattggggggggcatgtcctcatatccgaatatagcattcatataagccatctaagtgtcttaaatagtggataaaaatgatattggcaaggagtagagaactatttttatctatcaacattcagagggaaaagacgaaatct

SEQ ID NO: 424966 - DNA, 163 bp, Homo Sapiens
atcagcaatccccatcagtgctcaagggttaacttaagtttcattgcaccaaatctagtctcaagaacagtgcacctgtatacatagttctttctacctgaaagtccttgcctcagtcctggtcttcctgatctactcatcctccaaggcctactctggaaag

SEQ ID NO: 424967 - DNA, 254 bp, Homo Sapiens
aacaaaacatagaaaagtcaattttttcctcagttagttaaggaaaataggtgagaattaaacccaagccttctagtatttaacctgggattgagtttgtattttggttattataaagataagcatattgatttttgtaactatgttaaaagcttctgtgggctaagcacatctataaaattaacgccactttgttacaagtaatggaaagtttttcatttaaaagagtgtaggtccactcctactctggaaag

SEQ ID NO: 424968 - DNA, 196 bp, Homo Sapiens
gatccccactttcagagtaggtttccaggcttgaatatattcctgggtgaaatatttcagtcccacatcattgtcctggaagtcaatgcaaaatacagtctgcttgcctcatttgtcactctgaatcaaagtcattgtcaagccaagcaatagctgcataataataattgcaaacattcatatagtactattccat

SEQ ID NO: 424969 - DNA, 147 bp, Homo Sapiens
cacttccagtttcttaagcatccgctcaatccttctctaagtaggtgtagttccatagagagaggaaactttggggaaggaattaatcaaaagtctctgggatatatacttttaagtttcctaaaaataacatgctctctcttgcct

SEQ ID NO: 424970 - DNA, 180 bp, Homo Sapiens
ggatgccctgtagagacaaagctcagttcaaaggcgtcattccatcctggtgctaccaataagaagcatggaggattcagcaatactcagtatgcaatcatggatgatcctcttgtcctttcatatactgttcctgtctatttcaatgccttttcttttgcttttcatgctgcagcattc

SEQ ID NO: 424971 - DNA, 167 bp, Homo Sapiens
atcctcaatacttctgtaaaatatagaagaaatagcctcttgctatgggtgatgaagggcgagcgctctctaaaattgatgctatacaagaaatatttaaggatcaactctgtgaaaggcactgttaatgcatgctgggggatatacggattgctaagacacgattc

SEQ ID NO: 424972 - DNA, 293 bp, Homo Sapiens
  misc_feature (79)..(87): n is a, c, g, or t
cagagtaggtgtttctgctggacctaacagtgactacagctgagaaggtaccacgtgaaaggggcaaggaggacaggannnnnnnnnatgaaggaaaagcaaggtaaacgttgggtggctaagtgggaaccaccgcccccatatgttgattgtcttctgagggtaagaacaatatgggagtgtgctgtgaaaaaatatggctgctcaaaaccctccttgagagaagggaccagaccttacttattccccatcctcaaggcggctgccgaggaataaatgaactcactgggtaa

SEQ ID NO: 424973 - DNA, 304 bp, Homo Sapiens
taatgacaaggcactgctgcaataaggatatattgttttgtatgcctgggctaaaggattggatgagctatagagcttcctggtacatttaaaggttaacttttccccctaaccggttgaaatagggaaaactcgctaatcacaatcatcacaaagcaaatataaacaaaattcctagttcccttgcccatgcagctaaaagagttaagacaccagaatagctaggtgcttttcagtttcagttgaggaaaggatgctattcttaaccataaatactctcattttgtctttctactctggaaag

SEQ ID NO: 424974 - DNA, 118 bp, Homo Sapiens
ggtagtaggatgagaagtgctttaaaacgtgcttaatttggaagtcgcaaattcaggcctacagcatgtgaggaaatgaggaaactaggactgttatagagccactttttccctttta

SEQ ID NO: 424975 - DNA, 458 bp, Homo Sapiens
atgctagggtacaaaatgcttttttccacagccagtgctatgtcagtgctaagggttactgtgatgtagcaacttgaagatgatgaatgaatacatttgaagaggggatgtttgaaaataattctatagaactgcatttggtattgggactgttgtctaaaccataacctaaactactttatgcagttaggtaatagtctcatctcatataacaaaaggaataagcagagacagacggagaatgttaggtctgagtgaatccacagtcaggtggaaagagtgtaggcagaagatgcagggaataccttctccctgtaaggtgctgggctggtagctccagaatcccaaggccagagcacaggggtgaaaccccagctagggagagagaattagaatctgcaagaatctcagaaaaacagatttgaatgtctttttatgtggcaaaaccatgggaactg

SEQ ID NO: 424976 - DNA, 178 bp, Homo Sapiens
cataaatccagattgctgcagtttcacactggagcatgtgccagaagatacacgcaggctcttggtgtcttgtgctatcacacattagcaccttgtccatctcccctcacaacgcatttcaaggacaagttcccttctctgctatggccggagcagtcgtgaattgtttgggtcagaa

SEQ ID NO: 424977 - DNA, 309 bp, Homo Sapiens
gagtagaattacaatttggaacctaatctgaataagaagaagctgatcagaaaagaagtagtggatgcctcaaaagaaaacaaccaagacagataggcaggcagaagggcaaggggcacagctagatgtagcaactagactctgagaacaggcttcaaccagacctaaggctgaggtgctaaagacaggaccgaagtctgaggtgctaaaagggaagacaacaggattgaggttctcaaaaatgaaattctggcaatctcacattatttaacatagagggggaaaaaagagggggcttatctaaagaga

SEQ ID NO: 424978 - DNA, 125 bp, Homo Sapiens
aatgtcaggagatctggaaaagccctgtgagaaaacagatagtatccttaatcctctgacctatttactttaaagaataaactagatgtaggcatctaacaacttcagggaagttggtaataatg

SEQ ID NO: 424979 - DNA, 151 bp, Homo Sapiens
gccctggaggaattctatagcaattattatggggattacactttaagaatctctttaatctaaaaagtcttccatccctttagtaagcatttttgagccctcaaccaaacctaggcatgacataaagtgctacaaatgcagacaacagtaa

SEQ ID NO: 424980 - DNA, 289 bp, Homo Sapiens
gcagctcttgggagagcctggccaaggtatctagtgatatccaggtgacatcttgtctacagatgatggaagacaggggtgtaggaattttttgttccctggaatatttgatttcttgaggatttggaggtgacagttctaacgtcatgagagcatcacagcaaaccatctgggtggagaccatgggtaatgtacctggcactcattatcatggtcctctcattcacagcacacatacctttaagacaatcctcacacaccaatatatcctgctcgtaaccttttgaaa

SEQ ID NO: 424981 - DNA, 230 bp, Homo Sapiens
tgagcactggggacagggcatgtccgcccggagcagggcaggagagcacaggcatgtgatgcagccctgggtctgtcgtcccgtttgcgccgggaatgaatcgggtttttctagcctctaagcacagaggtatttttgactcagcaccgtgaagagacgacaatagctcagcttctgccagctgcccgatttagacacgagaccttcactacatatttctgtctcttgcc

SEQ ID NO: 424982 - DNA, 175 bp, Homo Sapiens
ttttaaaaagcagaaaagtagcagacacgatgacatcacaggcagcaaatacctggcactccagaaccactcgccttcctgcatacaaggcagacatgggtcacttagccagccctctttccctgagtgtgaacccagcttcagaatccagttctatgcagcactctggaaagtg

SEQ ID NO: 424983 - DNA, 183 bp, Homo Sapiens
caagcatactttaatttttaattcatcagttaagctgtctttgagttaccatgatattgggcatacctcattattttttacaccaaatgcattttaaaaaggaaaaaggacactgttttatcttctttcttgctgctttaatgaggatggagggataagttacaggctggcacattaaatgta

SEQ ID NO: 424984 - DNA, 205 bp, Homo Sapiens
ctcagttgattgttcctagtaactctttatgaatattaccctgttcttcaatgctcctttccttttatcatcagtaagctataatatttactagctagtatcctcaatatgcatctcatctgtgaataatcgtagccatgtgaagcaagcctataaagggatgacaaatctgggatatccatgacactactcctactctggaaag

SEQ ID NO: 424985 - DNA, 139 bp, Homo Sapiens
tttgagagttatatatgggtggaagcactggtccttgagggtgatggcctattaataatagaagtgctgaaaaggaaaattggcaggggaggcaacaaggaagtaactgaatataaattatatgctactctggaaagtg

SEQ ID NO: 424986 - DNA, 222 bp, Homo Sapiens
agagggtttcctgcatgcctacgctttgcagggttcacttactgttcaggtgttcatgattagttcttttgaagtaatatacttttccattatactgacgataattttttctaaaaattacagacatgaattaataagcttcagttagaatctataattgatacttctccatgattatttgtggtcatacagagtaatcatttggtaattgtatgaacaatc

SEQ ID NO: 424987 - DNA, 220 bp, Homo Sapiens
ctataggaaatagacacgttcaaaccctggggctcacatcatttccctgttcatatggcctgtcctggagctggttaagatattaagttaagggaaagtataaacgttaatgggtttttaccagattcttcccccttacttccgtaaacccagatgctaacaggcctttcaacaaagtatactgagatgaaaattaacgcttaatacactctggaaagtg

SEQ ID NO: 424988 - DNA, 297 bp, Homo Sapiens
agatgatatattatacttcttacatgttattccttatgcctgctgtacctcttcattttctagcttggtgcataagtggtttagatttttctaggatcttagcatttcctcagtagacatgagtagagattttatttcaaatgaattcttaaccttaatgcccagttctttattagttttacatcatcttgtaactaatgctgtttttctttcaccagtgttctctggtacataattttggtgtactttttgtgagctctagctgttatgatggtctcccacactatgtacacgtag

SEQ ID NO: 424989 - DNA, 330 bp, Homo Sapiens
cttcggctcggtacccactttccgagtagagctgagggaaatgttactgtaagagtttatcaagaaatagtgctatatgagtgttggagagtatcaaaatatgattttagtgaaacacatttgtgctttccttcctatgttatgatatttaagatgatagtcaagtttattgtcctgacttcaaagaaatcttaatccttcactggaagttaagtttgaaaaagtccaatttgtatgtgagtcattgttgtgatatcatttagcatttgatggctcattgcactcagactaagtgttagttgttactaattttatttactctaacagtat

SEQ ID NO: 424990 - DNA, 516 bp, Homo Sapiens
  misc_feature (143)..(166): n is a, c, g, or t
acattcagctcggacccactttcagagtagagatttgacattgcccagtgggattttcccatcataagtagtactgagtttgggattccctcccgctattctttttttcttctgcttgaaacaaataaatcttcagtactgannnnnnnnnnnnnnnnnnnnnnnnccatatcagcaaataattggatatctgaaatttttcttgaagtgcttttttggcatttacaagcattttaaattataatgccgtttttcagagatggaataggatgaaggttaaggttggaaatcgaaggtgatcttccccctttagtgaatgagtaactctcagatcctctccagatgtcaaattctgttttgaaattggatgtaactatttacctatctcacaagaccaagatgaaggcatggtggatccattaaaggtttgtttgtacccttctcctctcacataggatcccagaagctacgggacttcccaagaacagtaggaagctgagccatctagaatcaccc

SEQ ID NO: 424991 - DNA, 321 bp, Homo Sapiens
catgcagccttttatatgcctcatcacattatggccagggattctttatccctcctatcatatacctcctcagaatccccttactgctggcttcatagttcattccttttcctgcaggctcatttggatgggctagctgctgagtcgatcagcatcttatagcatggaggcagaattgcagaaggcctatcaggcattaaacagttttgctttctcactggcaaaaatagtcaacactgtgcctctcttcatgcaactttaacatgtacttgacttttaagtatgccatttaggaagctttctttttactatgaatcttat

SEQ ID NO: 424992 - DNA, 250 bp, Homo Sapiens
accccactttcagagtagcttttgcttactcttcctgttcttagccctgtgtctcattcttgcctccccttacactggataactagaaacttttatgggtttactagattgatggcttcctcctcatcagtagcctcttcctcacattattacaggtcaaagctttcctctgccctatcttgtcaagtactacacttccatctgccttctgtctctagcaatttgctaaactttctcatctactgattaa

SEQ ID NO: 424993 - DNA, 246 bp, Homo Sapiens
ggtaagagtttagaaacattactgctagcaaagaaaaaattacctcccttctaaccccttgacatttttaaatcaaaggaccatttgatcctaactaaaagatgctttgagttttatgcaaatgcacctttatcagtatacgtcagaaaaatgtttaccaatagatctctctcccttttttttaaaaagtgaccttgaggggtaaaggtcattcctttgacagaaattgttgtgactgatcttgtg

SEQ ID NO: 424994 - DNA, 194 bp, Homo Sapiens
tcaaactcattggcatggggtccatgagatcttggccttcctgaatgggaatgacttgctcagtgccttcaaaaggtgagccctgaagacaggtaagtacctatttcatcacagatcctggtttcaatggtttctccagtgccactcatcaacttactagctgtatttcttcaacagcctgttaccaatttagg

SEQ ID NO: 424995 - DNA, 368 bp, Homo Sapiens
cgagctggtacccactttcagagtaggggggagccttcataaacttctttattcaactgcaaccagtgagatttatggcatagtatggtaccagatactgacaaagagccattaaaatgataacaaagaacttctagtagcatggaacgatgctcatgaaaagtaaattaaaaagcaggacacaaaactctattatattataaactcaactgcgtacaactgtgttagattaatgtataaagagaataaaagcaaaccacacaaaaagtattggtgacataggtgttaattttctctttttaaatgctctcgtaatttttctcaaacatattttcaattggttgacctcttagggggcacttactcac

SEQ ID NO: 424996 - DNA, 408 bp, Homo Sapiens
gacccactttcagagtagcatttccagagtagcactttccagagtgtgtaacagtgatgactttgtgtggagtgcaaattgtatgcatctcacgatatttacattgaatcatgtaagtatcattgatatgtaagtatgatatgatacacagaatgatgtaaagatctcttgagtgtggtttttgagttctttctatggaaatgtttatgaatttacattcctcagttggtttcctttgtgactaacaatttgttttcacaagataggtcaacaatttgcatttcagtctgttagtgaggttaactaatccatactgaccatggcctcaggggtatctggctaaggctgtgtttgctggtgaaactaagggaagtaagttaaaaatcaaacaactctcttagaaagact

SEQ ID NO: 424997 - DNA, 159 bp, Homo Sapiens
ctagtaaaacaatacaggagggaacaaattggaaaagattaaatttgcaatataggaaataggtcaataaattaaactagcttaacgaagttaaccctggaataaatctttaccacaaaattcatcagtgttgatatcatcttgctactctggaaagtg

SEQ ID NO: 424998 - DNA, 116 bp, Homo Sapiens
ctataaaatttcaagacaccaacaaactaataaccaacaaagcgatggcgagtgaaggtagaattctgcatcatattattaaacagtttatgaagacctaggaacagagacgatta

SEQ ID NO: 424999 - DNA, 211 bp, Homo Sapiens
tcagctcggacccactttcagagtagaatcccctggcctctgcttagcgtctttatccctctcattcacataatggctgcttttcaaggctaagtccagtttcaaagagagcaatgctagcactctgctattctttctttctttgtacatgcctttagacattttaaactaagccttctgtcaaggctgaatatatgtgggatctgaaatg

SEQ ID NO: 425000 - DNA, 244 bp, Homo Sapiens
gacaggtgaaaatcacagagtggcatgaaaatttccaagaatgtctaggtgggaaattccaggtaggtgccagtgcttagctttgtttcagggagcctccagcttaaaaatgcctgctgacatctgttgcctgtcccctgtatttctggctagggcaactgtccttaaataatacttgagccattgggggattttgaagaatttgggtaaagaaacgaagagagaaaagttactctggaaagtg

SEQ ID NO: 425001 - DNA, 218 bp, Homo Sapiens
tacattgacaaagctacaccatttatgctaaaaaatctatgatacatattcatcttgaaaactaaacatatactttccttccatccttctggcaaaattaccccaacttactgtccttttactatggatagcatgagcatttttcctcataaacaacaaagagaattaacactaaacagcaatgaatagaaaactgtagtgtaaatgttttataccac

SEQ ID NO: 425002 - DNA, 291 bp, Homo Sapiens
cgagctcggtacccagaggttgtcagtgatgagcagaacaaagatttgagaagcactttccctgcatctggttcagactctgctcatcaataatttcatccagaattaagcaaagtatttgttactgcacacacagatcataagtgctctgctgcactgtacatctgaaatgcaacaaccactggtttgctctgtctctctctcaacttgatctctatcattaacttcacacctgatttatcatcttcttggggaaaacgcatttataatatcttttgctactctggaaag

SEQ ID NO: 425003 - DNA, 368 bp, Homo Sapiens
  misc_feature (225)..(235): n is a, c, g, or t
cttcagagctggcgtgtacagtgctacattttaaatacctgagaaattattccagggacatactggaaagcattcttccaaaagaggaacccttttccaaattaaagatagacaggtcactaacatagttaacatcaactaatcatagaaaagcctaagagtatttgtcaaaaagattgaaataattggcaaatctaattaacatacagaatagctgtgtaacgnnnnnnnnnnnggggggggcatattgtagatgaaattgcgatcgcaaaattacacatacaaacacacttttcagggaaaaagttatttgggtttcatcaaattcacaaaggaggggccataaacctgcaaaacataaaaatgat

SEQ ID NO: 425004 - DNA, 251 bp, Homo Sapiens
tgtgctaaggaaagaatgagcttctccatcatacacttggatggggctttctccactgtcagttgcccattgacttggtcctaaaagtgggtctgctaccttgttcctcacgtgatccccagggttgagtcttctggacacccctaggggagaaggcccctaaaggccaatggtgtgctcacatgtcctcctggaccctgctagaagtggggcagaggaagtccagctatggctttttacatgcgcaggat

SEQ ID NO: 425005 - DNA, 181 bp, Homo Sapiens
gggacgtggagggatgagggcagttctccggggcacccctgaaaatgaatttcctcctccagagccagggtgaccgggtccctcacagggccaccgtctgcaggcatcaacactcttttgggtctaaatccaattattcctcaagttcttcttggtggcttccttcactctcactctggaa

SEQ ID NO: 425006 - DNA, 106 bp, Homo Sapiens
cagaatcaacatgagaatccagatagcttgccttccacaccaaccaccccctcacatagtctaagctgcagaaaaatctgactcaaaagttatctcagacagaatc

SEQ ID NO: 425007 - DNA, 205 bp, Homo Sapiens
gacccactttcagagtagaagaatgtttcatctaaaagcttgatagaagatattttcagaaaagatctatctacaagcacctgagtgagtattctaactcagcctaggagcactatcccatcagggggaaaacactacagggtgactgtctcttggaataatatatttaaaaatacaacgcatttaattgtaaaagagtcctttc

SEQ ID NO: 425008 - DNA, 175 bp, Homo Sapiens
cactttccagtccattacatcttcagtgttttctctttcatgtaatcccaatggtgtaaagattaaaaaataagagtattttgtctattccacatgacaacaaatagatgcaatcattcccaagcccttacccttccttctaagactttatctaccttcacccctcctctgactc

SEQ ID NO: 425009 - DNA, 284 bp, Homo Sapiens
actacattgataacaattcttgctaaactgagccattcaaggaagggacaatttcaagaaatctcttgtggatgtccattctgtgattatttgactggagaagcattgtctttttaacaaaccagcagtcgtaggcttttcttggctctaggtgaagaggtgacttccctctttgattcagtgttcataattgggctgtctgttagctaaggtggtgagaaaacaatgttaatgaggtcaggggttcaatgcccacgtgggtcagttagtgtttctttgttctt

SEQ ID NO: 425010 - DNA, 156 bp, Homo Sapiens
cacatacacttctagagcatgcttgttcttctgcacagtggcctgatgtgcctttgtctaggtgcatctttcttttttcattctccaaataatatcagcttctttccataaaatctggaagtgcaaaaataggtaaaaacaagacagttctgctct

SEQ ID NO: 425011 - DNA, 135 bp, Homo Sapiens
gggcaaaaaagtaaggaataaagattaaattcacaaaacaagttggtatctttaccttttcatgactgtgatccataaatccaactaaatcagtgttttcaagtccattccaatttaactcatctactctggaaa

SEQ ID NO: 425012 - DNA, 259 bp, Homo Sapiens
gtcctgcaatgagatagataattagaaaatgctgtttttttggcatgtatgatcaaatagcttagagtttttaagtatcttatataatttattgattgatacatattaaagtttccagaagttaaactatgtttaaatggactaaggaatatgtcatttaaaagaaacatgccaaccataaaaattgaattcctcctttgatttccttgttttatggtttggatgcttttatataggctttcataaaatgaggcatagg

SEQ ID NO: 425013 - DNA, 166 bp, Homo Sapiens
acggaagcatatagtattctaatattctttggcaaggagatgaaaacaatccactttccttctctttagccctggtttctacattatcagtgccttgtgctccctaagacataaagacttatttgttagtgggcctacatgatccaccaactgatcccatatcaac

SEQ ID NO: 425014 - DNA, 217 bp, Homo Sapiens
acattcagctcggacccactttccgagtagcactttcctgtgtagaatcttgcaggagttgtctgtatttcctgtatttgactgttgtcctctctagcaaggttgtggaagttttcatggacaatatattgaaatacgttttccaaactgtttgctttctcccccttcctttcagggatgacagtgatttgtagatttggcttctttacataatccc

SEQ ID NO: 425015 - DNA, 157 bp, Homo Sapiens
gaatgcttcttaattcttgacagacttactcactggctgaatggatagataacccagggcactggcttgtcttttcaagtgcttggtctgattgggggaaatggctgggcctttctaggtactgtatggcaaggaaaatcgagctgtggaaaaaagg

SEQ ID NO: 425016 - DNA, 331 bp, Homo Sapiens
  misc_feature (88)..(139): n is a, c, g, or t
acccactttcagagtagctatgataatgaatgtgggctttgaattttaaaaaactttcaagtcttggctatgtcacttgccaacaagnnnnnnnnnnnnnnnnnnnnnnnnnnnnnnnnnnnnnnnnnnnnnnnnnnnnataagaggatcaaatggaaaaaacagtgtattgtggataaaggtacaaataaaattatagatagtctcttcattccaaaaaggggggaaagtatttcttttcagacttgccaggggggaggaatgtaaatgctagctcattcttcctagtaacagatgaggtaatggtttcaaaggtatctactctggaaag

SEQ ID NO: 425017 - DNA, 140 bp, Homo Sapiens
tattgcctagcttgtcttcagggttttcatagatttgggttttacatttaagtctttaatccatcttgagttgatttttgcatatggcaaaaaggtaggggtccagcttcaatcttctgcatatggccagccagttatcc

SEQ ID NO: 425018 - DNA, 544 bp, Homo Sapiens
ctttccagagtagcaagagtttaaaccgaaaggacagtcaaggcttcggttgtagaagaattttccgtacagctaaagaaataggactctgtcctgcagacagtttaagaagaaaagtaacaaggccaaatagctgtgtgttaatgctattgcacagggtggcttgcaaagagggaaaatcaaaagacaagaaaaccaaccaaaaggctgactcagaagttcagtcaaggcagaatgtaggtgtgtgaactaaaacaatgaaatagggatgaaggagaggccatgaaattaagatatttttgaaagctaggatcaacaacttggttagcaatttgaggtttattgtaaagaaccgaggtctctaaggataaatatcaggatttcagtttggatggtgatgccagtaacttagaaaggcaacagaagtaaaagagcaacgttggtcaggaaaaatcatgatttcactgttggacttgctgagtgtaaattgtctgtggagtgttgcgttaaagattggagttggcgtgtagatggtgttttgtgc

SEQ ID NO: 425019 - DNA, 176 bp, Homo Sapiens
  misc_feature (58)..(79): n is a, c, g, or t
gggcataatgaaattctaactgttaataccaatagtatatttttaagtgggatctttnnnnnnnnnnnnnnnnnnnnnngggtgaagtttgtcctgaactagatgctagcaatttagttttgtggtaaaactttaaaatggaaatgtgatgacaaattaaagggtaagatggttct

SEQ ID NO: 425020 - DNA, 133 bp, Homo Sapiens
gtgattcgacaccagtcggcttcaccatggcggcgaagttcgaccccaacgagatcaaaggcgtatacctgaagtgcacccgaagtgaagttcgtggcacttttggcctgggcccccagaacgggcccctggg

SEQ ID NO: 425021 - DNA, 256 bp, Homo Sapiens
  misc_feature (69)..(172): n is a, c, g, or t
cactactggcctttaaatgactataatcaaagacaacatgaaggcaatctgataatagacactaaatgnnnnnnnnnnnnnnnnnnnnnnnnnnnnnnnnnnnnnnnnnnnnnnnnnnnnnnnnnnnnnnnnnnnnnnnnnnnnnnnnnnnnnnnnnnnnnnnnnnnnnnnngatttacagattactcctggttatctgttaccaggagacggatgttcccatacaataaaacctgaaaatgcagggccagtagtg

SEQ ID NO: 425022 - DNA, 119 bp, Homo Sapiens
tgcagtcgactctatagatacccctaataaaagttgacattaatagaatagacagcaatgcagaaaaagaaacctgattctgcctgtgctgtgacattcattatacacttacccaacag

SEQ ID NO: 425023 - DNA, 286 bp, Homo Sapiens
cgcagtcactctagagatccccctactgggcctgacagaagtttcaccagctttctcatccaagtacaagcgtgtaatatacttaataaatttgtcttataagggtaagaaatagtatgtaactacttgaaaaggagataggtagctggttaatttaaacaaaaagcccaaggaagtaaggtgcaggaaaaggataactgcaatgattagtacaggaaacccaaagaagaactgaatggtgggatagatgtactcagagaggccagtagtggagccagtagtgggt

SEQ ID NO: 425024 - DNA, 131 bp, Homo Sapiens
acccactactggcatttaaataaatctggaggtatcatacgacgtgatagctagtgatttcctgggggtgcttacgaaggaattaggctctggttcgcagtttttaaaaattttatatgaagaatatattt

SEQ ID NO: 425025 - DNA, 248 bp, Homo Sapiens
ccttgctaggctctgctaagttctgcttcttgcttccatttactcccataccatggcaaatgcactcccactgaaagacgcctctccatcatccttcacctaaccagattctacccattctttaaggttgtacccaagctccaccttcttggagacttttatgactgctgactcacactattttatctctttccccagcactgactaactggacatcctaaccattatcacgcctgctgactgtttat

SEQ ID NO: 425026 - DNA, 479 bp, Homo Sapiens
  misc_feature (448)..(448): n is a, c, g, or t
ccactactggcccggggaggtatggaagcatggagtgcatggtagcacataacaggaggacccaacctagtcagagggaggaggcatgcggcaagggtcggggaaagcttctctgttccgtgcatattcaggcagataacttatatggaataaaggggcagtgggtggactaagaaaggagagacctccattctgaaagaatgatatgtgccatgaatccaaggtagaaaagagcattcccattcaaggaatgggagcaaggctgggatagctgggctggagaaagtgagactcatggggatgcaggagccaggacttcttggaagggatttggggtttaacctaagggcaatgggaaagcatatgaggtgttcagaattttgtctttaatgggtcattctattctgtgtggagaacggcttgaagaaaggaggcacaaatgcatcangaggggagtatgtcgtaagccagtagtgggt

SEQ ID NO: 425027 - DNA, 229 bp, Homo Sapiens
acgaggagtgctttttggtgtcacggagtgagctttggagtacgggtcgtccgtttgcaaggcaggaggagcactgggctggcgaaggtggaatgccaccattacataaaacagtagtctacacaggcgagcctcaaagaagcaggtgaccacctctccaaagaccttcagctgcaggcctctctgagaagcattaataatggttcctacgaaggcactttctatatac

SEQ ID NO: 425028 - DNA, 299 bp, Homo Sapiens
tggcttgaacaaagaggccagttcctctcctagcatctctgacacccttagcaccaccaggacaagatggccaaggggaccccagacacgtagctataaacctgctcccttctagaacctctgtgcccaggacatatgtctctgctagacagaaggggttgacagagattcacatcagctacccagatgcctctgcacatataacttacatctggcattgggtgtatgcaggaaaagtgacagcacaccctttaggatataagctctatgcgggcaactcgtgtctgtcttcttatgtg

SEQ ID NO: 425029 - DNA, 370 bp, Homo Sapiens
  misc_feature (90)..(172): n is a, c, g, or t
  misc_feature (306)..(306): n is a, c, g, or t
atgtatttgattctctaattgctaaccacagtagtcctctaagctcgtgcttgctctttgttgcagatatttttaggatgctccagtagnnnnnnnnnnnnnnnnnnnnnnnnnnnnnnnnnnnnnnnnnnnnnnnnnnnnnnnnnnnnnnnnnnnnnnnnnnnnnnnnnnntcatattagtaacaaaatcttttagagtggagcaacagtatttttgtctgccaaattgattttaatattcattgccaacaagggtacactgaaacaggccctcttgcatgttcttaatggaattggatcaattnttccagaagagtaccattttgtatcaagagccttgatagtaacatgaaaaatgggggaagctgc

SEQ ID NO: 425030 - DNA, 294 bp, Homo Sapiens
caaagtgggatgattattagatctcatgggcaaggcccaggaatttacatatttaaaatgtctcccagggattctgagggtcattatgatttcctgaggttgcttctgagaacctgcagaattctgatgctctcctagacaccttgtataggtatactgcataccataccaggagacacaatactcaaaaccaattcgtaccacaatttcttctaataggtgggtgggggggattgactataggcttctcatagagccctcacatccccagggcccccaccatttcttttcagt

SEQ ID NO: 425031 - DNA, 320 bp, Homo Sapiens
aatttcaccttggagcaatgcaacagatgatggtgcctccaactgggacctgccgtgcagctcctcgggcaggagactatcagtgacttaagggaccactagggggcgatttaggagtgaacagttttctatccttaagaaagataagccaggaagccttaatttccaaccttaagtcactggagggtattagctcccaggtaaatcctgtttttaattttaactataaatgtaaacagggtctttcattttaacttctccagaaatgtaaacgtggagaactttctgaaagagatatgtgaaaaggggccagtagtggg

SEQ ID NO: 425032 - DNA, 112 bp, Homo Sapiens
acccactactggctactggtgcatctgtggaacacgagttacaggaaacatgcagtgtcaattactaagtaaagccaaacttttcccaaaaagggtgtgccagttcacctat

SEQ ID NO: 425033 - DNA, 437 bp, Homo Sapiens
  misc_feature (166)..(218): n is a, c, g, or t
acccctactggctggctggtgcactcatcattatttatatgttgagtgtatgtctcctgtccaccatgggtggaggcaatttatggactttggggtcagttcagattctgcctcttccactcagtaactggttgccttacgttaagtaatttgctcacccaggttnnnnnnnnnnnnnnnnnnnnnnnnnnnnnnnnnnnnnnnnnnnnnnnnnnnnncgaggactccagtgagataatgtccacctagtagctctttgctttacctgatgtcattatcaagaggtggtggcagagttaatgggctacatttggtagttctcagtgcctttggccccacttgatatttttttctgaaatcagggtccctgcaaacatcagggatcagcccccaaattgggaagagaactctattcttaaaatgtttctggccagtag

SEQ ID NO: 425034 - DNA, 507 bp, Homo Sapiens
  misc_feature (369)..(388): n is a, c, g, or t
gcagatattctcccagattgccattcccattactagcactcagaagactagaggtataaatctctagaaggagtgaaacaggaggtctacaggcttaacaggcacagttgaggatggaagtatcatactgacaacagaaggaataaataggaatatacacactgattgctgaaacccactctgttcattcaaaaccctctttgcctactcaaaggttcctagaagatagcagccaagcctataccttctactaaggaagtggaaagattgtgttctactgatcgttctgaagatgagtactactgaatttggcaagccctagagaaaatacctaaaaatactgataaggtctacctataatcgctaagnnnnnnnnnnnnnnnnnnnncctataatcgggagtctaccagccactccaccatccaaatacatacaatttccaatcacttttaaccatgagcagttaaacaagagtcaccacaaataccagaaaagccttaatatgaa

SEQ ID NO: 425035 - DNA, 224 bp, Homo Sapiens
acacattttatgagaggggagagggaacttgaagaatacacgtatctcttatcatctcagtaacacacgaggaacccgcttgctcctctcactactcaaagagagggatatgaaaatgggattcacgctttggtacctttgctatacacgagacacccccagaaaaattttgcgtataccgcgttcttgatcctaacctcaagggggacccaactccaatatcc

SEQ ID NO: 425036 - DNA, 182 bp, Homo Sapiens
agtgctttcctcctcactgccataaaaatggtctcgttcctcatgtcatgggaggagcataggaaggaacatagggtcacagttatctatgagggtgagataaatgctgtgatggtcttcatgctacaaaaatttgtcgaacacctactgtctaacaaacatgccagtaagccagtagtggg

SEQ ID NO: 425037 - DNA, 213 bp, Homo Sapiens
cactactggccaaattaagggagtcgcagagagagctgcagctggtgcgattgcattcaggttattttgggtgagtgataagcatcaagatatgaaacaacagcaggctcggagactgcgagctgcacaggcagaaatgggctcttgcctggcttgatggcaaaccgttctgtcttggaaggcagttcaacttacctgacagtggctagaacc

SEQ ID NO: 425038 - DNA, 195 bp, Homo Sapiens
tacccactactggccagattggtgaaaatagcaccttggcaagactaatgaagcatcttaacacacagcgcagttcttaaattgtagcaggtgttctataattacacattaaatagtgaagtcagaaacatgcctttccacactgataggtactagcattagctgccgctattagacacatgttttatgagagag

SEQ ID NO: 425039 - DNA, 142 bp, Homo Sapiens
ctgagaaatgatgagaggaggaaaaataattacttagagatgctccaggactcaacctttgttctgtgtgttcctgatgttaaggtaaaactgcatgcaaaaatgccaaagaatcttgacaaggatcttgaaatgcttttca

SEQ ID NO: 425040 - DNA, 282 bp, Homo Sapiens
tactggccttattcacctttcatcttgctcccacatattgtccaagtgccattctcctgcaaggccgtgggcatcacccctctagtctggattagaaacatcctatggaccccaaagtacattaagcacatgccactttgccctgtcattgctatttgactcgtttgtcttgttcctgcagaccacaaatatcttgagaacaggaactggtgcctttgcaatattcattgttgcttttctagtgctttaaaaggtagagaataagtctatatacaaggctgc

SEQ ID NO: 425041 - DNA, 159 bp, Homo Sapiens
aggatcagagggtgcaacctgaatttgagtacaggtttttgccacagatcttgcccttagcttagagcataccgggagcggtacctaaatgctcaggctcagctgtgaagatacaaggaaatggaaaacccattcagcacctcaacatctccagctaca

SEQ ID NO: 425042 - DNA, 473 bp, Homo Sapiens
agccagtgcgtagagactggaatgtgggacgtgctcagaaaagggtagttatcactgctgctgagtaacgagaggaggctataggagaatgttcatagccccctacctctacctttgcccccaagtcagtaagcggcaactaaaggcagggagccatctcggaagtgctggaggcccacactcaaggactccaagtgtgactgatattaaagaacagcaacgtagattttagggcataatctgtctaccccattggtactttgaacacttcaagtaattattatctctgttataataaataatgcaattgaggttgagagagtgtaaatggctatggctattcaaagtgacacagctaaccacaaaaatcaaggtttacacacagtacttcactggccaaggccccccgccccagaggtcactgaccgctagtgttctagtggttaatgttgttagactgtttgttttttctt

SEQ ID NO: 425043 - DNA, 199 bp, Homo Sapiens
acccactactggctgacccactactggctggcggggccttgtttcagaactcctgcccatggtcttgcttttcagttaacttgcaaaattctgccgccacatgccttatttcagctctccttgatatggtttcggttttaaggccgtttcagatgctcttcctttcgatcttgtaaaccagtagtagggccagtagtgg

SEQ ID NO: 425044 - DNA, 344 bp, Homo Sapiens
  misc_feature (76)..(121): n is a, c, g, or t
gagatccaactataaccgggcaagccacttttctgagactgtttcgtcttcttagagggtgaagatgaagccctannnnnnnnnnnnnnnnnnnnnnnnnnnnnnnnnnnnnnnnnnnnnnttatgttgtatacgtatattaaggttcaattagaggagacatgtacagggatcttaataacccattccagagttttagcacgaatacatggcagcatattttttatttgtaattgtctttgttacttgatagtgaacctctctaacttctccattgcttatggtgcccaaaataggagatgatcttcacaaaagagaatctcagactgaaattctggggaaag

SEQ ID NO: 425045 - DNA, 267 bp, Homo Sapiens
atgtgtcctcacatcgatttcacgacaggaatgtgatacggatctcaacaaccagggaacccagtccggcacccgccatctgcagcagcatgactgactaatctttcacctgagcccacactgtacaggagtgacttcacatcattggctatcccctactgattcgtcatataatgcagtaatcactccctcctttcaatggtgcattataatataccccataggacagccagtctcctatagggctctccttggcattatttgtaa

SEQ ID NO: 425046 - DNA, 111 bp, Homo Sapiens
ccactactggctgcttgggctgtgagagatccgtctgctttgaaggggctacagatggcattctcgactctagcagccttcggagcaacatgctcctttggaaaagaaaaa

SEQ ID NO: 425047 - DNA, 202 bp, Homo Sapiens
agctcaagggaaacaccatatggacagccagggttccctaagaatcaacccaaccagatcatcccacagaggaaactgtaatatcagtgtcccttccaatcagttttgtagtacacaactcttaaggatcatcagaaatgtaatgaaagcctctactgtaacagacagagaccaaagaaaagaaacagagccagtagtgggt

SEQ ID NO: 425048 - DNA, 101 bp, Homo Sapiens
ttgctgctcaggattcagaacacctgacatatgacccttgaccactaaataccctccagaaagaagctgataacagagcggataccgacaattatggccag

SEQ ID NO: 425049 - DNA, 124 bp, Homo Sapiens
acccactctggcctaatgaggtactctgtataccacttttttttaaatgagcagagtgtggctatttactctacatgaaaaagatatggtatattatacatgttttcttcctagtttcaaagag

SEQ ID NO: 425050 - DNA, 121 bp, Homo Sapiens
ctggctgagaacaaatatatactaaaatatggcaaaatctagggaagtttggattttaccgtcacccaataattccagtcccagaaacgtaacctaaaacagtaattttcggccagtagtg

SEQ ID NO: 425051 - DNA, 209 bp, Homo Sapiens
taccacatggattcttagagcgtaactgctgccccatggaccaggttagctaagagaggttccatgaaactgctgttgcagaaatgcttctaactataaaatgccaaacctgggaaagaatgtttggattctcatagcctggatcagtaggacactgccttggcgtgctggtgccccacccccaactcacccaggccagccagtagtgg

SEQ ID NO: 425052 - DNA, 192 bp, Homo Sapiens
catttagaagacacagagatgaaacacagagatcagtcaaagctcgtacatgtcgagttagataccgtgtttaggtcagaatctttcgttgctactcatttattagtatgaaatcatgtattttttactatttgggtaagagtaaaaaattgtcctgcaatcataaaagaaattttttaacagtcatattag

SEQ ID NO: 425053 - DNA, 142 bp, Homo Sapiens
  misc_feature (41)..(41): n is a, c, g, or t
tatttcaatccgtgtttgttgattaaatgaccaagccctgngattctgtggctgcagctgtgaagaaatcatagcagagattttttccccagatcccagagaaacgcagaattcaggcctctgcttcgcaggctgactgaca

SEQ ID NO: 425054 - DNA, 397 bp, Homo Sapiens
gtcatactgtctcccctattgacaccccagccaggatcacaccaatacctccaacatcaatcagagtcaacaagaatggaaaacagactaaagtaacttctatggacagggctgggtctattcttaccttctgcaaatggttcccactcataaaaccggcccatgaatggcttgttgttgtaggatgcacactgtacctcccggatacttctactgctttctggacatacgttggtgttgcacagcttgtactgccgataggcccgatgcatgagattgctgtatatcgggcacgctgagagaagctctgagttgccccatgggtccccacaccgtggttgttgcttgtttctgggctgtgaaagagacttgaagctgcatggtagccttgatcatg

SEQ ID NO: 425055 - DNA, 193 bp, Homo Sapiens
agaatctccctgtgtttttatttcctgtactgggtgattgattacagaagagcaaattagctcctactgcttttaagtgcattttctttcttaaagagaagatgatgtgagcattacttctccctgtccactgtgtgccttggctttgggcctgtagtcactgcagctttggtagggccttcctggaagggag

SEQ ID NO: 425056 - DNA, 113 bp, Homo Sapiens
gactctagaagatcccctcctctacagtggatgcttagaaaaaagaactgtatcaagatgtagtataaagactgatcaaaatacaattctttgttcaaacaagatccttacag

SEQ ID NO: 425057 - DNA, 265 bp, Homo Sapiens
ctactggccatgcacctgctccctacaccctggtccctgcagagggaacgactcagagtgccccttacgtgttgatttaggtgcttgccagaatcagagattgtctgaggagtaacttaatttgagttccttcaaaataatcagtgagatggaaacttgagaacagcctcggtccgctttgggaagtagagaccgcctttcattgctcagtgggcagctgccatctgtgctgctggtgttggccatagtggagccagtagtgggt

SEQ ID NO: 425058 - DNA, 371 bp, Homo Sapiens
cagttacagctgctcttaacggttagatatctttctatacctttttttctacatgtatgaaacgcactgtcactatcaagaacaacagtgctatgcattttgtaagccttcgtgttataatcggttataatgtagacagtgagtagatgcccagagtatctgtggtgttgtaatatatttatctatagctgcgtgttttacctttccccaagtttagatatcataatgaagcatttaattcatgcttgttcacttgctcttcatcgcattacacactgggtgatctagaaaagaatgttaattggaaggggcctccttgcagtgaatcctcagcagccaggtagcagaactactccttcttatgtaatagt

SEQ ID NO: 425059 - DNA, 180 bp, Homo Sapiens
cactactggccctgcaaggctcaggagagtgcttgacgctcccagaatgagacaatgacctagccagaacattaaggagactacacccgtccttcagactccaaagggaaagctaggacggcagcagagtcatcctaaggtgaggcactccaggataacattttcaatatctttccttaa

SEQ ID NO: 425060 - DNA, 325 bp, Homo Sapiens
aacaagcctcaaagagatgcatcagccacagctgtctggcaagaggcctcacctccccctgctggaaggatatggacctgaggctgccgggaccaaccaccacacataagctgagagtgaagccaacacagtggaatctggagccaaagatggtgagaaatggagtcttaatgatattctttgtgtctctgatcaagctgtacctaaagcctggacttttcaggggcatgagacaaaaaccttcctttttggctaagctgctttgagttggccttgctatctcgtgaaaatgaaaaggttcaagactgatacaatctcttctcag

SEQ ID NO: 425061 - DNA, 235 bp, Homo Sapiens
accccactactggctgggaagtgttgaaaatgcttccaatgctgtggactgggagggttggtggatgaagatacctgcttatctcggattttgcaaatataaggttagtctatcaatgattgcctaactgtggcaacaatcaatagtatcacaaccagtgactaagaaatataaggactatgtatttaacacttgaccctctagttgcatctgtgtttacaaatgagggaccgac

SEQ ID NO: 425062 - DNA, 143 bp, Homo Sapiens
tctctttcgatagtaatacctaaaaacctaaataatatcagaataggaagagttttcagtagttacttgttgattctccaaacaaaggttattgctttttaccatattccatgtctctcaaaatcaacgccagccaagcttca

SEQ ID NO: 425063 - DNA, 281 bp, Homo Sapiens
aaacataacaaaatgaacttaagacacaaaacttttaagaaggaagcaaagctataaatagaccacaaaagataaacagaggaaatagtaaagaaacagtcacccaaaagaagggaatcgacagaaaacagaagaataggaatagacatcttatttttgtcccatttgatttttgtaagagcatacaaattgagatgtgttcctcaatcaacagatttcctggtgtgaccttggtatacaggtctatctttgtacactccactgacccagagggccactca

SEQ ID NO: 425064 - DNA, 231 bp, Homo Sapiens
ctgttatgcaagtggagatattgggagataagctgcttactcagacagtttgggcatgatgaagaaatcataataaactggaaaattaagattaaaatatgggcataattagtagtttttaatgtgccaaatactgtattgctgaacacataattaacggggtcagaaactcccagtgattgtcagcaactccagctcatagtagctcaacattctattcagaaacatcta

SEQ ID NO: 425065 - DNA, 140 bp, Homo Sapiens
tttatgcattcataagcaacaaatacaaaaacagtgaagcatcaccatgtatcagcacgtgacagagagaagggctaacacaggaggaactgctcaaagacaggagacacagaacttcaacggagccatcatcttgtcag

SEQ ID NO: 425066 - DNA, 135 bp, Homo Sapiens
acccactactggcaggagtctgggatggcagaaccagagtgataagacagctgcttctttctgttgctctcccacccttaacttgagggttccctccaaggtggttgctctagccactgacagcacttccacctt

SEQ ID NO: 425067 - DNA, 360 bp, Homo Sapiens
cccactactggccagaaggtttaggactgttatttttctgtatagtacggagactatcatattttcttctatgtacacacctagcgaatgctagtggaagttttgaaaagaaagtgaagctagaggaaggagtagtaattttggaaaataaggcactacttcaaggctttaggcatccggaaggcgctaataagatcatactgtgtctggaagataaaagacaaagattccaatggaaaaaggtaacaaaaactactgctactctgcaatgttaattaatgtgagttttttagttagtgtttcagagttatatgtgcttgagcctccttatagccagtagtgggtaagccagtagtgggt

SEQ ID NO: 425068 - DNA, 220 bp, Homo Sapiens
agcaatataagaaaagaagttaaaaggatggggaggcagggcacagtgtgtgaatgtaagaaactgtgtaagcaggccaggctccctaagaatcagcttccttagtgatttttaatttgggtggtggagtcacagatcctttggagaatatgttgaaggctacgcactccctccctggccacacacgacccttttgcttattattttatggaattaatgg

SEQ ID NO: 425069 - DNA, 156 bp, Homo Sapiens
acccactactggcgacccactactgctactccagagaatcatgaatggggcagtggggaaacacagaaacagattccatgaaatcagccatgcaagattatttgaagataatgacactgggcttaaaggaaatccattacaaatggccagtagtgg

SEQ ID NO: 425070 - DNA, 121 bp, Homo Sapiens
atcccagaggttggggagggatgagcagggaagaggggactccaaaatggagtcctataggcttagtaggggttggttaactgaggaagatatggatggccagttaaaggccagtagtggg

SEQ ID NO: 425071 - DNA, 469 bp, Homo Sapiens
actactggctggggacttctgctctcagctgccaagatgagctctcagaaccttaagacctggaccccatctctggactccaggtccctggagagacactggagcccagaatccacaaggcttagagaaatcagggctgttaggaagtgtttttaaatgcacttgctttaaaatgagtaaaaggctaaggaggacacgaatgccagcctgcagctccagccttgaaattcagagcccaggacagaagcagccacccacttgcagtagcgttatgtttggcggcaggaggggatctcagaggagagaagtccacttctgagtcctgactctttaaactgaactaatccagtcttgagaggaaggcccctggaacaccttgctgagctcttcttggttctggggctgacaggcaccttagggagacttttaggagactttcaggggtctctgttaggtggttgtgggatgc

SEQ ID NO: 425072 - DNA, 313 bp, Homo Sapiens
gtgcttggagaatggcaggcactatgcaagttattagcttttgttttttgggaggtttatttatgaatccatctgtttgaatctgggaaatcccaataaactagctgaaaatggggatagtaaaaatttaaaagaatctaaatgttaatagcatcacaaagtaatgaagaaacatctcacccctctgaatctgaaggtcttacaaacactttgacttcacttatctttaaacacataacaggatgcagaacagttcttttcctatggtctctaaattgtggttgaactcttgaagcaaggatgagaggtgcta

SEQ ID NO: 425073 - DNA, 216 bp, Homo Sapiens
acaaattttgtaccaggacacacgaggtactggatccggggggggctagaggctcacccccgcagagtcccacacgaaatgtccccgggggctgcccatctgctatgggttggggcaggggcctgtgggaggatgcctggctcaacctcctgccctaggcctggagccacatgggccccactcacagaagaccagagtgggtcgggtaccgactca

SEQ ID NO: 425074 - DNA, 199 bp, Homo Sapiens
tgcagtcgactctataggagaccccacccactcctggccgaactatatcaaatgtattagaggtacagatgaaacttatatgacaaaacaatccattagtttttattcattttcactctttatccagctgacactccataagccatcattacaatactttggccactatcctaaataccttggctgcactgtcattttg

SEQ ID NO: 425075 - DNA, 111 bp, Homo Sapiens
acccactactggtgacccactactggtgacccactactggtgacccactactggtgacccactactggtgacccactactggctgacccactactggctgacccactactg

SEQ ID NO: 425076 - DNA, 383 bp, Homo Sapiens
acatacttcagttataaatggtagaacctgtatttcactcaagcagtctggtgtcacgcgattaacactagactatgttgtctctcaaaaactcatcctgattaccaaggcaagtatttgtaagtctaggctattattataaagttcgaaatttgcctacttcacatgccaaagacataaagaaggaattataggagttggcttcagaatttaggacttgacctaagctaatcagagaaactcagaaccaggctctttcttggagtttgcttataaatccaaaatcctaactgaaaggcacctacaacggtaatagatgctctctgctctactgtctagcagctcttcaaagcaaggtaatcccttccgcggaagtatgtagt

SEQ ID NO: 425077 - DNA, 527 bp, Homo Sapiens
taaagaaagaaaacttatcataggctcccaggagcatatatatgactaacaagttatctataccttgctgatagttccactattcctcgtgtttgacagaaatagactcttagtttaggaactcctcattagctgtttccaggagcagtggggtatcattaagatgcttcttaatttcttctatgcaactaaaatacaacgtgaagatacgatgtctctgaaatgataaagctacatttgtcaaaaagcacatattttccattcgacattttggcttacagaaatgaaaactacagaatgactttttcctttatctgggtctgtgctgtgtatttacctatttaaaaagatgtacaggtgaaaaattattttttgaaatgaccttgtctgaatcaagatgcacactcttgcagcaacatcacagggtgtctctgtcactgaggactctgtcctcatttgtgtgggctgactgggtcgctggctgtgggaggcacacatttgctatcttggtgcggaagtatgtagtc

SEQ ID NO: 425078 - DNA, 200 bp, Homo Sapiens
ggctgcttcccgggagcgcgtcgttttctcggtgtagcgaaactctaaacccttcttgtttacacaaagccgcaagagagaactttttagccagaagctgcaaaggaagctgggttttgccgctttagctggtagtaaaagaggcaataaagaagcgagggtagcagagcaagcgagtgcctgggccggaagtatgtagt

SEQ ID NO: 425079 - DNA, 260 bp, Homo Sapiens
gtgtgaggactacatacttccgctgtagtcataccatagggaaattatggcaaattttaacatgtacaagaatgacaacaaaattttagaaaccaccaaatatccaccaataaaggtatggaaagtgaactatgacactcatatttccgctagcacagcagttaaaataaatgatctaaatctaaagtatcagcataaagctcaaaaggtaatactgaacacagaaagcaagttgcagaaagatcccggaagtatgtagt

SEQ ID NO: 425080 - DNA, 376 bp, Homo Sapiens
cacatgctatgtcacggggcttcaggcgagtcactcctctctgagccgccgcctcctggaaaataacacaggtataactacggtgccgtcttccttcactgtgttggggatgacatgaatgaaatacatgaagaacttcagcctttgatcaacgtcactgttgtcatcattattctctctcctctggctgacttgaccactcctgtccagggtccttgcccccatgttccccttggcacatcctccacacgttttataaaagctgccattacagagcgctgaccgtgtgcaggacagcaagcccaaactgccatgctcccttcaccatcacaacatgcccaccaggcaggtgccagtgccctcggaagtatgtagt

SEQ ID NO: 425081 - DNA, 568 bp, Homo Sapiens
ctccttgggtctcttcctgcacagaaacagagcaagggcctgctcaatggttttacggtttgatatgtttgtgattctacagtaagatagcaaaagagtacagaagcatttcagatttcgtatgtccagactaaaaggttgttgggatgaggaccattttgctgaagggaaacaaatttggaccagaaggcaatagtttatatggcttatctctgggtatgccctagagaaaggcttttagagtctacttggactaaagtatagaaaagaaagaattaagacaatatggacagatagtaaatttataggaattcaattgagaggcaggcattctcaagcctgtctcacgggtagagctacccacagaaacccagatctctaagtatactactactgacaacagataaaaacatcatgcatgggagaaggtatcagaccaggagagaatcaaaacagctctcttggaagtgatggcatttgcggggagcttcaaaggacagatgcaattcctatcagtggagatgagtgcggacagtagaaaaagccaggtttggcggaagtatgtagt

SEQ ID NO: 425082 - DNA, 248 bp, Homo Sapiens
ctagtcggtacttctctacatgtctgaggagtcacaatatccgtgagtggcaaaatacactatcaatatagtcagtactaaattaaaaactgaatgtttataaggtaaagagaagtagatgctcaataagcttaaaaggttttgaggcaatggttaagaactaagataaaccttggacaatagtcaggacttggataagcagatcggaggacaaaaggagtaatcgttcatacaagaccatacgagaa

SEQ ID NO: 425083 - DNA, 172 bp, Homo Sapiens
tctgtctatctctcttggggagatgtttccacggagttatttgtagttcagaagttcaggattgtccgatcaaggttgtccaggtcagtgggatgctttggttttggaggtagaatagcataagcatgaactcaggctccaggtaccatttgagaatagtaactccaaagtc

SEQ ID NO: 425084 - DNA, 167 bp, Homo Sapiens
gcgtagttctcgtatttgtagtacatggttatatacagaacatttgctatgaatgaaacacccagctgccaggtgaggtgaggctttagggcaggcttccaaacttttactgtgccaggacacccttggcatctgcagaagatgaaggacccctggttagaaacatg

SEQ ID NO: 425085 - DNA, 395 bp, Homo Sapiens
atgactactcttactgcctctgagattgcttctgtggtgttaacattgtttcttttcaggcccatcttatgtaagacaggaagagacccagtttcatgggcatgtaacctgttgggttgcacagggccctatgctcagaagggctccatatttgccatcttaaaacttgtaataatactatctttgaacttgtgttttataaatgatgtctgatgggacaatggagtatgtgccagtggcttggagccttggctcatgcacttcctcacttcctgtcacctgcctgtctccctggacaagatcctaaccatcctctcctctgctcgctggtgccctaggaatcgtccagcttcctttttcccacctgcacttgtgaccatgaccatgtacgagaa

SEQ ID NO: 425086 - DNA, 421 bp, Homo Sapiens
attagccgaatttagggactcgacacattataaatcgaaaaaattattgtcaataatctgtctgtgttataaaagctgtaaataaagccaggacttgtgagcaggccatctgtgccagcacctgtatagaggcacatactagatgtcttctctttgcaatctgaatttttacttgtttcccataattgaagttctttgcaaactattttattgcactaagaaaaatgaaaaagagaaatagaatgggtatgagattgttcccaaattgcttttgttaagagggagacatttagaaatgtatattatcatgctggccaagttttgcctcctatttctttagacaactaagtgatctgcttaaagagccaatattcctgcaggcttagctaatttaaatgacttaggctaaacaactggcaaa

SEQ ID NO: 425087 - DNA, 233 bp, Homo Sapiens
ggaaaatcgctgttaatagactgattaattcatcaatataaacacgacaagcataggaatttagagtaataagtaacttcaaatcaacactgggcaaggcttaactgatttgaccaaacagctacagacatgctcatatactgtgcaaccacaggtaaaaacttcttccaactaccagaatctgtacatctaactaagtctgatccttcaaagtgatcgccttaagaaagtgt

SEQ ID NO: 425088 - DNA, 157 bp, Homo Sapiens
  misc_feature (23)..(23): n is a, c, g, or t
  misc_feature (140)..(140): n is a, c, g, or t
ctttctcgtacatggtttctcgntacatggtttctcgtacatggtttatcgtacatggtcacaacataacagctaaaactgttagacttaaagaagaaaacaggcgaatattttcacaagttggggtaagcaaaagtccnttggaaagaaccatgta

SEQ ID NO: 425089 - DNA, 126 bp, Homo Sapiens
tggccgtcattttacaaggagcggctagcacgtaacgatatcacatggacagaaggcaggcagacatatccaggcttgactgtggactgtccacttagtgtatgcatgacggaccatgtacgagaa

SEQ ID NO: 425090 - DNA, 504 bp, Homo Sapiens
  misc_feature (343)..(433): n is a, c, g, or t
gctgatagtggtgcacctggcagatagcaagtgacgggcaaatcacgtgcctcctagaatgacataccaagaaggctgccacatcgcttctaggaacttctgccaaaaatgcatgatgtgaataattggtaaacaaccatgttcagattcaggggcactttatacaatacgtattctttggcagtgttactgtcgtgaagcccagataaagacagaacaactggtccagagtaaaggaaatgtgactggccaaattcaacaagtgagccaggcactccttttgctacaaaggcacgctattggaacacttggtgacatctgaataagatctgtagattacatnnnnnnnnnnnnnnnnnnnnnnnnnnnnnnnnnnnnnnnnnnnnnnnnnnnnnnnnnnnnnnnnnnnnnnnnnnnnnnnnnnnnnnnnnnncttcatatcagggttaaagggccatgcatcatctcacaaattactctcagtggtcaacggtcggggtaagg

SEQ ID NO: 425091 - DNA, 690 bp, Homo Sapiens
cacagggacgtaatctgcgtaccacatttgcatttggagtgcatctgttttgcattcatttaatcttgttgagatggtttgcttgttgacctactcagtcagttatcttttcacctttgtgagttgagagctttgtgtattaaatctgtaaaactttgcatcgtggaaagtgacataatctgtagcagacccatgctgtttttagatgcatcttcattgtggtagtgacagtgattgagaaactttacatgtttttctgtgctatttcagaatatgccttctgaattcagctagaggtggagtcaaaaacaacagaatactatatttttgtttctctgatttaggtaaaatacctcttttctgacaagactaggactcttacatagactaccatgaactaaaagaagcacaacattgccagagtaacctgtggtacgtgtattaatcacttactgaacattttacttgcattctttcaagaaaatgagtttacttttagatacttagtcaaattatcttgactttctgatgtttttaaagagtatttataatagatttagttatttcattaatattgaatgtatttagaactaaatgcataccaaaggaaactgaacagttaaaacatggtttatttctgcaaatataacttagtgagaaatcccaggaatctgactttgtgtttctatc

SEQ ID NO: 425092 - DNA, 415 bp, Homo Sapiens
agctgaaacgcaccaggcctaatttcttcaagaaaataaacacatttcattaaaaacaataacattactcctcttattactgaaacagcactttaaattaattgggtacacatgctataattccgaaccttaatttaacttcttctaccaagccagctcactcagaagtttttaagtggcaataaaaatgtaagaggttagaaaatgcacgaggttagaaaatgcacaaactgaattacacattattaaatttacaaaatgaaattaaatctacacacatttactgaatggctacacaaagatggataagacaagtttgtcatccttacagaatttgaataaataacacggaattccaagtcaagagaacattaaactcataagcgattatttgttttgtgaccatgtacgagaa

SEQ ID NO: 425093 - DNA, 563 bp, Homo Sapiens
atacatctactacgtaataaatatgagacatcatgaaagtcacgtaaaccctagtcagtccttagaaattaaatgtccaattatgagctattcagaagtttgagtctatatttcaatatgtttttactatacttgaaagagccctttaaatataacaaagagaaagagagaagcccactccacgtgatgtaagtctgatgatcaaatatggttccacatttttcttacatgcattggcctagggtgttttcacacatggtgttttagaagtgcctgactttaaaaataatgttatggaaatcctcatggtgagaagagcaaggctacttataagctatgaatagcatctgaggcgagaattctaacagtcatttctgggctgtatgttcttagaaagttacttcttcggtattatttatttcaggattatcttaatctcataatggtctagagactagttagtccttaaccatcttaaaaactaggaaccattagttgggttctttaacacagagctgtgacaactggctcaagatgtactcatgggacacctgtattccaca

SEQ ID NO: 425094 - DNA, 308 bp, Homo Sapiens
tgtgcaggtcatagcaccatttacagcgtttatgagtgtccccagcagatccaacatggcatgtgagattgaagcttggaggacatgtcgctttgcaggaaacaatctggttaagcagaggacccggccatttattggtgggttctggcgctttcaagaatgtgaagaatgagtggccaaagttaacaaaggagcatgcacagggatgggggtcacacccactttgtagagtttaagaatagtaagggacctacgggaacttctcaaggtaataggtggcatgtcttctttccctggctagacccagg

SEQ ID NO: 425095 - DNA, 156 bp, Homo Sapiens
aacacaaaagtacttcccccaaacagctctccttattaggtagaggaggagagagttctgtaatacttgtaaattattcagaccctgtcacactttaagtaactcagcctaagaccattattatacctgtacttcataccgctggctagacccagg

SEQ ID NO: 425096 - DNA, 112 bp, Homo Sapiens
  misc_feature (46)..(54): n is a, c, g, or t
cctcccgggtctagccaggccagcggatttccttttctaactttannnnnnnnnaatgtcctgtagactcatcgtaaatcatttccaatctaattctctggctagacgcagg

SEQ ID NO: 425097 - DNA, 416 bp, Homo Sapiens
gcgctctacgaggatcccggtctagcaggggctgcagaactaattttctttgagccttaataactcattgtgaaactggaatcataacaactatcttgtctggttgttctgaaaaacagagactcccacatagaagaatgcactaaatggtagcgattattatactaagatctacaaaaccaactgctttattatgaccaagattgagaccataaaagagttaccacatccaagttttggtgtttatgtcccatcagaggcaccacaggaatgaacagccaggatgagcatgtgtttgcataagcatgggtttcacttttttaattgctgccaacattaatgcttgttctatcctgtaactgtttcaaagtaactgttccaattggctactgcttatatatctggctagacccagg

SEQ ID NO: 425098 - DNA, 257 bp, Homo Sapiens
  misc_feature (146)..(146): n is a, c, g, or t
ctctagaggagtcccccggggtctagccagctaatcattggtggagttgaacagattcttccacggggtctctttccatgctccctgccactacactggagcagactcctgaccagactgaaaaaaagtcttctcatctcttcctngttttagtttagcttctgcatcactggcagataaatcttcagtaagccaagttctcatcaggttgtacctccagtaggctccacaacctctccttcctggctagacccagg

SEQ ID NO: 425099 - DNA, 425 bp, Homo Sapiens
agtaagggcactccaattagacacatcagatccaggacaaaaaacatgggcacaaaatgagggcttccaaataaatgttcaaaagaaagtagacaaaggcaagaggctgagaatctgtgcttgtgggcgaagccaggaaataaggataaaccacagaaagaagaaccatcatgacaatgtgcctttcacaaccgtctttctcactaccgctgcccctgggggcacatgatctcagacacacccaggtgcactggaccaactctaaagacaagacagagataacagggggagcagaatctccagacacttctgcttcatgacctggcataaccttcctggacttgggcattctctccggggacaagttcccaggcctatcagagcagctggttgcttgtttgttcacctgtcagcaaatcgagcta

SEQ ID NO: 425100 - DNA, 198 bp, Homo Sapiens
actagaggaccccctgggtctagcagcttgggaaaccatgttactctctgagactaaattgtgtcatctgtcaactaggcataattataccttccctgtctaccacataagatgactgatccagtgaggtgaagatacaggttagcatatagtataaactttatccttactaatctcttaaaacctggcagacccagg

SEQ ID NO: 425101 - DNA, 436 bp, Homo Sapiens
cccgagatcccccggtctagcaggtctataggacatctctctgggggctccagttccgttattggaaataaagtaccagttaactcagagctcaactggcaactcctaaaatgaatagggaaagaggaatttctcctttcttatataagcctccttccttcaattaaaaactgttttaaagcgtgcttatcaaggttggctagtctccaaggagtgaggtaatgtgctgtaccctacagccacaggcatataccagccaatggtcagctgtcactatgaggtactgtcagccaattttaaaatggaaaaatgcatgccatgataatgacttatcttcttatctaaattttaaacagttaagatgcctggcttggaatagtaatgtatgcactcaatcactaatcccttatacttaaacataaagaaggaggcatac

SEQ ID NO: 425102 - DNA, 251 bp, Homo Sapiens
tgatctagccagagcacttctcccgctgtaattcaacaactactaaaaaggaagtcctgccaaagaaactaagttccagtcagtaactatgtgaatggcacatctggagtaacccagggggtaagtatgcagggaaggcaaaagctaaacatgccccagtgggggcccaggccactttcttggcagtgtgtggtgtgtggcaccaggcttggggccacattggaccaagggccatcctggctagacccagg

SEQ ID NO: 425103 - DNA, 132 bp, Homo Sapiens
ttgctagaaaaatggcagcatgtaggaattttgaaaggtggaaaagaagttatcatttgtcagagattaaaaagtagggaagtggatttcccctaaaggtcatacccttagaagcagctggctagacccagg

SEQ ID NO: 425104 - DNA, 272 bp, Homo Sapiens
  misc_feature (210)..(225): n is a, c, g, or t
cacgcagaatgtaaaaagagtggctggctccaacctgaccaagtgtctttctatatattttttaacacagaagcagttaaagctcttccacttactgaagttcttaaggtaatctgataggcagaatacatggatccattatagaaatcacaaattcctttgtgtcacaggccctcaggatacctgcaccttacagtttcatggtttcannnnnnnnnnnnnnnnctttggaaacagaaatctcgctctatcccccgaggggttcaccgagc

SEQ ID NO: 425105 - DNA, 225 bp, Homo Sapiens
agggagaagacatatattacacttgataaatgtaagatacttgtggacagtgccttctactgtaatgacgttgcgtgtatcctgccactgcctgcatttctcaccattgaacttgtactctgcccttggtagcccttccttagtattctgaggaatggtccagattccccaaaagggaatgagctctgttgcaggaggctcactgtttataaagttaataatact

SEQ ID NO: 425106 - DNA, 202 bp, Homo Sapiens
ccactgcacacaattaaaaatataatttttttctgaaatgtgtggaaaggtgggtggagtggttcttaccttgttttagagggttaacagttggctggtaatcatcttggaaatctctctggcataagtgaggtttaagttatcatctgaatgaaggaaagatgttcttcagtgcatgagggattattccgtagatgcaggt

SEQ ID NO: 425107 - DNA, 242 bp, Homo Sapiens
aacctgcataatccttcagagatctgaaaattaagccattttctcgactggcaacgaatcccttaagattcatgcaggaacaaggaagagattgtcccccacgggcactcctggctgggtcggatctgtgtgacagtgaaaaactgtccccaggatcccattcatatatgaaacccatccacatctgccctacggggaggtgtggaatcagacttaaaacctccataaaagaaacactggaa

SEQ ID NO: 425108 - DNA, 334 bp, Homo Sapiens
  misc_feature (213)..(225): n is a, c, g, or t
agtaccacctgcatgaccataggctctcctcctccctcctgtggggcatgtgggacgtgtgggctgggacgtgtggtttaaaggtctggaagttaaaggtctccctccctggcgagccagctctttgttccacatcctcaaggaccctgacttcagcctattgttccccctgctgacacagaggctccaagttcctctctggatttgctctannnnnnnnnnnnntcctggtgttggccgtggaggctggggatttgtgcatacctgcttattaaaagtcactcactcattcagagaaaaatgctgttttgagacaccctcttgcaggtgggta

SEQ ID NO: 425109 - DNA, 227 bp, Homo Sapiens
gcactctattaaccaagcctgctacctcaccagagaagcaatctcgcccgctatctattaaccaacctgctccctcaccagagaagcaatctcacctgctctcttttcaccagagaagcaatctcgcctgctctctttttaatcagggaagcaatctcgcctgctctcttttcatcagggaagcaatctcgcctgctctcttttcgagtggtgccctgcaggtgggt

SEQ ID NO: 425110 - DNA, 429 bp, Homo Sapiens
  misc_feature (43)..(90): n is a, c, g, or t
acagcgacatctctaaagaaaataagatataaattagaaacannnnnnnnnnnnnnnnnnnnnnnnnnnnnnnnnnnnnnnnnnnnnnnngcctcactgttactggtaaaatcaactaagaatttctgaatgtcccttagattgttcttaaggagtagtatcatcaaattcttagactcccttcatatccacatgcttagatatagtcactgcattcacttgtagattttcccaaatgtattttcacaagagctcttttaatagtggcttagatagaacttctctataattcattctatttgttcaaagtatgaaagtaatacctgtgatgggatgacttgttatctggatatcactgccatactgttataagccagcctgccccccaaatcctttaattttccttgctttgcttagtgcaggtgggta

SEQ ID NO: 425111 - DNA, 456 bp, Homo Sapiens
acgtgctgagggcgggtcgccgttattcccagggtatcttgtctagtgattctgttgctcgccattggagaagaggcagcattccttgcagtgtcctcagtatcctcgtggctaccctattgtttaaactaatattgtatagtaggtaactgtcttttctagtttatcttttcacctgaaaaaaagcttttatttgctaaacatgcatttcaggtttaacaggtgacatttattgaacagctgggttggctatatggctgttagttgtggctaacactttcactataaataaaatactaattttagagtaattttaagtatgaacagcggcagataattcatagtagctgttctgtttcaagacgatagaaacttcacacttagtcttcagattaggatacatagtagatgggataaaaactttaaatattatgtggtgcttagtttggaaccaat

SEQ ID NO: 425112 - DNA, 267 bp, Homo Sapiens
tactgagactacgtgtcttacccgttctctgcctctatgtgaatcgtgaacgtaaccagccgctggatgattgtcgagggaatgagccacccactctgcaagccctgaaagcctgcccacccaagcgtgccagctctgtctagcctggaggctccatagccaggccagtgctgctgtcacttggggtacccagaccagtcttcaggtcggaaagagcgtggcaactgaggggtaaagaggaacagcgacttgcccagggccacgcag

SEQ ID NO: 425113 - DNA, 242 bp, Homo Sapiens
taacggatcccttagtggaacgctgcctgcagtcaagagagttaattatatgagttatattacctatcaaccgccaaatatataataagcattactttaggcatcaggttgtggaaaccatcaatatattacagaggtaaagatactctttattgtctagccataggtcatagctaccttctgaagaacagaacgaaactaaatatagattagtagcacgtaccacaacgggtaccgagctc

SEQ ID NO: 425114 - DNA, 214 bp, Homo Sapiens
tacgagggaagcagttgtgcagcttggtcacctcgggatcgatgggctactggcctggctcaaggcaggtgctccgcggatgttttctgagtctgtgggagtgaacagctgcagggactccttaggcctgccattagcctccaagtgctactctggggaagccgttactcatgtggaaaagcgtgggccctttgagattagctgtaagtcccgg

SEQ ID NO: 425115 - DNA, 295 bp, Homo Sapiens
aatgtgtatatcatcactcaatatcacttgtctagttaagttcatgtataaggagctctgaagtgaatggtgtgccttctttaatgaatgtttttatataaaagtcatgggaaagaagatttgattcattatgtcaaatgctaaaagttctagctctggcgtagaacagtccctgaaggaagaacttccataatacctacagaaaatcaatcttaatctataacatggttttaaaaactattactgggttgaaccacatctaaagagattttcattcagagtctgactttttttt

SEQ ID NO: 425116 - DNA, 259 bp, Homo Sapiens
gctgactgggtagcaggtacagcatcctcatgcagctctgtctttgagttcactttctgtcttcctgcggacttagcgccatgctgcttgcccattcgtggctttccatataggggtgagtgtggggatgcatgttatcttgcttatacatatgtgtacatatatttccttctgctgctgcttttgctttttgttaatatcatatattgtagggggatcccgaccctcgcattctcgtactcggtgttcattagctgtg

SEQ ID NO: 425117 - DNA, 205 bp, Homo Sapiens
gctgcactatagtatttaatgagaagcctcacagttaactcaatcatttattaataataagttcatcattggaccataaaagtcaatgctcaactttaaggaaaataatgaactgtgtcatcatataatatgaagttataaacggctcttcaggatgtagatgtgttctagccttgtttctctattaaattctgtaaggaagcat

SEQ ID NO: 425118 - DNA, 379 bp, Homo Sapiens
tctagaggatccctgtggacgctgctgtacggaattgactatcaaagctgccaagggaaagtatccagaaatcagctcttccaagatatgtcctcagagttttctttgtccaacaaaaaaatatttttgaagatccaagagcaggaaatctgcgaggcaacgaggagccaaatataagccaagcggctccagctgggccccacattccgctaggactccccagtacctattccccatctctccgcctacatcctgagtgcgccctccctctcatctcggctgtttccttcccacaaccctacctccatactttcggccacacacaccccaagtgcgtgctcctggaacctcacagcccacctctccctctccagcaggg

SEQ ID NO: 425119 - DNA, 232 bp, Homo Sapiens
cgatatacttaaattatcctaagatgagtctcaaaatcaggtgtatatatcatgcttacaacacatatataatttatggctcctgcctagcaggggtcatcactgttagttcaacttttcttgggcaagtctactccctgtgccccaccgtacactgctacattatggttggtatatgtgtgtgtgagactgcatttaggcaactgtaataggttgaatttggttatttaat

SEQ ID NO: 425120 - DNA, 400 bp, Homo Sapiens
tactagccagtgtattgacctcaaagacatcaaaaactgtcctatcgactgctgtcataatggctcagagagcccaaggatcactgtttgtttggatgttgtgtaatcatgagagtaaagtcatcatcagtatcatgtacttactatattatataagcagtcatttcaaggggaatactttgatgtggaaagataaaaataactctggttcttccattaattcattaattcattcagcgtaccaagtacttggctcactgccaggcactggcatgcagggacctgtgcattttattcagcatcctaagatgtatcagaaaccaatagtttatcctgaaaatcagattatataacccaaatcttactcctttctctgagcctcaatgacagcgttccacaa

SEQ ID NO: 425121 - DNA, 307 bp, Homo Sapiens
gctgtcacctgattccctgaccacacggctgctcatacattaaaagcccctgaattcctccccgctgtactaattatgcacagcagtaataaagatgctttctcccttaccaaagaggcctatttatatgaaaagagagcatttcgcccccacaagattgagtcgtcactccaggccttattggaatcaaagcagcttctcttctgagatcgtccaagccctgcctgactcccctccagcttggcccactcctgagcatccacatttccaggagcgccactgcggagtgggcaagatgtagacgcca

SEQ ID NO: 425122 - DNA, 247 bp, Homo Sapiens
ccagagtccccgcgtctatcactttgtaatagtcttacagcccttagacctacaattgtttacattcctgtaacaatttatccttttaacttctttgcctacttctgtaaaatcgtatcgactagacccctttcccctttctaaactaaagtataaatgaaaatctagccccctcttcagggccgagagaactttaagcattagctgtatcttggccaccggctaaatagactcataattcgtctca

SEQ ID NO: 425123 - DNA, 357 bp, Homo Sapiens
catgcaacgagacctcaataaatataagaaaattgatatatcatatgaaagcactttctcagaccacaatggcatatacactggaaatcaactccaacaaggaaccttcacatatcatgcaacatacatagtcaattacaataaccatgctcctagcatgagcattggagtcaaaaacaaacatcaagatagaaattattagaactgcaataacaataagtgacacaacctcatcaaaacctctgagggtacacgcaaaggccagtgctaaagaggcaaagttcaatagccctcaaatgccgtacatctacaaaagactgtcaagagcacacaattgacattactatggattgtcga

SEQ ID NO: 425124 - DNA, 474 bp, Homo Sapiens
  misc_feature (69)..(109): n is a, c, g, or t
tgtttaggacagagaaagtgtcatcaccgattcggtcacgatggtctgatcgctgtcaccttgtgatcnnnnnnnnnnnnnnnnnnnnnnnnnnnnnnnnnnnnnnnnntgagccatgtgcccagccctccctgcttttctttgctctcactcttggcaacctcacttaacacctatggcttaaactatcatctccatgtggatgaagccaatcttgacttcactcctctgaggtccaactcaacccgccctgttgcacacaatacaaacttaagtcatcaccatatctccaactggcaaatctcatttccctagatctgtagaaacttgaggaattaggaaagagattagcttcagagagtctaagtctaagagaaacatacaatggttcaaagcaatgatgtcaccaagaagagagagaaaggaaacgacgctagtagaactagacatctttaatcaggctgaaggtattca

SEQ ID NO: 425125 - DNA, 226 bp, Homo Sapiens
atctgattcaagatgtcgctattatcccagtttagaaacatttctgtcactgcatcaggatcagagaatgcagttctaaatggcaaatctagacttggtttgacaagacatggcatgaaacttagaaattaaaactccttccttttccatccttagcagaatctcctgagatgttcaagtagctctggaaagaaactgatcagattctaatctgtcaatttaaaaa

SEQ ID NO: 425126 - DNA, 336 bp, Homo Sapiens
atccctaattcagcagcatactaagatgtccattatcgccatatccacgccaacatctattgtcttttgactattataataatggccattctggctggggtaaggttgtatctcattgtggttttaatttgaatttctctgatgattagtgatgttgcacatttttcacatgtttcttggctatttgtgtatcttcttttgagaaatgttttttcatgtcacttgttcactttttagtgggattatgtttttattttcttgctaatttgtttgagttccttgtatattctgcatattagtcctttgtcagatgcatagtttgcaaatattttctcc

SEQ ID NO: 425127 - DNA, 119 bp, Homo Sapiens
accaatatagactatatgacaagccatgaaacgagcctcaataaatttaagaaaattgaaatcatatcaaagcactttctcagaccacaatgcgaatataactggaaatcaactccaca

SEQ ID NO: 425128 - DNA, 388 bp, Homo Sapiens
  misc_feature (239)..(274): n is a, c, g, or t
taacgaaagaaaccacagaccttagaaagacgcagggacagtagcaccatgaactgaatggaaaactgtcttcagacgggacacacactcccgcaggggagcgggacaatccaggccataggggaaggccttaaccctacccagtcctggagctgatgaactgagcaatgggaagtctatgagaaggaaaggcattcggatgtgtcttgcgtgcattcccagactccagtgggatgggnnnnnnnnnnnnnnnnnnnnnnnnnnnnnnnnnnnntcacggaagtatgtagtcagaagtatgtagtcggaagtatgtagtcagaagtatgtagtcagaagtatgtagtcggaagtatgtagtcggaagtatgtagtcggaagtatgtag

SEQ ID NO: 425129 - DNA, 484 bp, Homo Sapiens
actacatactccggactacatactgactacatactccgtctacacatctcatcccttgtcttctgtacctgttacaactacatcttctcactcccaactactgctaactatagcaacatctccttacagtatttaaagaattattctgtaaaattgactttcatgaaaaagaaactctacatatcactgatagattaccagtttccttagttaggacatgtaaaaattcatttctcattaaaaccacattgaacttaattgcctttcactgatgagtcagaagaaaccgcatggttataataatgaatatccactaacactgttgggtgtgtggtgtccatgatggagaaagagaatgaatttccctataaatggaatttacagacacatagagaccttacaatatgcgttcttgggagatcgttcttatgctttggcacttgcacggtgacagtccagtgctcattcaagtctcttccggaag

SEQ ID NO: 425130 - DNA, 238 bp, Homo Sapiens
cgacacggtggtgttagacaggtgcggtctgtacgtacgtactacgtgctgccacgccgctacggacctgggacgacgactacgacgaccgtacgacctgctgtgactagaccggactacgaccgaccgacggggcgtttggtgttgggttactggccgggggtttactacttgactaacttgttgtgactgacacacttgactggcggggactcctctacgacgtcgaccctgcacg

SEQ ID NO: 425131 - DNA, 241 bp, Homo Sapiens
tgactacatacttccgcactagatcggtatccacaccaaattaacatccacaccagataagaatctgatctctttgatgaggaggtggggccgaaacctcaccaagtatccactccgttgatgagcagttttaatgaatagaaagtatatctttatatgaaatactttttgtgccttcacccactggctcttgtagcagtaaacagaatagtgtaatctctcttctgaatgacagctacta

SEQ ID NO: 425132 - DNA, 120 bp, Homo Sapiens
agactggctggtgagccctcaacactccccgtagtacttatttcccctcacagtaattgtcaccatttgacacatatattttattgcaggaaaagatggacactaaaatatatgtgtcaa

SEQ ID NO: 425133 - DNA, 134 bp, Homo Sapiens
cagatgggacaatacaacataatgatacgagactagcaaggtaacaaggaacaatacagaatgtgatacataacttaatgacgttattctatagaaataatctaacacctaacagaaatgtctacagaaatatt

SEQ ID NO: 425134 - DNA, 160 bp, Homo Sapiens
gaaaagaataaaaaagatacgtatgggcagccagcccgccaagtcctcgcctggctgcatgccagcctgatcaagccataaccagaggacacaacagcccaacctagcggggccagtcaccacctggtctacccggggagggggcattctataggttgtc

SEQ ID NO: 425135 - DNA, 283 bp, Homo Sapiens
taattagcaaaaagtattcaacatagagaacgcatggctcaataggctgcatatagctacaacaagttcactcaagagccccacgtctatatcattcccgaacggtctgacacaacccttaaggggaaatagtgttggcataactcttacattataatctgacatatctatattctgagaatataactgtttgtcgtagaccaagaagacagagacttcatcacaccagcagtacctctctccattctgttaccctcaatcaataacatcccataactctatc

SEQ ID NO: 425136 - DNA, 119 bp, Homo Sapiens
ggtataataggtgtatatgtttatgggggtacatgagatatttgatacagtcatgaaatgtatatgaacacatcaggataaatggggtatccctgacctcaagcaaccctcacaagacc

SEQ ID NO: 425137 - DNA, 162 bp, Homo Sapiens
tttcttggttccctgactgagaagcgaggtgattaagggacgttcaagccagccccttaggcagcttatgcctgccctgtagagcatccctgtggggggctccagccagcttgcgcgatgcagatcctgagagtgctcccgggtaggcatttgcccccgtgg

SEQ ID NO: 425138 - DNA, 185 bp, Homo Sapiens
caccatagaatgtccaggcattacaaatgtaacccgccctcaattgagaacacttgtataggtttacctaaacatctatcattttcgcttcgtaccttcctatatctactttcttctaatggactttcttttaatggactttcttctaatggactttcttttaatggactttcttctacatggca

SEQ ID NO: 425139 - DNA, 167 bp, Homo Sapiens
gccggaacacaatcgggtagttcctagacatctctgggattcatttaatcacctatagagttcatcccgcagcatctcagctggttaaggtgtggaggctagacaactgaccggccctggtgactaaccaagaaacttttccctacccattctataggttgtcggga

SEQ ID NO: 425140 - DNA, 259 bp, Homo Sapiens
agttcctcttatctctggctactgtctttccttcttcgtgactcaagtatcttctattctgaaaaataccttctctgctctatttccctgccagtgcacatttgactcttccttctctttactgatggactttctaaaagagatgtacatagaaagttccacctccactttttttagccaactgcaactgggtcattagttggactctactacctcagctcaactaattttatatgcatccacttctttacagcctgca

SEQ ID NO: 425141 - DNA, 272 bp, Homo Sapiens
cgcagaggataatatggtagctaagacttccatacctggacgaaaagaaaagaaaagttaaaaggaagtcctgttcaaggcatcccaagggacaatagtaacatgaaataaaaattcagtcatttcaaagacttcacaatttcaatcagcaaataattcaaggcttctttgtcagaaacagcaaacaatacaagcatcaaatataacagatgattaatcaaaatgctggcagactggctagacctggctagacccaggactacctcttacta

SEQ ID NO: 425142 - DNA, 224 bp, Homo Sapiens
gtatatcccctcagtttatgaatctactggcttatatttcctccctaattacttcattacatgttttaataaaaaagtcagattgtattagtacctagtcatacatttcgggcaaaaagaaatgattgaatttgctgtgctgtaacaatgaacctagttcagcctctcactaatgcttaccttttatctccctttcatatccaaacttcttcaaagatttccag

SEQ ID NO: 425143 - DNA, 119 bp, Homo Sapiens
gtgcaaagtgcctccagccaggctttcaaggtgtcaaggaagagaaccaatttgccctcaccacgcccttggacggcatcatcggggatccacagtttctgaatgacaggaaatacagg

SEQ ID NO: 425144 - DNA, 119 bp, Homo Sapiens
cagccctgcttcttcctggatacagagaaccagtcagtcattctagtcttctagtccttaaactgatctcgatgacttggaacatagcgattacactgcaagtactggctagacccagg

SEQ ID NO: 425145 - DNA, 143 bp, Homo Sapiens
gctcctgggtcagaaggctctcccaaactccaccctgtttcttcctggtcagagaaccagtcagtcattctagtcttctagtccttaaactgatctgatgacttggaacataggatttcactgcaagtctggctagacccagg

SEQ ID NO: 425146 - DNA, 539 bp, Homo Sapiens
agagcagtgtataaacaatggtgtgcaggtcaaaagccggcaggcagactggtaccagataagtgtaccacggatgctactggtctcattaaataagcactttcacaagaacaagactatactgcctgaagctgctgttagctgctgttttggcatccattctcacaaaaaaacatttctgagctgctttcagaggccttcaaggagctcatttcttttgccaactctctctatgaggaagctaacagaagagagatttttcaaaagtcagaccccaccttaggcacaaccacattctcttaagtgtatcatgaggattggagccagaagtctgtgtcagtcagaaggcctagctggttcacagcaccaggaatatatagaggggaacaaagatcttaactggctacttttaatttcaaagtcagccctgagaacgtccacaaaaacactgcatgcatttcctacagaaccctgctaaaatcagacacaccagagccccagcactttccgaattgtcagagttaaatttggggatgtac

SEQ ID NO: 425147 - DNA, 110 bp, Homo Sapiens
tcccgcctcatcatacctattagaacgatcttggcttaaactgagaattagactgctaatatccacacatatggcaaatatgaactaatcagaccacagatattttgctg

SEQ ID NO: 425148 - DNA, 281 bp, Homo Sapiens
tctatgagaagacaaacacttagccacctctgtgctccagggtaaacctgagaagctctgctgtctgggagcaagctttctttccaaagggaatgagaggacggcaagcaggcagggtcctgcagcgtcaggccttctggggaaagttacctcattttgtttgacagggtcctcagtacatcagacacccagatttgaatataagttcagagcctgatctccagctaaatccgaatgctttggggactaaccatgatcgagacttggccacatagtatggc

SEQ ID NO: 425149 - DNA, 315 bp, Homo Sapiens
ggcgttccagaggatccccgcgcacgtggagagctttctgtcgtttcggtttaaaaattctttactggtgagctgctgactttcctggttactttatctgtgggactactttaaggccgggttgaggcaccttaatctctccagagagtatctgcttctgtcagttgcctaggaggactaccatccctgaacactttaaacgtaaatatccaaatgggtcttttcagatcacacaggtaatgtgaattcagactggaaatctgcctggaacctggttggaggtaacaacttctaagggcaggtttttttcccctt

SEQ ID NO: 425150 - DNA, 255 bp, Homo Sapiens
gcttggagagatcatgagctgcaagtcaggagggaagaggaggtcctgggaggtttgagcagagagaagaagaatgtgaaccagttctgacagtgggggattactgcctagagaaatgttacagatcaccaggaatcccaggtacctactagaacacaacgtggacagctgattccagccacgttctccggctcaaccagaatcagaggtgcttgttcccaacaaaacaacactgggttctgcccagattgttga

SEQ ID NO: 425151 - DNA, 340 bp, Homo Sapiens
gaggggcgtgacagattatgcagtaggcttggaaagctttgaaaacctgagggagtctttttttaagtgattactgtgaaagagctcattgcatatataaaaccggatttggggagcccttaagggtccctttaagtgtcattttacatcataactgctaatttactacaataagtgaccctaggctaatttaaacgtagatcgaaagatggagtaaaatatattttaatttgctaggaatcttagccttaagggtagttagtgtattttaccctctctgtgggatgctgggctgttaaaccaacaaggtgtggtccactttcacaagcatataaacatg

SEQ ID NO: 425152 - DNA, 442 bp, Homo Sapiens
ctgcacttggagaggggctttcagtgaaggtgacccagattccatacagctcaaggcaaacatgttctgaataggaccccacatgttcatttcagggctctccagagtgagttctaggatccaattttcttactgttttttaagtctggcaaactgaaaatggacttcttccagaaggtctgtcagagctcaagccttacttgacaaatccaggaagatgccttgacagtgacaggactcagcctgggagggaacttggaagaccgggacaccttcctagaatcaggcacccagtactcggttggcctgctttctcttttcggatctcacttctaaagcttggcatatcttcacaatgtatgttatgacggatggaaatggtttaggcccccattactccctgcccaggcgacttgctccccaagctctccaagggcagcag

SEQ ID NO: 425153 - DNA, 252 bp, Homo Sapiens
tcctgtaaagcaataaaataaaggcatcagaattcattttaagtctttgggaagccagtgaagaggtttaagttacgaagtcatgtgatctggggtgtgtgttaaaagtatccctctggcttctttgtgaagaggaggttgggaggcagagggtgagccaaaaggtggggtcagtcttccgggtcagagatgaccatggcccagaccaggctgatggcagtgcaagagcagagaagtctttcctctctctct

SEQ ID NO: 425154 - DNA, 413 bp, Homo Sapiens
agtataaatccacaccatgaggcaaaagaacagttaatccaagtttcattagcaacaagctaggaaccaattagaaaaagtgagccactaaacccccgaactgactctcagaagagccaggcaccttaagagtgaggagcggatgctgccaccgaccagctcgatcaggcatttccatttccctgcgaaaattttatctgatgctctgatcccaagcacccactgttacaggacccaccgaagaacttgtgaacgttagagaaatcacgattgtatcacgttcccacattgacgggcatcaaagctggtcattacaatgtggtcacctatgacaaaccaagggagggagatctggaagggcacaccccaaccgatacccgggtgcgcagggctcctgggcagggaggctcgca

SEQ ID NO: 425155 - DNA, 378 bp, Homo Sapiens
catacctggaccttctcatgtccttgtgttgaggacttacactttttgaacctcaattttcttacatgtcaagtgaggttttgtggatgatatctttataagctttcaggcaatgtcaaggaataccggttagtgggtagtgtatgtgaaagtgttttaagaactgtaatgcatcatacaggttatctagtcttccttcccagatggatggagtttacagacatgggacttctttcccagcattggtggacagagaagatttggatcaacatcctgaggtcagagtgaaggcaaacagcttgacatggagctagatgagaccagcgagacagtacacaaagccaagtacttcggggccagcagagctaatgcatgagg

SEQ ID NO: 425156 - DNA, 118 bp, Homo Sapiens
tcggcatactggagcgtggtgggaaggagagaagcacacagtgaggttggcgatgagacaggctgagatcacgagcagcagtgaggactctggactttgtccagaaggtccaggtatg

SEQ ID NO: 425157 - DNA, 293 bp, Homo Sapiens
catacctggaccttctactgataattcccttaacccgagcgctaccaggcatacctggaccttctagttatggcttcagcacttctgtccttgattagcttatagccttcatcttgctaatataaccattttcttgagaccattggattttgagtgagttgcctgttacttgacatacttctacgactattgattctatatgttactgttaaattttggtaacttcatattagaaaatattgttttctataagaaatattgtattccatatttctgatagtcaatttaatatc

SEQ ID NO: 425158 - DNA, 329 bp, Homo Sapiens
catactggaccttctggtcacacgattaacccgagcgctaccaggcatacctggaccttctcctacatgacaaatatgttacagtacctgcctgcccacagcctggatagaagacccagggaaggcctaggtagcctcgttttacaccatctaagattcctgtggccatcactgattgtccctggatggacacactacctagaggccattccgtagcctggacaatgacatatggtttgacgcaaagaagtaagtactcaatcaggttccttctcttgggaatttgaatgaggaaataccaatatgttttgccacaggggcaaaagctg

SEQ ID NO: 425159 - DNA, 285 bp, Homo Sapiens
cggacattgctggacaatctgtgtataatttgatgctacgttacacatttgcacactagagtcaacagcaacaatgtaaacaattcaacaacaaaacctcctgtaccaaggtatttaatgttatgcaaacatgattcagctcatctccagactgaggggctaggcactgaaaaagagttggggccaagggagcacgtcctaactcagatttgagctataagccagtgatggcatgagtgtgtgtgttaggagggatgggttgatgcagacagactgaagtgtcac

SEQ ID NO: 425160 - DNA, 309 bp, Homo Sapiens
aggcatacctggaccttctccaagcagaatatttgaatagtgggaacctggtatccagtttggtccccagctgacagataccagttggaaatgaaagaatggaaaaagccattgtggcagtagtctgcatcctgcaagagcagattctgaccggcatcacttccgcagtgaaaggtaacaaaatctgacagagaaaaattcagtctccttttctacttgtaattgtcacatcagcccaagtggaagtatgttatatgagagatacagcaaagaatgcaagcaaatatcactggccacagaaaggcccct

SEQ ID NO: 425161 - DNA, 123 bp, Homo Sapiens
  misc_feature (95)..(95): n is a, c, g, or t
tggacttctactgattctaatgacggtgtgggtggccagagtggagggatggttagggtggggactatgatgcccagctgcagtctgggcgtgantaaactcgccagtccagtggaaggtttt

SEQ ID NO: 425162 - DNA, 349 bp, Homo Sapiens
tcactagccctggtcactctcaagaacaaaactaggtggttataagaggatgtcacagaaaccggcatatctcctttcaatcatgtacgcacagagaagggatgagcccattcacagttgcctggtagagaaacagcccaccggggcaaacaagtcaataaagaggtctcatcagacactggcccatggcccagtggcccacagcttatgcataatgtacatgccctccaacagttcagttagtaaaaaagaggcagcagaggtatagattgggaacagacactctttaacatcagacttgaatctgaatcttgactgacacttaatagatatgtaactcgagcaagta

SEQ ID NO: 425163 - DNA, 259 bp, Homo Sapiens
actctagagcatccccccttccagttgctaagcatgttaatactatgctctcttcacaatgactttgctagactctgagctccaaggatggtctggcccattttgttttgttcaccactgaacaaccaatgccagcctgatgatgtccagactatgttccataaatgtctgtgcatgaattgctactctgatccatcacattttgttgtaatttaaccctcagagagaaatcgtcttctaagttttgtaggaaagatgg

SEQ ID NO: 425164 - DNA, 388 bp, Homo Sapiens
catacctggaccttctggaagtggaggctgcctgctgggaaaacttgaagggagtttgaggacctggcccctctgtgtgcctccaagactctggggcagctctcgcccctttccttcctctccagtggggcagaaggcagctaagcccaagtcctggggccagaggcctgactccaagccatgggtttatgaaaagcaaatagatatcctgccctggctgaaagacgcacctcccttcacattggacgagagccctggcatttcattagtgccctctttgaagcctgccctttgcaaaactgaaaaagaagagaagggaggaaggaatggaagctgattcaaaaagcttcctgtattgtatctggaatttctgatgtccctctgtgtg

SEQ ID NO: 425165 - DNA, 405 bp, Homo Sapiens
gactagaggctccccggttacctggacttctaggaatatcacatgcaacctgaactgaccactgcagagagaaactaataatagagcatcaggcactagaagcttataacagccgtgctgccttaaggggtaaaggagggtgcagtgacacagggatgaaaactaacatttctgaaaccattacacactggaaagctcccagggctgcagagtggaggctgggagagaataggagaagtgaccaaacagatctgtccttaggaatgattttcactgccttgcgggtagacacatacatggaaaatgtactttctcaatgtgcaaacaattaagcattctggcaagtcccctgtgtctagaaccctctttactacctgtccctgggtttgaacttctaccatggtt

SEQ ID NO: 425166 - DNA, 392 bp, Homo Sapiens
cccggtatctggaccttctcaatcggaagttagcaggtgaagtaaaggcaaacagaaatcgcacatgtgtggtgccgtggtcaagcaccatgggctctggggacaggagtgttcctttggatgcacaggcccatgagggcttccaggggggtgtggagtaacaggctccagcatctgatatggaggcaagagagaatcatgaggaggagtagaaagcaggcaaatgggaaatggagaggacagtcttgtatgcacctgcaaagagggtgagattcaagggtccctcagtctaaaatgaaggcatggtaatgtgaattcagccttcccaagctgcttttcggtggcttggttgctaacaccatcgttgcatgtgacaaccagccttagcgctg

SEQ ID NO: 425167 - DNA, 132 bp, Homo Sapiens
catactggacttcttcagacacttaacccgagcgctacccacaagtttcagaatttcttcctctgagagcctcccgactgccgtctcttcttccacctgggaatctccatcagagcagaaggtccaggtatg

SEQ ID NO: 425168 - DNA, 171 bp, Homo Sapiens
tgcaggaccctgtggcagcaggtagggaattcaggtgaggacagcatgttgtccagcttggttctatctcatctgcctgtccttcccagggtgtcaccatgaccagagatctgtgtggccccacgtcaccacctgtggcctttgagatgagtcttagaaggtccaggtatg

SEQ ID NO: 425169 - DNA, 364 bp, Homo Sapiens
catactggaccttctggttcactttttcttttctgcctcgatttagctgtctctaagctaccttgatttagttgtcactccaccctcaatgattggctaacaggtgtcaggacatgtctggttttaaggggtaccctcttttgagggatgcccaaacaaacgggcctggaagagaggttctggcactctgaggacacttccctagattctcacacttaaattgctgtccgagtcagacaggaatcacgttccaatctgcatggccagtgagggaaaaacagcgaagccgtcaaaagcacatgtgcctctccctctcttcccactgcgcttcccgctatgagttccgggagaaggtccaggtatg

SEQ ID NO: 425170 - DNA, 152 bp, Homo Sapiens
catactggaccttcttgcgaaagttgcttcccctggtgtccaaatgcctgagaagagagggacaaactgtctattcgaagctgagaatgtcaaagaatgaatcattgtcacgagtggagtccagaacgcacaaaagatgaaacttcgctaaa

SEQ ID NO: 425171 - DNA, 306 bp, Homo Sapiens
catacctggaccttctgaaaacctatcatgatacagtgattggcttgggcttttctaacttcttcaacaacattgagaatgattcctgaaaaactacagatcaaaaatggatacatgatttattcctcttttccttgaatatgaaaaagctgaaattgacttcaaaaggattctctgggagttataactatgctctagcaagaggttccaataaatcaaagatggctatctgtgttgaacaaaaatccaggaagaaaactcatgacccactccagagcaatctgagcaactttctcaatctttaga

SEQ ID NO: 425172 - DNA, 425 bp, Homo Sapiens
catacctggaccttctgaaagttcaaaatgaaggaaaggatagcgtaaggcaaaccaggcaagcactgcccgcagctattgtgtgccagaggccatgccaggtccagaagaggaagcaaagagaataacaggacgccatctctatcttcaaggaatttaaaacgtagtgggagaacttcactcacgaacaatcaacaaaaaacaagataaaatgtgcctttgtgaggataagagccaagtactaggcagcaaggagaaaggggggattcagattccgactgcgaggaccggaaatagggcgtgcttggaggaggcttaaggggcgagcacggtcttatctgactggcggcttcagggacaggtttctccccatcttgaggaaaccgggaaaatcctttaagtgagcacaatccacgaaggctggg

SEQ ID NO: 425173 - DNA, 368 bp, Homo Sapiens
aggcatacctggaccttctattagaaattgaagtaaagtggagagacatggggttagaaacaaggagagcacttaggagagggttcttgggaatggttctgtacactcaagctgctgctggcagaggctaaatgccacagaagctagaggggaagaatcagctaacctttggttattgaataagtttacaaaggtgaccatcaagtgacttagcaggactgaccctgagaataactatgtaatttttttaaatggcaaatgcaggggaaacaggtttatgtgaaagaaatagggatgatgaccacttcagacatgtttaactaaatatgctatgtgaatgcatcaagcttgtaatgtacatgaggcac

SEQ ID NO: 425174 - DNA, 176 bp, Homo Sapiens
catacctggaccttctctattctacagactccaaatcatttactgctggcatttttctctgttaagtgattgttctcctgaaaaatgccagattgacagccttttaaacctaagtcttgtcccctttcagtcctgggagtgcgagctgcattgactgaagcaatgcattcctccac

SEQ ID NO: 425175 - DNA, 227 bp, Homo Sapiens
actcacccctgatgaagagtaactcacattaaatgccttccacaatatatttactcagggcctggaagactgaatggtttcccaagaacatttagagtggtgatttgaaggactaccagacaacccatttaatacagatcttaggaggagggaactctctgaggagcctctaccagtttacttccagagctgccttctttcttagaagcagattgttaaacttcctt

SEQ ID NO: 425176 - DNA, 169 bp, Homo Sapiens
catacctggaccttcttccccatgtctgagcacacagactccctgggggcctgcaccaacaagctcagtggcggctgaggcctctcatatcaaggcttttgatgcctgcacatcctctgggggagggcttcagcgcagcctctgaggagctccagaaggtccaggtatg

SEQ ID NO: 425177 - DNA, 422 bp, Homo Sapiens
ttccttgacatatctcaaggttgctgggttctgtgcaaggccccagcaggttctcaggaggggaagaggcatcactgaaaatgacagtgaccactgaaggcgtctgtccaggtggcatccaggcccctgcagggttggctacaagccacagctggtttccccctcccgtctagagtaatggcccacaggctgtgtttcccaagggctcctcctgcaggatcctggcatttatatctgcaggaggactctgagacccatggagacctgtgctgagaaacagccacccttgtccccagggcagagaagtacccgggggaccctctggctgtctgcctgcagatcagcatgcagccccccagggtgcctttgggtctaaaaaggtgtgttctattcctttgaactgggccttttgagaagagcag

SEQ ID NO: 425178 - DNA, 418 bp, Homo Sapiens
catacctgaccttctcacacaggcaccttctgttatttgatttctgtgtgcaatcccttactgaaaaatacaatatagatgggggaaggcacgtggaaactgccaagctgaccctgagtcccgaggcctccagacctctgtaacacttgggacaaggtgcagctcattacgggtgtccagcagatccacacactagtttgactctaggatctccaggaaggtaaaattaaatggcaagtttcctaccccaccacattctagcctcttgcaagatgcattggcaaagagtaatgtacataatgtacatgtgtttcagaagcatcccacaagtattgcgcacttggggtctcaggcaaacttccctgatgtcctgtggtggtctggatccagggtaggtgcacagaggcctgatggggtg

SEQ ID NO: 425179 - DNA, 135 bp, Homo Sapiens
ggtacactatccctctgtcttgggagggtatcctctcctggttttagagataccagctcttgtacttctacttagggtctctttctagcaatgggttgtctctggggccttgatcttttacttttaatttttatt

SEQ ID NO: 425180 - DNA, 405 bp, Homo Sapiens
tctgggggtggctcctatctccaggtataaactcacatctaccaggccaggaaggataaaaaagctaaatgtttccagccatgaaatgaagccattcattctgacctcaagagaaccttctgagtgtttttgtggggggcggtgtgaaacaggttcatagtctgcatcacggctagagaggagaaaaggtattccttagaaagtgggtcagagatcagagagatcccatggggagcatttggtattgggctgctttttcctttctgatgttgttcgttctttaattcttcatttactgagtgtcttctatcttaacttcggctgctataacaaaacaccgcagatgaggtggcttaaacagacatgtatctctcattgttctggaggatggaatgctgcgagggc

SEQ ID NO: 425181 - DNA, 297 bp, Homo Sapiens
  misc_feature (195)..(195): n is a, c, g, or t
  misc_feature (203)..(203): n is a, c, g, or t
cttctggacttctgccatatgcccctttatgcataatgaattctgatcaattccacttaagaatcgttcattgttgctttgtcactgctctaacctcatggcaaatgctgagatatgtcttgaggtgatttatcacaagggtttctgaatcatgatatatcacattcattgcatccttcacttaccaggcacccnatttccanaaatattacatatttatctccgatttttaaccactacagcattagcgtcaactggtagagtgcctattttttaaacagttccctactaacttag

SEQ ID NO: 425182 - DNA, 427 bp, Homo Sapiens
  misc_feature (195)..(205): n is a, c, g, or t
tctcagctagacacctaagtctgaggaggcattccacggtgtaagacgcccttcttaagtggctccagctgagtctgtgcgcgaaaccttagttccgactctttgaaataatcgactatttacttcttctttgttccctgctagatggaatcttagcatggatgctttattttgttaagaatcttatacctagannnnnnnnnnnacagccccttacaggtagaaatactcagtgattgtttaaggaaagaatgaataaatgaacacatgaataattaccaaaaagatccaaatgccctcagtttgacgcaattaccaaagaggattcacatgcccacagattgacgtaattacctggaagttaggtacagaggcacttagaaaaaaatgcaggagcaaatcttttaacataggggttcaggtaatt

SEQ ID NO: 425183 - DNA, 218 bp, Homo Sapiens
acaacatatgatggtgaattaagcaacaagcctatctttcccaccggacacacaggggattttataatcctctaattctccaaaaaacttttgaactctgagggaagaaaagcgccatgttttataagggctatcctggttccatccataataaaaaagactgagatcattttctctctcagcatgctagattatcccgactgtaatcagaatagata

SEQ ID NO: 425184 - DNA, 156 bp, Homo Sapiens
gcccggcttactggacttctaggggcatgccccaggcccaccatgaacctggaagggctggagatggttgctgtgctcgtggtcctcgctctgtttgtcaaggtcctggagcagtttggcctctttgagcctgtctccttagaaggtccaggtatg

SEQ ID NO: 425185 - DNA, 391 bp, Homo Sapiens
gtatgcctgcatacctggaccttctggcccaccccgactgtgctagaatgctggtgtggcccctgcacagaagcgctagctatcttctggtccttctccacatcatcattcagcaaaccacttcccttgtctcgcctgcaaaccctttatggcaaccactggtcaacagcagctgacattcaaacagagcttccaatgtacaggatgcgatttccggcgcattataagcattgccaatgccctgtgatgggcaccggggtcagcacccacgtcccacttcagagagagattgttgctcagctgcccagagtgcccttggcagacaggtggttatggctctcagcccttttggggatcaatcctgctggagagagacctctctggggccatg

SEQ ID NO: 425186 - DNA, 268 bp, Homo Sapiens
  misc_feature (11)..(11): n is a, c, g, or t
  misc_feature (58)..(74): n is a, c, g, or t
ctcctgctcanctcctgagtagctgagactgcggtgtgtgtcaccatgcccagctaannnnnnnnnnnnnnnnngtagaaacaagggtctcatcattttgcccaggcatgtcttgaactcttaggctcaaggagtcctcccacctcagctgcccaaagtgttgagattacaggcgtgaggccctgtgcctggctaagaatccgtttctttgcatttttcagcttctagaggcacccacattccttggctatggccttgtccttgttgc

SEQ ID NO: 425187 - DNA, 371 bp, Homo Sapiens
actggggccagcatacctggacttctcatcgaaatgttcaatgaatacccatcttctgcttttgcgcggggaattcactttccatctatacaaaggagatttaccaatgtaaaggctctagattagacccacatttgcatcagccaacttgatgtctccactctgaggtatctcaatagtttactgcgtgtaacaattgaacctgatatcttccctaatcaggactatcttagctggcaagtgccataaccccaaccgaaactggcttaagccattatggaagagttattggctcaattaaccagtaagtccagggtcagggtgacttcagggtaccatgatattgagaagactcgatgtctgtctttcca

SEQ ID NO: 425188 - DNA, 440 bp, Homo Sapiens
tacctgggagaatgcatgttataatggttgtcttatgcctgggagtccctgttctcagacatgacacgcaaaacgtacaacaacctgccaccggctggtatctgtccctagctattagaaatccagccgcaacaaacctccagccttgccagtctctggatgagctttacaagctaagttctgagccaattacagtatccttggtttattttttgtaggacccaccaaatatttatgggcttcccaggaaagttcagtcaacaattttagggtagctataatctatgtgtaacaactactcttcaacatgatttgtttcctctcttagtctataaagaggattttttgaaaggagaaaagttttgtttgaattttctcagaaactccaagttctttaaattggatatttggcaaatctttttccccagagttatccatgt

SEQ ID NO: 425189 - DNA, 159 bp, Homo Sapiens
gctcggccggcatactggacttctccagctctggcactaatatgtcatgcaaatttcacagctttgcaagagcttttgttaaatcaagggttgaatgatcccttagagctttcccaactctatgattatcaagtatgtttttcagctaacgaaaaacag

SEQ ID NO: 425190 - DNA, 140 bp, Homo Sapiens
  misc_feature (85)..(85): n is a, c, g, or t
cgagccggaccggctactggacttctatgcaaggcatagaaggtgctgagagtgtcaagatgtgaggctgaagaagggagccagnggcatttggaaagctgtttattatctctgacttcagttttctcgtatacaaaatg

SEQ ID NO: 425191 - DNA, 432 bp, Homo Sapiens
aatatgctctaactcttgtataatacagtctgactctcctagaaatcccttaagtgtgatgtcatctgggaatgttcttcatagaaataacagatttgaagagcctaaagaccaattttatattttattagtaatttggtattcatccagatggggaaaggtaccagaaaatatcccctttcatgagaatgttataaatcacaaattcccttaaaaatgtacaggcagcttcgtaccagatactaccacaaggatgaggaagacacagtccctgaactttgtatccatctaatgataccacttacttagcaccacatacttgtattaagcacatcatgtctattatattatttaatctaatggaaatgttattattccaattttatacttgaggaaacaggcctagagaactgtctttcctcttgggaaaag

SEQ ID NO: 425192 - DNA, 426 bp, Homo Sapiens
aacttctcaggtgagggaaaaaaaacatgcagagacttaaataacttccctcaaatcccacagttagtaaagattagagccagcatgcttagaaactaaactccagcacttctcttcttctcctacagcacattgaactcttgacagtgggtgtttgatcagcaccattgttgatatatatctctcaacactccctgagacaccaacattccatgcatatggagtaagatggtaatcctctgaaagccacttaggtgcttttggctaactggtgtggaaggtttgagggctatttagagttacatacttggtgcagtactggcaagaacctaacaataagctccctggaaataagagtcctaatttgtagcctttaccagtctctgtgatataaattctccaaccatggccaatttcaagctacca

SEQ ID NO: 425193 - DNA, 380 bp, Homo Sapiens
tataggacctctgtgttcctaccagatggtaactccaagtgagtatgaatggtgctgtcttatttgcatcgcctcacccatgttttgcacagtgcatacaacaactgcaagtgttcaataagagctgctgaaccaatgaatgaaagattctttctacggtgagtgacctggagcaaaagggggcaggctctggagggcccccttagtaacgatagtggccagggagagctagctgagcatttttagcagaggagacacacagacttttattacccaaattctccttcttcggatatgtggaaattgactttggggtagcagaaagggcagactggaggcagggagacctattagaagggttctataaacactgatatcct

SEQ ID NO: 425194 - DNA, 133 bp, Homo Sapiens
ggcttactggacttctgggacaggccaacatgaaatatctggtctgtgatcattcagctccccaggaacactggtgcgcctccagctggccctcgtgctttgctgctgatgtcaaacgctggcattgttgcag

SEQ ID NO: 425195 - DNA, 212 bp, Homo Sapiens
tatagagccaaggacttcatggtcttcatcttctattagccccattcccagaatcttcacacagtacaatcataggtttcttggccactctccaagtaaacctacaaactggtgaatccagcttcttcagaagcataatcacagcaccttcaagcacagatgaatcttaaaaaaatgctttatcccaatggctcacatattttatataaaag

SEQ ID NO: 425196 - DNA, 432 bp, Homo Sapiens
tactgcctgcagacctttacatatgcagctgtcacttctggctaagaagcccattccctctttgccagcatattggcctcctacttacatcttatgacctagttcaaccaatccctcctctactccagaaaagtattactccttctatagcactaagtataccaacctcactaataagataacaagttctctaaggcaggaaccgtattatgtaatattatattcatctttgttcacctaatattcaagacatttgccaaaataggtgtttaattaaattttcccttttgcctcaaatatattaggtccttggaattatgtataaagtcctcaaaaggtatacacaaggccatataccagaaactgcagcttatctcatttaaggttcacaataaccctattacatagctacttttcctattgtaatagaag

SEQ ID NO: 425197 - DNA, 149 bp, Homo Sapiens
tatggtaccttaatctacacctgccatgctaaaactatcaaggtgtaaactggtcctagaagagacaacttaaatttgatcatacttaacattagcaattactttgtaattactttatttgatttgtttccatagaaggtccaggtatg

SEQ ID NO: 425198 - DNA, 397 bp, Homo Sapiens
ggcattctggacttctcatttaggctggtccatattttgcaattgtgaattgtactgctgtaaacatgtgtgcaaggcctttttcatatatgacttcttttcttctgggtagatacccagtagtgagacttctggatgaagtggtagttctacttttagttctttaaggaatttctatactgttttccatagtggttgtactagtgtacattctcaccagcagtgtaaaagtgtttgctttttaccatttacgtgccaacatctattagtttttgatttttaaattatggctattcttgcaggagtaaggtggtatctcattgatttgcatttccctgataattagagatgtttagcattttttcatatgtttcttggctatttgtatatcttcttt

SEQ ID NO: 425199 - DNA, 278 bp, Homo Sapiens
tcggtccggcatatctggacttctttttctcttcttgggtaccctcacacccacaacttcattttccacctgtatgcaaatgtacacaagtgtgtatctcaagcccagccctcgtctctaagctccagatctatatagccaattgcctcaacatctcctttaggatacctcaaaggcaacccaaactctacatttctgaaattgaaacaatctctgtgtatcccaaccttttcctccaagcctggatctcttccagtgctccagaaggtccaggtatg

SEQ ID NO: 425200 - DNA, 262 bp, Homo Sapiens
cataccggaccttctccgtctacttgacacatcagtggtcagagagctcattgaggacgaagattccggaaagagccgttggtcgcccgaagagcccattggcgagcttctcatggttggtcgcaaagaacttatttgtcctcagtaactctcgcgtcgaccttcctgtatccccgtgaggcaggaccttctgcagatagtggcaacatcttggcggcttgcgtgtgcgcaatggcattggtgtggcccgaggtgttctcga

SEQ ID NO: 425201 - DNA, 471 bp, Homo Sapiens
catacctggaccttctcttagttagtgataagcactggggtgtgaccttgagagtgacaagtgggattaggtggaatgaagggagccagggaagtgagacgcaaggctcagagaaggatcgtctctacgtgtgatcaccaagaaagatcgtctctgcagaaatcaccaagaaggatcggtctctatggagatcaccaagaactgagacagggcagtgttgcagaaagagtgctcagcatttaaatatcttcagggaacggtagaggggagtgactagggctctctagatgactgcaacaaggactatcaaagaggtgtggtctgatggcacaacttcaaagccacagtttcgggggggatgcgcaggaataaatgatctgaaagaggcaacaaggagcagggaggacacctaccccacctacctgtggttcaggggctgcgggaatatgaacaaccaccacttgagaggga

SEQ ID NO: 425202 - DNA, 315 bp, Homo Sapiens
catactggaccttctttatgctctcttgcaagtccttatataggtttatattttcctggccccataggggcagaccttatagaggcaaagacctttgaattctggggagatggtgatcaccttattaactcccttctgcatacgtggattacagaggagtaagcagaccaagagcacagctgctgtgatcctgacagagacacacagaaggacacgagacaagagccttgttgctctttgccaggagaagtgaaaagtcttgattccaccctcaaagcgttgacttttcagataccttacttgtaggaaaaaata

SEQ ID NO: 425203 - DNA, 236 bp, Homo Sapiens
cacgagaggatcccggcatactggacttctggtctgcacagaaaaagttgccaaccctgacttagaagaatctctagatgagtggtcttcaaccgacagtactaaaggcatttaggatgaaacaagtcttcattgtatagggttgtcccttgctgtgcgggatagtcagcgtttttagtccccaacaggacctagcaccctaatcattatgactgaaaaatcttgtgcccctactt

SEQ ID NO: 425204 - DNA, 387 bp, Homo Sapiens
taaactgaaagctatcaactctggagactgagtctgcgctgagtacgctacacctgatgtgactaacagtgttcatttgatacattgtacagtctacagataatgaaagatgtgtagggaatggagcgcgcagggcttgataattcagacactggacatagtaaaagtatccctgtacttaataggtttctcaatactgaaccgtgcactaaaagtttaatctgcactgggcgagtgttctgtaagagtcggtaccacgttaagggaagcaggactctgaggcacaccatgaagaatagtcattgtctcataacaaatgggtggcgttgggtggatcagaagccgactgtaaacctattactgaggctaaattaagtgtggatctta

SEQ ID NO: 425205 - DNA, 427 bp, Homo Sapiens
tgatcgatgccttttacatagtatatcatgggctagaataaaaatagtctgagtacttttacaacgatcttttaaaaactagcccttttcattagagacgctctagtatataacattaacaaaaaaagccaaaataattaagtgaagtgactgagaaaacacagcacattcaataaatggcaagcacctcaaaatttctcttgccctcatctgaaaaattaattgcaactattaccaacattttccctctctctacaaagttcaataaataagtaaaaacacctgctaagcttttaaagttaactacttttttaccctgctctaacatttggctgaaaacaacttgcaaagagagaaaaccttagacaaacttcttatatttcaaaggacttgtaaaagagaatctgctgacatattagatcctttt

SEQ ID NO: 425206 - DNA, 394 bp, Homo Sapiens
tggaccttctcataaagaagttactaaagatcagtctccctcaagagggcgggagactcaacgagagaggacccagttggatattaatgggtctatccatagtttgattccaccagatggtcctagaactatctaggaatctctggggctggaccctgggtcctagaaatgaccacaacctaacatgggtgtcagaatcagagcttcactcgaggaggacctcattaagggctagctgacttagacagactcactcccatactttgttaaggggtcttctcctggtccaccacagcccactgtgattctgcaaggtgagagcaccttgacaccaggcttagacatctccttccatctgtctcccacgcagggtctcaaggcatctttgggttca

SEQ ID NO: 425207 - DNA, 198 bp, Homo Sapiens
  misc_feature (84)..(114): n is a, c, g, or t
tatactggaccttctcgggaggtcacaagatttgtaacttccccagtcgctcctatagatacatcattattgtcaaatagtgtnnnnnnnnnnnnnnnnnnnnnnnnnnnnnnnttttgcattctgatgacagcccaaatgcacagcaaggaactaagtcataccaaggaatgaagtcaactggtcctgtgactactc

SEQ ID NO: 425208 - DNA, 382 bp, Homo Sapiens
ggtgccgtgcgtgatgtgcgggggtgctctagtgctattacaatgcagacacagtttccatcaatcatatggacagcagctgccaagtactcttttacttggtgagttatggatggcaaagatgtctttcaactatgcacaaaaattggtaaagaactggctaggtgtccatccgtcaggtaggaaggagtgattataactgatctgaaggtagagtgagatacaaaatgccctctgaggatattttacttattcctgagagctgctgctgtctttgaacacctttgaacatttactttttaagacaattagatcaagggaaaaaatcatggaaagcatgattcaaagatcaaattcttcaatttgatgaagtcacacttca

SEQ ID NO: 425209 - DNA, 173 bp, Homo Sapiens
tcgatcgagctcggaccctggtatcacgcatgggttaggaagttcaaccagtctctaggaggctccaaattttcacacattttcctgtcttcttctgagccctccaaattgttctaatctctgcctgttactcggttccaaagtcacttacacattttcaagtatcttcacat

SEQ ID NO: 425210 - DNA, 182 bp, Homo Sapiens
tgatgagccgggtccgcaccaggcgcacttctgcaaaatacccaccccctcaacttttaggaaaaacttaatgtacacaagcagagggactagcataatgaccagattcagtaatcgccaagaatttgctacacttgcataaaccatccgttcgctccaaaacattccccttcctttctgta

SEQ ID NO: 425211 - DNA, 302 bp, Homo Sapiens
atggtgaagtataggggaagaaaagaggtagacgaaatattgttttaaaatacttaaccacgtagactatagtagtaatgttgagatcatcagatacttatggagaaacgatgacaaattccttccatctgctcctttcagattagtcgaacgtcagccaactggagttccactcttgtcgagggaatgtttgcaggactcagagaccctgaaagtgaggtcaaaggactggaagttctggtggtcagataactcattcagactggataaaagccagagtgtaaatgtgaaaaccctgaatt

SEQ ID NO: 425212 - DNA, 171 bp, Homo Sapiens
tacacatcaaagtatgtgctcagcgaggaaagcaagtcacctaccaggaccaagttcccacggcagcctagcagtgaggggacccaggtgtggagtggagacttgatgggctgcttggaagtgagtgacagttcagatgcccctgagaccacccagaagtgcgcctgggtg

SEQ ID NO: 425213 - DNA, 448 bp, Homo Sapiens
  misc_feature (87)..(87): n is a, c, g, or t
  misc_feature (97)..(121): n is a, c, g, or t
  misc_feature (143)..(291): n is a, c, g, or t
  misc_feature (321)..(381): n is a, c, g, or t
taggcgcactcctgaactcaagcaatcctcctgctcaaattcccagagtgttggcattacaggcgtgagctaccgcacccgtccttnttcctattannnnnnnnnnnnnnnnnnnnnnnnnagacagagtctcacactgtctnnnnnnnnnnnnnnnnnnnnnnnnnnnnnnnnnnnnnnnnnnnnnnnnnnnnnnnnnnnnnnnnnnnnnnnnnnnnnnnnnnnnnnnnnnnnnnnnnnnnnnnnnnnnnnnnnnnnnnnnnnnnnnnnnnnnnnnnnnnnnnnnnnnnntggggttttaccttattagccaggatggtnnnnnnnnnnnnnnnnnnnnnnnnnnnnnnnnnnnnnnnnnnnnnnnnnnnnnnnnnnnnnatgagccactgcgcccggccagttctaacccaaattctaagtcactcacccaccggccatcttatga

SEQ ID NO: 425214 - DNA, 453 bp, Homo Sapiens
  misc_feature (85)..(157): n is a, c, g, or t
ttaggcgcactcctggacagctgacttagctctactcagttccgtcacccgagaagcacaggtaacgccaatccgagtggcacannnnnnnnnnnnnnnnnnnnnnnnnnnnnnnnnnnnnnnnnnnnnnnnnnnnnnnnnnnnnnnnnnnnnnnnnggggtgtccgctcctgtcatcaccgtcgtcatggtcggcagcaagcctccctgactgggtggactcctgcagctccttccctgggtccagtggggaagccgtgtctatataccacactgggacgaggacctggaagagacttgggtatggccaggactgcccacttcctctcccattcaccccaacagacactgaaatgttctcctggagcctatgaacgtgcccttccatgagccaaggaccacactgtgtgttgggtccatcaagaaaggaagtcactggtaagcatccttctc

SEQ ID NO: 425215 - DNA, 471 bp, Homo Sapiens
tgagccggcccgcactaggcgcacttctccaggtattgcttggatggtcgtgtttatcctctctctatttataagaggttacttataagaaaaagaacacaaaataaatacaactttagagcttgaaaggtgtccatgcagttgagggtcctgacccttaagtgttattggctttttgataaattcacttctggtgcttactgtaggtagtcctgcctctacaagtcagtaaagaagatgcgatagcaaataatacaaagtcagacagcctcagcagctccttgatcatcttgcttctaggttctcagactctcttatcctgcttccatcttctgggacggcacatttagcttctgatcttggcttccaaatcaactctagttgtacatttttgcccatttttttctcccaaagtctcttaagaattctgatagcaaagaccccaatctggctttccaggtgttctaatgc

SEQ ID NO: 425216 - DNA, 169 bp, Homo Sapiens
caggcgcacttctaagatgatccttggttcttggggcatgacagaagagaaaaggtaaatatgtctggatacctctcttctcccatctcttcctagggtaaggactgtcatttactgctcacttctctagtcctagtaccaaaaccatgcccagaagtgcgcctgggtg

SEQ ID NO: 425217 - DNA, 456 bp, Homo Sapiens
ctttaggggaggggctgggagagactgacattctgttcagattccaggctgtggagctgggccctggagcagccacacttggcggctgtgagttggcctcagggtcctgctgagtgccaggtccctgcacaccctcacagtccctgggggctggctgtggcattggcattgctgagggtcttggccaatctgttagggaagtggggtctccggggccgagctctgctctggggtgtggatagcacagcgtctgccgggtgctgcgggagccttttctgtggggatgtgggtcctgcaaatgtgagcaccagctgtgattaaatcaaggacagtgaacagcagcgccgtcatcttcatgagttcacaaaaacctattgctttatgtcttattaggtgaatttagaatgtatacagggtaggaaaagcagcagaaaatagcaggtgtgtatgggaaga

SEQ ID NO: 425218 - DNA, 411 bp, Homo Sapiens
  misc_feature (255)..(295): n is a, c, g, or t
gccctacttggcgcacttctgaacctccctgaacacaagtactcatacagacaaccaccctctcagcatttccatctgaatgtctaataagcatttcaaacttaacacgctcccaaaccaaatcttactttcccacccccaaacaagggttccctatttgagcaaattgcacatcatttacctactgctcaagccaaaatacttaggcctcctctgtgagtcctctctttttgccacaatatacatacaacctgnnnnnnnnnnnnnnnnnnnnnnnnnnnnnnnnnnnnnnnnnaatctgtgagctcaatctccaaaacttacaccaagtgtgaccattactcatctccccagggatgacatgccactcccatagctcccagacatcctcaattctagcctggcatcctg

SEQ ID NO: 425219 - DNA, 252 bp, Homo Sapiens
tggcccgcactaggcgcacttctgggactccgcctcatgccgtccccctttcaatgacagagtccctccttatccccactcccagctgatgatctggtttcttatttggctgagagaacagaagccgtggacacagagccagctcatccctgcatctgcttcgagtactgaagcccctccttgcccctccttgttgggtgagccgcctctgctcctctggcaggaggctccctccagaagtgcgcctgggtg

SEQ ID NO: 425220 - DNA, 185 bp, Homo Sapiens
gtatctagaggatcccgcacccaggcgcacttctgagggagacaacgcagagtccgcctccaagctacgcccgcgcccccctcggacggcagcggcactccacaacacgccagcgtggacattcgcacgggtacaccgccacgtcggacacactggaccaggcgctccataagtgcgcctgggtg

SEQ ID NO: 425221 - DNA, 158 bp, Homo Sapiens
cacccaggcgcacttctggggtggagggcttcttgattaaagtcggatcattttaggactttaggaatcttctggaaaaattggccttcccatgaccatctgggtgattttatgtggatactgctctggcttttttctgtgagaagtgcgcctgggtg

SEQ ID NO: 425222 - DNA, 102 bp, Homo Sapiens
cacccaggcgcacttcttcacaagatccaattggatcacaccctattaccctatgcttataaaactctacccaactaccagctccagaagtgcgcctgggtg

SEQ ID NO: 425223 - DNA, 430 bp, Homo Sapiens
cacccaggcgcacttctctacctgcccaggctccagtaaagccaagaaagagctggagtcaatgaccttctccagcatctgtgtaaacctggaaagttacttacctgttttaaaaaaagaggaagacaatatccatagtacagatattttcccgggtaaggattgtcataataatggcctgtgaaggcccttagcaaagtgctggcataaggcaagcgtgtaataaataactactggcatgaaggcctctggtgatcagattagccctctgtgactttcccctcccctgggttcccataagaaatggctgaaccactcctttggcctttttcaaacacagctttgtaacagttgccaattttccttctatgagtagctcatttccccaactgcaatgcaaacaacgcttatcactcaacaaatatttgct

SEQ ID NO: 425224 - DNA, 323 bp, Homo Sapiens
tcaccctaggcgcacttctggacagtgtggggggccacattcgtacccagccacccgcgtgcaggatgtggagccggtgtggtcagctcctggctcctcctgcctgtgttgcaggtagtatccgggcgcgcacatccctgtacctcggtgcgctccctccgttagctgtccgtctgtctccctgctggccacgtgcacgtttgtcatcacaaagcctccgagtcctgttcccaagggtagtttctagcctcggaccatgttgtgacaactccatcgcgagatgttgctgaaagtccactccggccagagaagtggcctgggtg

SEQ ID NO: 425225 - DNA, 251 bp, Homo Sapiens
gcagccaggcgcacttctctgcccacatcctttaccattttggtgcaccccaggccggctcccaatggccatcccctgcgtctctgtgagagctgcctattgcgctttgtccatgaacatgacaggccagaagtgcgcctgggtgcgcatccaggcgcagttctggtagtttgactgaggtgtgtacatgtgtgtggggattgtctgtatccttcacttctggtagtttgactgtggtgtgtatatatagt

SEQ ID NO: 425226 - DNA, 322 bp, Homo Sapiens
cccaccaaataaaacaatgcccatctggggtgccaccaggataaggcgaatgtggaatgagtgatgggaaaagaaggctctgatgtatcagcttggccctagcgtccatctacagaggctgaaacagttacatttagtcatgacttttccttgcattcttacatgaagggcactcatggtggccaatggcacgattcagatttaggtgaaactgaaatgacatcaccacatgatgacacatcggctgatcggagtttgtgggaggaaaccaatgtcctcagtgtcctccaagcaaaaggcaagaatgtgctgagaggcacag

SEQ ID NO: 425227 - DNA, 394 bp, Homo Sapiens
gcacccaggcgcacttctcacccttcttccaccctacgaaaggccatatcttacaagagatgctggtaaatgccagacattcactgtgtcaggcttccccacagctagcagtggcatgagatcagttcaatccaatgacactgaaatggaactctccaaagtgagtttctgcaaaagacttctctgttaacagggagttataaggaaatatgcaccttccttccctgctttccaatccaggcatgatgtctggtgctacggcaaccatactgcaaacatgaggcaaatgagcctgaggaataaaagctaaaacactaatagaagaagaaaaagatgcagaacctagatccttaatgacatcattaagccactgcaccagctttagaaccaacta

SEQ ID NO: 425228 - DNA, 138 bp, Homo Sapiens
cacccaggcgcacttctgccagctcccgggtgatgctggggtctcctgagcccctcgaatgaggccaggccagcaggcgttatgccagacagccgccaacagtgtgcgtcgctgctttccataagagaagtgcgcctg

SEQ ID NO: 425229 - DNA, 139 bp, Homo Sapiens
cacccaggcgcacttctggcatactgtgggcattctgaaaatggagttgatatttctggtaggctttctcaaaggggcaaacactgagtgggagtgaattagaggcaaggagacatgacatgagaagtgcgcctgggtg

SEQ ID NO: 425230 - DNA, 159 bp, Homo Sapiens
cacccaggcgcactctgccttgtaggctaactgtaatttttccctacgtttctctttgtttaggaagatgcccttgggggtgaaaggtgaagtgctattgatgtttaagtgggaagaatgtggagtttctagagttagggatagaagtgcgcctgggtg

SEQ ID NO: 425231 - DNA, 205 bp, Homo Sapiens
gcacccaggcgcacttctcgagcctcacctcatggccacggcacctcaggcccacagggagtactgccagactaccaccatgttccctttaggctcaagggctcttcagatcagcttgtgttgaatgctgcctggcctgggactcaccctttagagcagtgaggtcccttctggcctaaggcaagtccagaagtgcgcctgggtg

SEQ ID NO: 425232 - DNA, 302 bp, Homo Sapiens
gcacccaggcgcacttctgggtattttgtaaaggaaagagatttaactgactcacagttccacagggctgaggatgcctcaggaaacttacaatcatggcaaaaggggcagcaaacatgtccttcttcacatggcaacagcaaggagaagtgcagagagaagtccggggaagccccttataaaaccatcagatgttgtgagaactatcacgagaacagcagcaagaaggaaaccgcccccattattcaatcacctcccactgggtccctcccacaaaatgtggggagaagtgcgcctgggtg

SEQ ID NO: 425233 - DNA, 408 bp, Homo Sapiens
cgtacaggcgcacttctacagcttctctacttcttcctggcagtgtcctcagagtctctaggccctgtcctggagcttggtttcagtagcagcagagaagagcagaggagagtgccctgaaagtggggcagaatgaattgtagctacacaccaccagctcagctccagctctttgaaagtcaatctgggtcacattagctgtgggctggaacatgaccacgtgggcattaattctgtgcaggcagcagaaaagacagccaatactgtcctttctctgaggtgcagggcccctgtgggaccccagttggtgagggaaggtggtttctggattgcaaggtgtaatgccatcttaatgccatcatgcttttctaatgacatcctaggtgacatagagaaaggtatggaatg

SEQ ID NO: 425234 - DNA, 431 bp, Homo Sapiens
  misc_feature (105)..(203): n is a, c, g, or t
tagaggctccccgcatccggcgcacttctccaaatgaagcactgtgctgtagggaaaggaagggatgtgaaatcatataattttggattcaaatgctgaattacnnnnnnnnnnnnnnnnnnnnnnnnnnnnnnnnnnnnnnnnnnnnnnnnnnnnnnnnnnnnnnnnnnnnnnnnnnnnnnnnnnnnnnnnnnnnnnnnnnngtggtaaggattgagtgagaaagcaaatgtgaaaatgcctagcagagtcagctaaaaaacagatgtcaaggaaaggctcgttgacctcattaattcatcccaaaagtatacagctgaggaaacactttctggtccagctttagtgcagaactgtgcccagcgatcttccccaaagtcttgcaggtgtcatgggtgtggtttcccagggaaacaggtcctgcttccaga

SEQ ID NO: 425235 - DNA, 220 bp, Homo Sapiens
ctctagagcgcatccccgtaccaggcgcacttctgcaggtactgtgctgcggaaggggagcgagggcctcacttaacggcatggcactggcgcgggaactgtgagcactggtggtattctgaggctacgatgtcctgtggtcctaacggagcagcattacagcggaagggacggaagagcccacgaacaggatgactgacagaagcatcgcactttgact

SEQ ID NO: 425236 - DNA, 150 bp, Homo Sapiens
caccaggcgcacttctccctgggtgttgtttagggtcccacgtttagggctcttgtcccaagaaaagagtggccccaacctagagatgcagctgtgctacctccacagctctccaaggattcacacgggactgcttatgagcgccgggtg

SEQ ID NO: 425237 - DNA, 212 bp, Homo Sapiens
gaggatcccgcaccaggcgcacttctggaggagcgcataagatcacagtatcatggtcctgaagtgcaggacgtagcgagaggatctttaaagcgagaggagtttgtcaaatactgctgagaaccagaagcatgagtacggtgggaaactgcccactgaatgacagcagcagagcactcagcaggcaccttggcagaagtgcgcctggtgtg

SEQ ID NO: 425238 - DNA, 226 bp, Homo Sapiens
tgcagggttgccgtagtacgtactttccgcggaatgtaacgccgcctcagacccccacatctcaatataatatgctgcgtgtcgctggataggaatagctaccagagtgcttgggttttgccatgtcttctcttgcataaaattggtcgtgactgagaggccccttctgaagatgagagtgctggagagagcgttgtgcgctgtggttgagaagtgcgcctgggtg

SEQ ID NO: 425239 - DNA, 609 bp, Homo Sapiens
  misc_feature (569)..(569): n is a, c, g, or t
ctccattctctcttagaagaattagcaagtttgataaaggatgcaacagaatcccatgagtatctatcatgctcagagctctgtggtaccaggttactgcaccgttctactttgggtctgtctccaaacaggatattatttcagaaatgaatctgcagcaatcctgttcctggtgaaggggaaccagtgctgtttgtgtgtaacatagcgaaagatgtcagtagcgagtcaagccatttaagagtgcatctgatgaagagatgttggtattcatatatggcctataagatttcataagaggcatagtggagagtttagttaaagaaaatgttcttttctgctctttctcgagtatactggtgtgcaggctgggagtggtgggtgcatatgttatggacacctgtttacgaatgggccacacctatagacggctggcctagtctttccaggacagctactgaataacagtattgtgaaagatctgcagagcttttgaagaatagtttgactttcaggtagaggaaatcataggactgcagaaatgtcgttaattagagaaagctctatgntcagattttccggcatgagacaatagccaatatggctgac

SEQ ID NO: 425240 - DNA, 525 bp, Homo Sapiens
  misc_feature (56)..(56): n is a, c, g, or t
  misc_feature (189)..(223): n is a, c, g, or t
  misc_feature (506)..(506): n is a, c, g, or t
gttgatcagaggatccccaggtcgacggagactctctcgttatctgagttctttgngagaaggggtgctcatatcgggcgctcaggcggcggctatctggatctcaaacttcggatataacaggggttttaacctacgtaacaaaaggaaaacggttttccccacttcttatgccaaaggttttaattnnnnnnnnnnnnnnnnnnnnnnnnnnnnnnnnnnnccttcctcttctaacatgaccttcctatgatttcaaagtcccttccctatctaaatttataaaatctatactcttagctagtctcggactaactctggacagggtattagatggacagattagatggttggcctctagatccattctccatccttcacggtaaggtttatcggtatcaataggcagcctcactctcagtcttcccttgggttcatcaatggagagacctgggaggtaatcagaaagataaaataaagtgcgatgaagcatttatttccctggntctctcctcatgaggttgc

SEQ ID NO: 425241 - DNA, 105 bp, Homo Sapiens
cgacggagattctcaacatttcttgaggctccgctacccggcggatgttacaaggacaccatctcaaatgcaggtcgccattgcaacatgggtgcagtgtcgctc

SEQ ID NO: 425242 - DNA, 450 bp, Homo Sapiens
  misc_feature (20)..(20): n is a, c, g, or t
agttcgacggagatctccgntgtagttatgaaatgaaaattttttaagacaaaagagaaaaatcctcagtgatctttcagcttttattggccaggcttgataaaaaatgaagttgggaggtatttgatacatactcgtggggacagggttcttggggaaggaatagttcaagtgccaatatggtgtaaatgtagtattttgtgcactggctgaattacgataaacggcatccattgccttatagatacacacacataactccttgtgacagtaataggaactaggcatgcaaagagagggaaaagaatgggtccctctctgcaaaccctgcatttatatttaacatgatctccagctctctgcagttgttggaccctgctattgagaccctcaaacacaggtaggcaccagggcaccagaacaactgcagagagtctccgtcgaactggg

SEQ ID NO: 425243 - DNA, 129 bp, Homo Sapiens
gggattccaacatagaatttgagaggcacacagacatttggtctgcagcagtcttctgtccattttcagactgggttgttttcttgccctggagattccttcatgttagtctggatgcatcctctggca

SEQ ID NO: 425244 - DNA, 113 bp, Homo Sapiens
agttcgacggagactctcacattccatgggatagtctctctgtgggatcacaggatgttgctccggatcatacactaggcgagctaggaggtgcttagatacccgcctgttgt

SEQ ID NO: 425245 - DNA, 199 bp, Homo Sapiens
  misc_feature (112)..(112): n is a, c, g, or t
  misc_feature (120)..(120): n is a, c, g, or t
  misc_feature (165)..(166): n is a, c, g, or t
agttcgacggagtactctcaatagaacatgcttttgagactaatcacatttacggaagaggaaaggctactcttgattaatatgaatgtaaagccttggctattatttaganatctacangggaagttttttgggctatcttgtgtatatttgatgcatagtaanncaatttgacgagaatatagaccaagagatataa

SEQ ID NO: 425246 - DNA, 632 bp, Homo Sapiens
  misc_feature (400)..(460): n is a, c, g, or t
agttcgacggagactctcagttggtatatcctgcaggctcttgggacaggagctcattctgtggaccgcactggagaaacagaggctggaaggcttgtcctccccacctgcccccatctgatgtgagatctgaggcagggccactgtcaggcctgggattaaacatcaggtaaaacacaatgatgtgcaaagtcccctgagccctatatcagtgccatgagaaacatgagtgtttcagatacactttccctcatggcatccagcactcaagaaggtctttaaaagagaattgaggaaagtaacatcatcctgctttgaccttcttccaagttaagtgagagcattctcaaattaattagtaatatgataaataaaacatcagagaattagcactttacannnnnnnnnnnnnnnnnnnnnnnnnnnnnnnnnnnnnnnnnnnnnnnnnnnnnnnnnnnnncccacaggcatggctggaaagaatgtagactggaacaggcattctggagaaataatttggctgaacttaaccaaagtaagtatgtgcatatgctatgagctagaaacaacaacatttcagaaaacttgagcagattggagagcatttgggagttgataagagattcccaatc

SEQ ID NO: 425247 - DNA, 389 bp, Homo Sapiens
agttcgacggagactctctaatcacacctcactcccctgcactctaataagcttccgtcagtgtgaagaaaagagggcggagggagggcttactcgagggaactgtaaaacacactcccccaggagtgggtggagctcaggacacctctcaggcctggcacaggtgggcttttctttcagaggaaaattaagtagtagccagtcaacctatcagccaactgcgcatcaaggggccacagtctataggatgggaagccaaaatatctccaagcaagaagggtggtgcgccgctgcgcacatcccaaatacccacttctctccaggcactgcccacccatgagggactttcccttttccaagtggcagagcctggagagtctccgtcgaac

SEQ ID NO: 425248 - DNA, 225 bp, Homo Sapiens
agttcgacggagactctctaagagtcctgaggtggtacaggccatcgcaaggtgagggggctaagtctgctagctcatgtctctcttcctctatacctagaaaaccaccagtctcactcccatgataagccattaagttcatgaatggatcaattcatgcatgaaggcaagaaccctcaggaccccacttatcaataccaccagattagggattacatttctttc

SEQ ID NO: 425249 - DNA, 249 bp, Homo Sapiens
agttcgacggagactctccttaatggggcatctcctgatggggcattatctaggcaatctcgaatacggatctttatgatagtttctgctctggcacgctttcaagttgtaggtggccccaataaggagaggaatcgtcccagaataatccataaaaggtctggttactctgacagacgtgccgtaaccgaacctcaaaccccgtctccaattcggatgtgcaggaggactcacaaaaggaaatggctc

SEQ ID NO: 425250 - DNA, 519 bp, Homo Sapiens
  misc_feature (457)..(457): n is a, c, g, or t
agttcgacggagactctcagtctatgacataaaatgatgataataggacatgagagttaaagggattctaatccaaaggacaagtttaagaggctgctttatacctccgtatgatcaattagttttcagtacgtttatgtttatttagtctgcttctgtcacagaaacatagtaggaagaagttaaactagagatggagtccaacatttagacatcctaaatgttgatactgggcatgcatgggttagggtaggaaatgtggtatgagaatagggtgctgctgggggcatttggtgaggatggagactggagatgtcatatgggggatgaatttgaaccaggcagtacttagcaagaggtagtgggagctgaattagcatggtagcaataaggaaaggaagttaccacccagagagaacttgatatgcctgattgggtgtggaaggtgagagatgtnttactgcctggatggtgcctttcacagacatcatgataaagtgggtgggagttaggtagaga

SEQ ID NO: 425251 - DNA, 454 bp, Homo Sapiens
tctagaggatcccagttcgacggagtctctccgactaaaggcatagtaagatcactggatttaatcttaagtgtgatgggaagcccatgtaagtcggagagtgactggtcagatgaacatttgcaaagcttactgtggctactgtggggagaatagacagactggaggataagactcgaacagggagataggtggaaagaccattgcaatagcgcagtgagagggactttaagcttgcactagagtgacagcagtggagttgtgagaagtcaagatgtgaaaagtgatctactcccattttgaatagatctagctgaatgcaggagatgaggaaaggagaactgtcaagttccatagctagttgctttgagtttcagtattgaaagtgtgagtacccataattaagtcatactcatggggagaggaaagaagagagtctccgtcgaactgggta

SEQ ID NO: 425252 - DNA, 390 bp, Homo Sapiens
tcgacggagactctcatcgagaagctctttccgcctgctgagtcatcagtgcgaatcctacagtcctccaggctcaggtgaaatgccacctcccatgcccagttggcctgactctccattcttctaggaactcctccaggagcccggcatctgattctatcgaatcctgcacggcttacctcatttcatacgtacacttttgaggataaggctcatagcttacagatctttttgaaatccagtcagatttaggacagggccttgggcagtcatttgctgattgattctaaagtcaactctctccaacagtaggtgtctatgccactatcaggcagtatttctcaaagcgtggccaataaccacctactgttggagagtctccgtcgaact

SEQ ID NO: 425253 - DNA, 183 bp, Homo Sapiens
cctgtgccctgtgctggcaggtcctcccgagagctgaaggtgccttaggacccaggcccatggctgctgacctccactgatcaagggaggcctgatgaatgggggttttctaagtgggatcacatctctcctcaggtcacagtgcccaagaaagggtcacagcttccccctctgattgggtct

SEQ ID NO: 425254 - DNA, 117 bp, Homo Sapiens
agttcgacggagactctcatcacaacgcagaattagaccccgatggagaaaatgggtcagtggatccattcccaccccacccctccaaatccagaccctccgctaccacctcatcca

SEQ ID NO: 425255 - DNA, 574 bp, Homo Sapiens
  misc_feature (102)..(102): n is a, c, g, or t
agtcgacggagactctcttcactgcagttcctcacctctgtcagcattcacagaattgaagagagtcagatttgctctggattagttggcttaagggaatgntgtggctggtttgatcttctatccagaccactcagaccttgtccatatcagcattaggctgttttgctttcttatcattcctgtgttcactagagtagcacttttaatttacttcaagaacttttcctttgcattcacaacttggctgtatggcacaagaggcctagcttttgatgattgccagaatagtaagacagaatttaaaatggttccatggttgatcagatgggagattagtgggagtagggaacacaaaaggcatgggaaaagaagataggtcgtattttggtcatactgacaccaacatgcctaaaggatagccctgtgaaaaaagctagcagacagttgaactgcggctgtgaaacaggaagccgtgagggctagactcatcgttgtagtcattcgtaaagagtaaatacttggagctattgtagtagatggtatcaccacggaatggtgagggagctggaaa

SEQ ID NO: 425256 - DNA, 118 bp, Homo Sapiens
cacctgtatcttcctgatgcttctatgatgaaacagctatctgctcaaagccaggtgcaagttttacccatggactctcaccagggactgcggccttggcgagagtctccgtcgaact

SEQ ID NO: 425257 - DNA, 572 bp, Homo Sapiens
  misc_feature (49)..(49): n is a, c, g, or t
  misc_feature (103)..(103): n is a, c, g, or t
  misc_feature (432)..(432): n is a, c, g, or t
  misc_feature (479)..(479): n is a, c, g, or t
  misc_feature (491)..(491): n is a, c, g, or t
agtcgacggagactctcgcacctacatttgctgatcaagcaaggtctgntggtgcgagagcttaacctttattttatttccaaatgtgttttttattccgagntcccgtggtgtctatggtttcacttttctccatgagccacatgttaaagcctgccctgactaaatgaaggagtgtaagcagtgggatagacatggcaggcaggcgaaactgggataagccccagaatcttttgaacctatcagtaatattactaacagggagaaagtataaaagtgagcgcttcaagtgctctagtgtacatgtcagaattaaagcacgagttccacgggatggctcaccaccctcccttatttataaaacagaagtatcttttgagcccgctgtgccctcctcccccttttctatgcctgtttttctgcctgggttgnctggtttttgctctgcttgttgaaaccctgctcatccttcaggctgnctcaaaactttngtggaagaaggtagggaacacatatctcttctttggtccagccttccttgattagacttcttcctctcccttttaaccatt

SEQ ID NO: 425258 - DNA, 299 bp, Homo Sapiens
agttagacggagactctcagagcagatgacccccttagtccctgaagaaatagaccaacctcagtgttcactcatggactaaacacaacatcaaactaagtaggaacaatcccatagctcaggctctgcaagattcaatatacaagtcacttcagacaacttcagttgcaccaaatgctcctctgcttcagagcattcactcagcagtgtatccctcttcagcaaggcaggaatggcccacgtctgccaccttccagacaagtctgaggcagctgatggagccgcttgctgagacccat

SEQ ID NO: 425259 - DNA, 415 bp, Homo Sapiens
agttcgacggagactctcatctctctagcccaatctctcctacattccaaaaacatgtttctaaatcatactccacatctctcctccaaggtctacagacacctaagattcaaccaccttaccaaggttgatccacaagaatctcagactcaacggattcaaaacagaattcaacttctttccacttcctcaaacccaaacttgtacatcctacctatattgtgagtgcttccaccaagccacaaacctcagtggaatcctggactcctttctactcttaataacctacatctaatcatttaccatgtactgtccattgggcctttataaacttctcttaaatctgcagactcttctaccttacttctggacagcatcctctcttccctgaattactaaattagtctcctcgaac

SEQ ID NO: 425260 - DNA, 498 bp, Homo Sapiens
  misc_feature (393)..(393): n is a, c, g, or t
  misc_feature (431)..(431): n is a, c, g, or t
agttcgacggagactctcactgttctctctgagtacgggctccacaacttcacatttagagtaagaatgcatacttcccagggtcatggagagaaatcagtgagagtgtatgtgaaaaccctttgaacatcataaggcacaacgcaaatgtgaaattatttattattggcatgggaaggtcaaggatgcagtggtagctcagaagcagaaggtttcaaggtaatggggctgagctgccagagtttgctggggaaaactagacccctccttgagcaggccgagggaagcaggctgcaaaaacatcacaaccgggcaaagttctcttccttgggcctggacagaccattacaaggtactgttgagagtgaaagaatgggaccctcggcccattgngcaccccatgggttattttctgtgctctgttctgtttngcttcatttttaattctgggtttttctcagtttatggctttaacaattatgcgtgatgctgagcctg

SEQ ID NO: 425261 - DNA, 378 bp, Homo Sapiens
agttcgacggagactctcacaatcaagagggaattcagtcttgaatttgtgagagaccattcaggcttgtgggaataggtgctgcagagctgacgccaaggtgccctggatgggatggacagtggtggagacctggggtccaggaggaggagacacgggagcattccacacctttgacccaggggtcgggggcagagtggcatgtgctgtggacagaaagagatgcacaatgcaagtgcatgtggtggttgggaagagtgatctggggaggaggagcattgtgattcaggtgagggaacaccacccaaggaatgtccatctggcatttgtaaactgaggtgaacctggcatttgggagagagtctccgtcgaactggg

SEQ ID NO: 425262 - DNA, 436 bp, Homo Sapiens
  misc_feature (408)..(408): n is a, c, g, or t
agttcgacggagaactctctttcctgttaaacggtatgacggaaaaaacccaccactggctaagggcttattctgagagttaacatagagaaaataccatggtaagcgtaaatgacatggagatctaagatctcataaccctcaggttccagtacgatgttattgcagattctctgcagcacctcaccagtttgctgacattacataggcaaacagtattctttgccctatattttgcactttgaaagtccttttatactaaagaaagtattgccaatgccaaagaacgaaattatccttccttcccattgtcagatccaggaagggatctcatttacaaaagcaacctaaatgcagcattgatgaggttattgcttctcctcttgacgtatctctccatcaggtttngcaaaactgatggagagtctccgtcgaa

SEQ ID NO: 425263 - DNA, 415 bp, Homo Sapiens
  misc_feature (403)..(403): n is a, c, g, or t
agttcgacggagactctctacccacccctagtggtaggctatgaaacaaatcgattcagtttaaaatagtttatgtgccgacatagtgttaaaacgttcatgtatgcattaagatcacaccaaatcacctgactgattccttcatcaaaagctcctcttggcagttagcagtacacacctaacattagccaaacaggttatctaccatcaacacggagaaataagaaactttgtattgccatttaaagaagttgctttctaaaactagacatgaataagggagagaagaggaagtattaaacccctaaactaattaacgaaataagggaggggggatgcaggaaaacaatgataattagtatgtacccttggttaaccaaatccacacatactaattatcatngttttcctgggg

SEQ ID NO: 425264 - DNA, 501 bp, Homo Sapiens
agttcgacggagactctctgaatcccataactaatgacctcgagagaggctcctcctactttattaataagaggcgaggaagtataatccagcagtatgacaggtccgcagtggacgatcacagtgaacagaaaactcttggagccctcttgggcctgtgctttgaggcccctggctgccctggcatttctgggaccctgttgggttatcatggcctgaggcttctggatatcctccaaatgacaagttaatcacccaattgtcgccttcccatgggggactctccaaaaggactgatggtggctcggaaattagtcagagatctgggacagaggacgagcaaagcttcgtcttggggtctcatgggacctggggcatctcccccaagatatgtcgcagaggcgggactcagagtggtagcgggatgagtgttcagagttgtgtggcgtaggcatgttggaagggaagctcttagggctggaggtgggagggtgggaatga

SEQ ID NO: 425265 - DNA, 403 bp, Homo Sapiens
  misc_feature (48)..(48): n is a, c, g, or t
  misc_feature (319)..(335): n is a, c, g, or t
  misc_feature (381)..(381): n is a, c, g, or t
aggttcgaggagactctcaataactaggtatcttccttcaatacctantttattgagagtttttaacatgaatggatgttgaattttctgataaaccttttttgcacctattgagataatcatgtggtttttctctttagttctgtttatgtgatgaatcatatttattgatttgcatatgttgaaccaaccttgagtcctgggaattaagcctacttgatcatggtgcataagctttttgatgcgctgctcgatttgatttgcagtattttgttgaggatttttgcatcagtgttcatcaatgatattggcctgaagnnnnnnnnnnnnnnnnnatctctgccaggttttgctatcaggatgaggctggcctcatagatngcattagggagagtcttcgtcg

SEQ ID NO: 425266 - DNA, 106 bp, Homo Sapiens
agttcgacggagactctctgccccaggtgagcttcagtgccgctaggggtacccaaaagcgggcagaaggcccatgaggggaaggtgacacacctggggcagagag

SEQ ID NO: 425267 - DNA, 363 bp, Homo Sapiens
agttcgacggagactctctcttcttgattagtatcgcaagaggtttccacattttattagtcttctttaagaacttttattttgttgatccttccgagtatttctttgcttggcacttcccatcctctgctaactctacaggcttactctatgttctacttctaacctcttgtggatctgtttagttattaattttaacatcttgtgttgcattgtgatttcttctaaacctattaattaatttgaagttgctttttgggtgttttgttgattttagtttcccagctaaactagaaggggtgataaatatctttctgttgttttgtagttttattgcatttttattagaaaacagagtattca

SEQ ID NO: 425268 - DNA, 121 bp, Homo Sapiens
agttcgacggagactctccaggatacggaggatagctgctggattatacgtatcctggcagagtccaataagaattcgtgggctcgctagtcgccagtacacgtgcaggaggaactgcatc

SEQ ID NO: 425269 - DNA, 338 bp, Homo Sapiens
agttcgacggaggctctcgaataccctcagcacacagccaggaagtgacgagggtatttcaagaggctccttatcgattagcccaaggtgtctggcccagtcctcaccctcctcagggccatgggctgggagccctctcatctctcctttgctagtggaggctggggagactgcgaatggctatcaggacttgagaaggtgtggctgggagattggctacgaatgcatggagattacaaaacagggagatgggtctccacgtgtggtctctgtgattcatctgagggtccgaagttcgagctcacctcctggagagtctccgtcgaactgggtaccga

SEQ ID NO: 425270 - DNA, 530 bp, Homo Sapiens
  misc_feature (488)..(488): n is a, c, g, or t
agttcgacggagactctccccctctttcaggaaaggggtcacagagcggccaggacaaatctgctgccactcactgaaatccctccccaagaaaaacctcctgcaattcatccctgtccatagcagggctacagactgtgagaaaacaagcctgatcaactcacgtggacaccacaaagtcaaagtaccctagacctagaatccagtctttgtgttgagtaagttttcatgaaagcttcctctgtcagtgtaactgctaaaatgcactcattgatgacaaagcccaaataggaagatgcctccaaaacaccagctctagactactctacaatcctcccccatcagacaagagtagacatgtggctaatgaaaagagccagtaatctaaaactcaagtatgttcatcaccaaaacgaggttttacatttccacagcccctctgccatcaaatggcacagggagaaatctcagaggtcaatgccctctgncccccgctcgtagcctcactctggtttgctctctctttcccc

SEQ ID NO: 425271 - DNA, 545 bp, Homo Sapiens
  misc_feature (57)..(135): n is a, c, g, or t
  misc_feature (214)..(243): n is a, c, g, or t
agttcgacggagactctcatcgaggatattgggtggctccaagtcgttgctattgtnnnnnnnnnnnnnnnnnnnnnnnnnnnnnnnnnnnnnnnnnnnnnnnnnnnnnnnnnnnnnnnnnnnnnnnnnnnnnnngagacataagagaaagggtcccttggaccgtctacctttgtaccatgttcaagtattacttatgtttttaaatatttgnnnnnnnnnnnnnnnnnnnnnnnnnnnnnngtaagacatctgaggaagaaacctggtttagctgatcttaagaatggttcagaaaacttaagaaagatgttaacttaagaaagatgtttggagataactaccgactcttgttaaccacttttcatggacaatttcaaggggatttgtctacccatcaccaagccctgaattatcaggtagaccgcaagtttccagagggaagaaggcatgggtttttgtacctctcctgtgacctagccaagcctctggaagagaatatgtacttgagaaatattaggtcacaggagagtctccgtcgaact

SEQ ID NO: 425272 - DNA, 448 bp, Homo Sapiens
agttcgacggagactctctattaggggcaaatgagtgagtatggcttcaacttaaagtcaccagctgcattgcccctaataagagagttagcctgtccttgaagcgttgaagccagatactgacttcttatctctagctatgaaaaccctaggtggcatttttttcaatagaaggccgtttcatctacattgagaatctgtggttcggggtagataccttcatcagttatcttctggataagtagctgtagcttctacaactacttcaccttgcattttaggttaaatgcttcaccttgcattttaggttaaaaacaacgtctttccataagcttctgctagggtctatgaaccagcctttgctagtttgcacttttctttcgcagcttcctcatggtgactctcagccttaatagaattgaagagagtctccgtcgaactgggtacc

SEQ ID NO: 425273 - DNA, 270 bp, Homo Sapiens
ccacctcggtctcctgagtagctgggactacagacattccgccaccatgcctagctaacaaagggtattttaaggcagtgggttcccttctggctcagggtgtgtctagaaatgttgtccaggaggtagggcctgaagtgggggcctcaagactctgcctgttgccctgtgcactatggctgagctggtatccaagctgccagacaaaggcctctctactttcctctcctctcctcaaaaggaaagtagagagtctccgtcgaactgggt

SEQ ID NO: 425274 - DNA, 114 bp, Homo Sapiens
tcattgaagatatgtagaagaactacgttgtaatttcagaactagaaattacaataactaagtaaaaaactcaatgggtgaactcaatagcagaatggagatacagggtaccga

SEQ ID NO: 425275 - DNA, 346 bp, Homo Sapiens
agttcgacggagactctcaaagttcttctcagtttcttttcctctccttaaactcacacataagccgtaaatccaaggccggggaattaagtgtccaactacccaccctttcaaagccatctttacttggagtctcgcccctgactcctgggcagcttattgtttgctccaaaccacaaatattgtctccttagaatcgtcctcccataattccatcgtgttacttctgggccaccttgacaccgttcatatttctactcctgactgggaggccactgctggtctcatatcagtccagctcacccccgccttcctccaggaaaggagagagaaactttggagagtc

SEQ ID NO: 425276 - DNA, 383 bp, Homo Sapiens
  misc_feature (22)..(22): n is a, c, g, or t
agttcgacggagactctcttcncatccagcctcatgcccttgtcttcccctcatctcctgctggggtggaagagaggatggagaagcagggagaggggatccggaggggcccacgccaggaaaccaggctgtgtctaggtgcagctgttcttgccgagtctctcctgtctgcaaagtgagggtgataaacgcctgtcccacgtatgtcctggggctgttgtaaaaatcagctgagaagctggatgctggcgacgtgtgttcacggcgctgttctctgccagagtaagggataattgttgctgttgataaacactcactgggtcctcaccacgaactgagtcttttcacatcctcagttctgctgagagtctccgtcgaactgg

SEQ ID NO: 425277 - DNA, 517 bp, Homo Sapiens
  misc_feature (48)..(48): n is a, c, g, or t
agttcgacggacgactctacattaagttctcaccacaactatctttantcagtaaggatacttaaatgagagacaccaggtgaagttttcatcatgtagacagtggcgactcagtattttaagtgagggaatgataatccaatttgtgtaaagcagggcttcttaggacagttgactggagggagaagaaaatgaacttcagttgatgaggaagaacgtagtaagacaacaaaacagagctgggaatagagcatttggaactattggggactcatatgagaagaaattcaaatgtccaacgattatttgactgaatgtgaaggaaggagtaggaaggttgtgggatgacttgaacattttaaatttaggccgctgtaatgcttttaaatgaaggtgggaatagagatgaacccggttttttaaatgggaaaataacccagttttgatcttttttagtctgggtgcttactggatgtcaaggtagaaagtgtccaacaaggtgctttaactataggtt

SEQ ID NO: 425278 - DNA, 252 bp, Homo Sapiens
  misc_feature (92)..(92): n is a, c, g, or t
  misc_feature (115)..(123): n is a, c, g, or t
gtaaatgggggctagtggtgatgaactccctcagctttggcttgtctaggaaaagctttatctctcctacatttctgaagggtagtcttgtngggtaaagcattcttggttgacnnnnnnnnnctatcagtactttcaatataccatcccactgtccccgggactgagaaagtttttccaaacaaaagcatcatgtcttgctcctcttactcgaatgaggcattcctttctcttatcccaggagagtctccg

SEQ ID NO: 425279 - DNA, 472 bp, Homo Sapiens
agttcgacggagactctcttccttctcagtgctaagggaacattataggttgtaacttgcccccttaaattgtgctcagccctaagaggtgttagaaaaatgctagaataaaaccacaaccattactggcagagcataccttactaccttctactagatgatatcctttctctctctctctttgtagttttaccacacaggcaaacacaggggaaaaaagtggaagggcaggatgatggagggaaatatttactgaagcagaacattagaagttagctgattagagttaaaactacagaaagtaagctaagaaatctaggaaaggaaataaattcatagagcccacagtgtaaaagcaaatgacttagttaaccaaccaagaaaactggaaggaacctgaacctctgaagtggcatagaaatgctttaggaagcaaggacaagctggtaatgaattgaacaacatgtggcag

SEQ ID NO: 425280 - DNA, 300 bp, Homo Sapiens
agttcgacggagactctcaccaagcatgcgacaaggggcccttcaagtcaggtataggtaaaaagagctgtacgtggggtttctctgagggcccactgctccaccctgtggtgagagtttcccaggactttaattactggactttgggaattagcacctgttgtgatcaagggtcagtggggtgagctggtgctggccttactgaggccacagtttgaatgcttctccttgtgactgtagctgagtctggtcatgtctccaggctctggctcccttctctgcagtcccttagagttagga

SEQ ID NO: 425281 - DNA, 587 bp, Homo Sapiens
  misc_feature (553)..(553): n is a, c, g, or t
  misc_feature (574)..(574): n is a, c, g, or t
agttcgacggagactctcgtagtcgtgatggatagatcttctgtcactgctctcccaaactcccagcagtttcatcgtaaagctggttcaatattttaaaaccaatttaaagccaatttttgagtttgctttaaagaattattgcattaatcaaaaaatacattaagttttaggtccaacagtctaactgataggaaaagctgatggggactcaagagaaatgggctctcctggctggagcatgtaatgtgcaagaacagaaaccaatcaacgctaaagggaagaacagcagaaacgagtcacaaatggctcaaagcaaagaaccctgcaactgaatggaattgaaagaaagtgtgaagagggctgatgagggtatttagttattattagcaaaattcagatgtgagaacacatctaaagccttcggttccaagggaggctgcaattgggctttcattgtgagatgtgtagagtgtcatcctttcaaagatttcaggtcaatgaaactgcagaggtcatcctcctggagaacatgctgcttgagagaaatgtnggggacagaaaataagccagntctatgaaaatta

SEQ ID NO: 425282 - DNA, 571 bp, Homo Sapiens
  misc_feature (18)..(18): n is a, c, g, or t
  misc_feature (460)..(460): n is a, c, g, or t
  misc_feature (469)..(469): n is a, c, g, or t
agttcgacggagactctnctggtagcgtcatttcttccggcagtcaaagccgctgcctttcaggtttctcgatccctgcttctaaaccactttagatcagaaaacctgattagttaaaatagggtgcaatataagaacctattaagttctatgagcaaaccaaaggagttttatacgtctttatattcatcttcctaaggtcatgtgcctccctgctcaaagctttctaatgctttccattcctaccaaaacaagtccagacatcccaggctggtaaagttttcaagtccttccatcttctgtcctcaaagcacatttgcattattcctcttagtgtgctccaggtatttggccatgctcaccagtgctggtcagcctcctcttggtgcttgaaacactggccaatcttcaaagctcagtttcttactgaagtctctccatggcctcagttacaaataanctctccaanccctgaattctcatatcattttgtcaggattctcctttttaagaaagtctatctacaggttctctcctcctcacctaaagatgagcagggctggaggagagt

SEQ ID NO: 425283 - DNA, 193 bp, Homo Sapiens
agtcgacggagactctcattataggtctacagactttaagaagaaaataagtgggtattatcaaccattttatgctaatgaattttccagttcagaggaaatagacaatttctaagatacaatttaacaaaactgatatgtaaagaatctgaaaattcctataatctactagaggaatcacattttgggtacc

SEQ ID NO: 425284 - DNA, 306 bp, Homo Sapiens
cacccaggcgcacttctgggacctggtgagggcctaccaagtgcaagctgatgtcctcagcctgcccccttcctggacccccccggcttcaggatgctaccgtgagaataagtcttagaacagcccgctctggccttctctagatgttccaacccagcctctgtttttgagaatcttgaatttggaaattgcgtcacttgtttctgtctgcaaagcactgtcaagtttctttccccttgtcgccctgctttgctgcactttttctgtctctgggtttggaatcttaaaacagcctgtggttctctt

SEQ ID NO: 425285 - DNA, 437 bp, Homo Sapiens
gcacccaggcgcacttctccatgaagagagggagagtcataggaaaatgttttgtgcttcgattgggtcggggcatcaagaacggcttttgagtaaggatgtgatttgggctgtgcttcaagatggtgacatggctgcaccttgtacgcagattggacaggcagccaaggacaaggcgtcagacgtgggctggtgggcaccaacgtgggggtagaatccaccttgcctgtgggtttcttagcctggactgggagaagtgagactagagacctgaagggtgagactagaggcctgaaaggggccaagagagctgcatcctcccagctgatcccccggctggagcctgagcagacgggaggagcaggaaggcagatgcacccaagactgcaagacatggaaaagggctcaggctccctctcccattgaagaaaaggtag

SEQ ID NO: 425286 - DNA, 218 bp, Homo Sapiens
cacccagtgcgcacttctggcgaggctgtttgctctgaggccatgacttgagatatatgaggattttaggtaaaatagacaagtagaggcaaaatccatgttatgggggcagggacaagaaagttacccccaaacttaaaagggccacagggagtgatcagttttaaaagaaagcccctcagctgcctctctcagcttctcccaccaaggcctagacc

SEQ ID NO: 425287 - DNA, 124 bp, Homo Sapiens
gcacccaggcgcacttctgcacccatggcgcacttctggacccaggcgcacttataaacgctgtcgcaatttgcctgcggtgcgcaattgtgcctggggtgcggatttctgcctcgatgtccga

SEQ ID NO: 425288 - DNA, 189 bp, Homo Sapiens
acggcatgcaagctgatgtctgtggtcgttctagcagtatcccccttctcggcaacctcagccaccctcataatagatggcacccaatgtggtggggctggaacagaccattacatccaatgcaatccacagtcattcagctttgcctcgccccatctgccaccaatcaaccagaagtgcgcctgggtg

SEQ ID NO: 425289 - DNA, 421 bp, Homo Sapiens
cacctagggcacttcttgtgattgtatgaactcctaaagataaagataactgtctcgtgttcttttagcacgaaacaatattcttgaagacagtattccagctcagagatattccaaacaatccaaacagaattaacccatcacttcacatcctaaaggatgtttatcagttaactttgaaaagattaaatggaaactctccactggggttttaattatgcatctgctgtcagctttacacataggaaagaacatattttaaaatctttctcaaatggcagcttgatataaacagaaatatttttgcttccttttattaggttttctggcagcgttttttagctataaagctaaaatcatgccgctgtagacgggatggtgtaggtataagagttgtcacttttggcactgcataatttag

SEQ ID NO: 425290 - DNA, 474 bp, Homo Sapiens
cgacctaggcgcacttctctagcgctgcctttgaaagagctgaaataatcccagcgagtggctgggtggagggtgtcataagatttggtctcccaggacagatattggacaactggcgaagagaccctgccttgagattcgagacgaggtgaaatacgagcatgagtgagggcagaccgtgaatcgagagagccttgcatgaggcaccggataagcagaggctgccgagaagatccaatagatctttcataaaagttctgtttacatggaagtctcttgctgctggcgctattgccattcagctgcaaaattccgtcatctatttggactattgatattgtacgattgtgctatgtgtggattccagcatagattattcattaatatacactatctgacaagctcaaagctaaacagaattgctgacttggagctcagaatgggggtggggctctccgtgtgactgtgagctca

SEQ ID NO: 425291 - DNA, 446 bp, Homo Sapiens
cacccaggcgcacttctggaggaatctaggtctcttagctgctagctctcccttccccatcattacaccagatggcgtctctttcagaagccagacgaggaagagccaaggaatctgtgacccaccaacatggctctagaagctaaacaagaagtttctccagcagaaggaaaggtccaaggaatgacaaacacgaataacaataacaactcctaaaatgtagacaatgtagatgtcacctgacggccaaggaggtgtacttatcctctatcatgagcctggaacataccacatgacgttaggctgcctccattcatttgtggaaggaaatacaaggttgctttgtcattagaggatgcacgcacctggggagagggaaattatgcagatatagcaaaaggtgcaaggaggctgtgttcctctatgctgcgctgcacttgtcaaag

SEQ ID NO: 425292 - DNA, 427 bp, Homo Sapiens
tagaggatccccgtaccctagcgcgcacttctggatttcgatgtggaatgaaggaaatgccttctgaggcacgagacctgctcagccccacgcacggccctgggggctcactgaccacgggacgggaagaggaagagtggccggggctcacagctccctgcacggctgaccgtgggaagctctgcataaaccgggcttcggtgtgccggggccgatcctcaggcacgtcaccgggtgtcccatggtcaaggggaccagcaaagtgttcggtcacggccttgtctctgtcctgcacctgcagccatggccccggggcatcagagctctcaagacgcggggcagcctggtgcaggctgagcccccagctgtttgcacagtttgtgaggctcaggcttgccagactaaaggaggttatctgcttttggta

SEQ ID NO: 425293 - DNA, 144 bp, Homo Sapiens
tactctagaggtatccccgcaccctaggcgcacttctgggaatagggaactggtgaagggctaagtatcagaggacgtgtaattcatgataatcactccgttggttacctggagggtgaatttgaggagaagtgcgcctgggtg

SEQ ID NO: 425294 - DNA, 377 bp, Homo Sapiens
actgcagtttttgatgagtgatttagtgtgtggccatggttgtaacatgggactgggggagcgagggggcctcgtgagaagagcccagcaacttctacgtggggaaatacgggatgatgcagatgcttcccagagcagccagtcagcgtgcatcgtcgcagaattcgagctctgttcaagaccttctagtcctagagaaagtatagttacatttctgcttcagatacacagagggttgggagcaggttttaaatatccttgtccctctacagagtgcacttgaattctgtgtgaaggtctgctatccaaatgtgtctgagcttcaaatgtgggttcagggagtgtatatacggggcaacttaactctatgctcccag

SEQ ID NO: 425295 - DNA, 549 bp, Homo Sapiens
gcgggtactactctgtccttttttccaaacgtgcaccctccaaaagggatggactgcctcacaccaataaatacacgtcaccttgtttcagaggggctggcctgacttaccttattctgaaagaaagcaatctgatgttcacactaattattatatgaatggccggcaactccttcaacccacacatttagaaagatgtgtgttaactaagtggaactcatgcatgggaagtccagcagagcaacaacaattaaaaaacaaagcagggcagaacagaagcgtatcaagagcacacaattgggagtagaggtcagccatatgggctatggtcgcaggccggaagatctggacatagagctttctctaattacacgcagtttggggcagtttattagtttcctctagctgaaagtcaaactcattcttcaaaagctctgagattatcagaatactcttatacagtaggtgtcctggaaagagtcaggccagctgtctataggtgtgggccagtcgtaaacgggggtccataccatatggacccaccattcc

SEQ ID NO: 425296 - DNA, 579 bp, Homo Sapiens
  misc_feature (49)..(255): n is a, c, g, or t
  misc_feature (341)..(366): n is a, c, g, or t
  misc_feature (427)..(534): n is a, c, g, or t
agttcgacggagactctcgtttactaggatagatgcacaattcacttannnnnnnnnnnnnnnnnnnnnnnnnnnnnnnnnnnnnnnnnnnnnnnnnnnnnnnnnnnnnnnnnnnnnnnnnnnnnnnnnnnnnnnnnnnnnnnnnnnnnnnnnnnnnnnnnnnnnnnnnnnnnnnnnnnnnnnnnnnnnnnnnnnnnnnnnnnnnnnnnnnnnnnnnnnnnnnnnnnnnnnnnnnnnnnnnnnnnnnnnnnnnnnacatttaacctgtcatgaccaactccttaatttctcttagtagctagtctaaatcctgtcctagcctaattccctgatacacatcnnnnnnnnnnnnnnnnnnnnnnnnnnccatttttttgtgtgtgagatgaaagaagcaagctcatcataaacctcaacatgaattatnnnnnnnnnnnnnnnnnnnnnnnnnnnnnnnnnnnnnnnnnnnnnnnnnnnnnnnnnnnnnnnnnnnnnnnnnnnnnnnnnnnnnnnnnnnnnnnnnnnnnnnnnnnngagtgagccacactgtgcagccctcaattaaaaacttgttgctat

SEQ ID NO: 425297 - DNA, 107 bp, Homo Sapiens
ctctatctgtatgcagaagagagtggagtgattgctgtaatctcaaggatagtaatatgagctaaagattttatatcatatagtaaatacatgctaaagattttata

SEQ ID NO: 425298 - DNA, 193 bp, Homo Sapiens
  misc_feature (96)..(96): n is a, c, g, or t
aaagcgtggtgggccacgttgagaagtgcagtaaagccaggagattcttcctctcccctagcaggtgagcgcaaggagatccacggtaacccaggnccacctccactgactctcaaatctgtactgtcaggactcccttccaggactgggccctgcagtgagggaaaaagctacagatttgagagtctccgtc

SEQ ID NO: 425299 - DNA, 443 bp, Homo Sapiens
cgaggagattcacagcatttgtagatctcagtgtgtatgcggtttatttaagcgagctttagaaagataacttagaaattatcagtgaaaaaccaaatcctaaaacaggtgagtggcatgtgagctttttatgttttgaacatttaatttttttccccttaatgttcttaatgtctataataatggttttagctttgtacttacagtgttacatcatactcatattttctcactggggtttaagtcatctcttctgagtcaagcaagattttcagttcctgttgggtgcaacacatgctttataattgttattatttgtatttaaattctttgatacctgtaatggtagaaatgtgaggtaacatttctaaatctgttttggaggtcatttcgtctgaacagctaagagtaggagatgattatgaagcttcccaggatgagag

SEQ ID NO: 425300 - DNA, 417 bp, Homo Sapiens
  misc_feature (24)..(24): n is a, c, g, or t
agttcgacggagactctcccaagnaccacgtggtcttgggggaggaagaggaaaaagtaaaaaagacacgtgccagatggacgggaggcaacataattacgggaaccaagcaggataaaattctagaaagatgatttgacctttcgaagaggtcagaattgttgaggatttcaacagaaggtcgctgatgatcttccagagtgtggtttcagagaatggaaggtacagaggcagaatctaagggggtaaagaatgcatagatggtgaagaggaaaaaaacagaatgtgtctcttgggatgttcccagtgaatggggagggcagagtgacctgagggagcagcgtgttgagggaaggtttttctgaggttggaatgaccctgaaggacggagccagtagagagtctccgtcgaactgg

SEQ ID NO: 425301 - DNA, 423 bp, Homo Sapiens
agttcgacggagactctccacagtgttatttcagtgataagctgtggagagttgatagttgactctagctaaaatctgccagacactatgttgttgacattagctaaatgattataccaatgatgtgttcagggcttgaggcaaaacaaaatgtcatcttattattttccttgaatttctagagcttagtttttaaagtttagattttgaacaagttgtcatttaaaaatgttttccctgtttttacagtagtcttcagtatgtggacaagtaaatgaaccaaggaaacaaaagtggtcaaacgtgtctcaatatttcttgagctctaatatccaatttaaagcaatagttttaatctgaacacctgaaaataaaaatgagacataatgatatatctgtatcttttcggagagtctccgtcga

SEQ ID NO: 425302 - DNA, 309 bp, Homo Sapiens
agatcgacggagtatctcatagatctgatctatgaagctttcagattcaaatcaaaccttgatagtcatagaattcatactagagagaaaccttagcagtgtaatgaacgtggcaaggttttaaatcacaaagcaaagcttgcacatcatcgtagaattcatactggagataaacgttacaaatgtgaagcatgtgaccaaagtttacagtctgcaacaatcaagcctcgcacaagacaggcagaattccatcactggagcagcaaagcttacatatgtgcaagcaatgtcacccacagttttccagtc

SEQ ID NO: 425303 - DNA, 585 bp, Homo Sapiens
  misc_feature (282)..(413): n is a, c, g, or t
agttcgacggagactcctcaaccagagtcgtctggccaagcacaacgaacacagagaagatatgccacaggaatctgtttgggacagaagtagaacctggaagcacatctcgtgtgccagggttccagcagtcacgcgaggatggaacacaacatgagctacctagtcaatagcttaaagtactctggttgaatctggtgtgcatcaggtttggaaatcacagacctaaaacctaggtcttagaagatctaagactgttcttcaactcttccagcagagatnnnnnnnnnnnnnnnnnnnnnnnnnnnnnnnnnnnnnnnnnnnnnnnnnnnnnnnnnnnnnnnnnnnnnnnnnnnnnnnnnnnnnnnnnnnnnnnnnnnnnnnnnnnnnnnnnnnnnnnnnnnnnnnnnnnnatctattcagatgcagctagactgtggtacgccctgggttatgggcagtgatgtggtaataggtatctgcacgtgtgagccttccctaccacagctgaccatcagttcccagactatgtcacctctctaccactctcaaccagagtcgtctggccaagcacaacgaacacag

SEQ ID NO: 425304 - DNA, 168 bp, Homo Sapiens
  misc_feature (37)..(37): n is a, c, g, or t
  misc_feature (71)..(72): n is a, c, g, or t
  misc_feature (84)..(85): n is a, c, g, or t
  misc_feature (144)..(144): n is a, c, g, or t
tgcaaacgtgcatccaccagacaggacaaatgctcangaaacaaagaggacaatgcactgggatcctgagnngggatactgtgnngagcagcccagtccacaccatgagccccacgccggctgccccgggcagtaccctcctcnctaggcaggagccggggactgtca

SEQ ID NO: 425305 - DNA, 399 bp, Homo Sapiens
  misc_feature (178)..(249): n is a, c, g, or t
  misc_feature (331)..(331): n is a, c, g, or t
agttcgacggagactctctaagttacggatccgtggctggggtctgcctttactttggaaaatgggagccattataactttcacaatttttctgctctgttctccctttcttctccttgtggtgtttcaattgtgcatatgccttttgaaaatatcccacagttcttgtataatctgnnnnnnnnnnnnnnnnnnnnnnnnnnnnnnnnnnnnnnnnnnnnnnnnnnnnnnnnnnnnnnnnnnnnnnnngcttataccattataactgaagtgtatttttttagacgacctacagatagttcatgtttttaaatacattctgccaattttngtcttttaattgatgtattaagccatttaatttaatgtattattgaaatgttggggatcgggtatagc

SEQ ID NO: 425306 - DNA, 485 bp, Homo Sapiens
  misc_feature (300)..(312): n is a, c, g, or t
agttcgacggaggactctctatagttaggtagaatgaaataattcagccttgggacgacgggacaaaaaccagatgaaagcaatggggatttcgagatggcaaagggtacagagaagtcacaagagcaagggagaaaagctgtgcactttttttgtttcctgaagtagagtagtgcaactggtctgatgaataatcaggacttacaaagtgtagttataaagcaactgtatttcccactgttcctttaaacttggtaggtatggttgttctggcaggttgactgaaaattcaaactttcnnnnnnnnnnnnncccaggttatgtttggaagatacggtctcacgtgtgtaatgagaatgaccatttccagtgttaaggggcaaagattccaacctggtcaaatttacaactactcttaagtcctctagctggggaaggaaatagggatagcggcttggtattcttctcctattccttcttcagtc

SEQ ID NO: 425307 - DNA, 370 bp, Homo Sapiens
  misc_feature (303)..(303): n is a, c, g, or t
  misc_feature (318)..(318): n is a, c, g, or t
aaaaagggtaaccatcaggggcaacgaaaagaaagggttcgtatttccaagttcattattccttattcgtgaagaatagatagggcgagaaattttagagcagaagatagggggtgaagagtgggtgacattatgagagggtggactagtggccacaagtctggtgtctcccagttaatggaattttttaatgtggtgttggtgttaaaggatacattattaaggcttggtagacctataggggacatacaggagagtctccggtgcgaactagttcggacgggagactcttcaataaattanggtatgggagggggngttggtcataaatggctctgatcatttggagataggtcccatcaatacctaa

SEQ ID NO: 425308 - DNA, 171 bp, Homo Sapiens
cctttccatgtaaccggagctgagagagtgaaagtcgaatatcctattagcacagcaagcacagagggtgtccggggctgggctgtcctaaaagcatctgcagatcaatctgaaagctgttctactctctggtcatttcttgaccagagagtctccgtcgaactgggtacc

SEQ ID NO: 425309 - DNA, 465 bp, Homo Sapiens
agttcgacggagactctccttccactgcacagcttgaaagggcccatggtttcagatggtccctaacccttctccagctgctctctgcaggcctgaaggcctctttcagacccgatggccatgaagcagtcatgagcatccccacacatactaggctggagggtgcacctggaaccttctatgtcttggtgtttgtccttcaagtgtgcaaagttttgcaactaagatctaaaccagcttctctgcttaacaaacgcctgactctaggttgtgtggaactggtactcaactgtcatctcagagcatctggagttactttttaaagcccagttcccattattttaaacatgcttcatcgggattctttgacacctttagggcattctcctgtaaacttgcatgttatctgctattcttcctaagtactcctgaacaagcagctctgatatggaaagccaagaaaaa

SEQ ID NO: 425310 - DNA, 560 bp, Homo Sapiens
  misc_feature (96)..(119): n is a, c, g, or t
agttcgacggagactctctaaagcacactttcatacttgttgctttagagaggattaaaaataaggtttataatgtatgggccagctgtggggggnnnnnnnnnnnnnnnnnnnnnnnncactttctgtcatggcccattcattaattcctcaacattttttttaatgacttattatgtgccaggcacatgccagtttctgagcttccaaccatgaatacggggggtgtaaggtgtgcctgcatggggtttactagtaaatgcagactggcagaaaggcacttctccatacggtgggggaaagctttgatgggaagtatgtggttctgtgactgcacatagcgggatcgcccaacctaaatttggttggggtaggggtactattgtgaagatttttcagtgcaaaggaaacttaagctaaaagagacagacctacagatgattagaggtaagccaaaggagggtaaggagtggtggagaaagaacatagtgcaggaggaaggtacggcacagttgaagaactgaggaaagactgattggatttgaaagttccgtcgaaat

SEQ ID NO: 425311 - DNA, 191 bp, Homo Sapiens
  misc_feature (113)..(113): n is a, c, g, or t
  misc_feature (149)..(149): n is a, c, g, or t
agaggatcccagttcgacggagatctcttggataatatgtaaatatcaactgaactatactctttatctttatatttttctgtgattacttaaaacctgacaccagaactctnggttatttgctttattatattagcctaatctacttnggaaacaatcttgctcaaggaaagagatatattccgtatgaa

SEQ ID NO: 425312 - DNA, 224 bp, Homo Sapiens
taaaaaataaggtatcttaaaagattctagcgccgtgcaaaggagaaaaaaatacttcatggctaagaacggatctgcagctgtggtcatatagggggtgcttgggggaatgggtcgggtaagaaattttcttctacaagctaaaatgaggtgtggggtccacttctctgtcatctttttcccctccacatccttccctagttgggcccccggggattagagga

SEQ ID NO: 425313 - DNA, 483 bp, Homo Sapiens
agttcgacggagactctctaacactgagctgaaaaggggtcagtggttagagagtagggtgtctgagttcatagaagatttcagttatggtagtaagtaagttcaaagttaccaccaaaattgcagctgaggcaaagtagaagacaaaattttcaaaggagagatccagtgaactccaaggccgtgcagctggaaggatcatctttgtatctgtcaccaagaagtataactgtggtgatggtagagagtgagacaggaactaagatctgaaaggaacaaagggaaattgaggggactgtatactagaagactgcaacaagtacccaggtaactgatgacatgtttttaatggaagaagcagaggagaatggatgagcagcatcccatgaggacaagcatccaatgaggacattgaggacaaggaaatctactctgcctccaggcacagtggtatactaggtgtgggagagtctccgtcgaact

SEQ ID NO: 425314 - DNA, 581 bp, Homo Sapiens
agttcgacggagactctccagtatccattcaatggtttattgtatcactataggctcatgcatgttgatttaaaacggttacaatggtataacagtttttcttatagaaaagcatacattcctaacgatctttcataagcaaaatggtgtaacaaaattgtttataacagtatataaagccattttataaaaacagaaacaactcagagagatgccagtgactctagcctggcagtctctgtatcgtacagaagaatgatagttgcccctaaggatgcccttcccaatgatgaagtgtaaacagagaaaaactgctaactttaatcatctgtaatctattatttcttctaagccctatgtgaccttgcttataattttcttgtagttcagtcatacagattttctatgtgttatttagtttatatatgtatatgatttatagatagatatgagcctagcctaaatctgtattctgagaagtatttgttctaaatacttgcaaagtatttgtgatgaggatgacaacacccccggcccctggtccagttgtcttgtgggctgtttaaatccatcctccttat

SEQ ID NO: 425315 - DNA, 480 bp, Homo Sapiens
  misc_feature (370)..(370): n is a, c, g, or t
agttcgacggagactctctctggtcttttaggccagtgggaagaaacctggaaggtgttgacttgtccctgaagaatgcatgagattttgatgtcccattcttgagaatagagagcaggtggccttaaagacctagagagagtttatggcttggagaacagcttgattaaaaacacaaatgaaagaaagttctgggtgtgttaggcaaatctcccatttgatcagagtagggcatatgtgtacaggcttaatgtgaaactgattgttatatataccttcatctgacccagttactgtattctccacctatttcttaaggaagattagagagtataaacctttctgtagattagagtaaaatggggtttgngacatatttgtaaaactggtactaagaagatttattcttgtatcctttaatctttgctgtcatggagcatatcaaatgcttttctaagggctaaaactcagaagactagt

SEQ ID NO: 425316 - DNA, 113 bp, Homo Sapiens
ctttaccgtaccaataatcgagaattatctatctctgattttatgactagaccctcttcaaccccacatccacaattactccacgtggggttgaagagagtctccgtcgaact

SEQ ID NO: 425317 - DNA, 614 bp, Homo Sapiens
agttcgacggagactctcttcggtctctgaggccacctcttcttagaggcattgaagtttctaaactacttcccccaaaatggttttcttccttacttcaggcagattttattagaattaagtttttaggcggcagtaaggtagaaccattttcccaatattaatatcactttttttgagtgaggctaaatcaaatagagctaagaaaaccttgtccaattttcatttgtaagcccctgcatatgaacagtttctgcagttagtctcctttgggtaatgccagtgacaattcaataaagcagtcaaaagacttcctttgataattagaaagaatggacccaccagatttgcaaagaaactgcctggtgtctccattactacagacaaactaacacatttccagacttgacaagggcatgcaaaaccctttttattccatcttgtctttggtttgcgtttggtcaacaagagctccaaagcacttcccttcatgccccttttttcttccctctcttttctgaacttctccccaggcccccagaccaatgagaacatcaaacaagatgaatgaaaacggagagaccaaagtttcagcggatccttactcggacatt

SEQ ID NO: 425318 - DNA, 262 bp, Homo Sapiens
  misc_feature (19)..(19): n is a, c, g, or t
agttcgacggagactctcncaggtcagtctaatacctcatatattctcactttttactactttatccactctttactgcttagacccttcaaatcaatatatccaagtgcctaccagatatacagacttagatacttcaaaggcatcaaactcattctattcaagatcaatttttctcttgtgccagcattttctctctctttactagacacctctgtggaaataaacagaggtgtctagtaaagagagtctccgtcgaact

SEQ ID NO: 425319 - DNA, 556 bp, Homo Sapiens
tcgatctagaggatcccagacatgtcgggtgttttgtgtttctgtcttagaaaagaatgtgttcaatatgtctttgctatttgcaagatatgcagtctacttaagaatctcaggaatgcatcgatcagccttacatccttgaggtctgtgtaggcagcaagtaccttatactacggtaagtcacatagcatctgtctttctctccctgcggtggagcttatgattgcacaaagctcttaagcagctgcttctcagatgctcagaagacagtggatcttgggtctgcactccaaaagcaagagacaaaaaaggcccagaaaaataaccaatgcctacaggttagtcttttgttaggttcatgatcagtcaatttacctgtttattgcataagagtaagctcgtcagaggttcaaattttagctttatgagaccaattagctccattttctttcatagccaagaaagaatcccaaagaatccagactcaagggtcccaagatcacagcagtggggatgtcacccatcaacctggctgtccttgagtcccactcatctc

SEQ ID NO: 425320 - DNA, 262 bp, Homo Sapiens
atgttcacaggaattcacgtaacagtataagggatgatctaaaattatctctaactcggtaatactagattttatctcaatgttcttcactaccaaagcaaagcatgttattaaatctagaagagctcagttctaataacttttagaatgaggacgcagcttaaatacatccgattaccctaacatgtcacacaccatgggactcttcccatagagggcttcccctccatggggagagtctccgtcgaactgggtaccgagc

SEQ ID NO: 425321 - DNA, 531 bp, Homo Sapiens
  misc_feature (377)..(377): n is a, c, g, or t
agttcgacggagactctcttgcttctctctcacatggcaaattaaacaggagagagcaagagagatggaagccacaatcccttggactcagatcacagaatgtctgagagtttctgttaccctgtttcaaatcaaccacaaaatatttatttctgaactcatgaaaggtaagtgcattgtacttctaaaaacaattttttttccatgaaagaggatagacccaagctgtgtatggctgagttgactctactgaatgtcgatgctatctagttacaaaaggaacaagaagatttaagccttacactttgattgacacaccaatctttttagacttccctgggaaaaagtgaggttgaccttaaatgagagcgaattgnttcctatctatgttgtgtgtgtttcagagcaaaacctggcattgtccaacttgaagcttcactgggaatgttttggaagtgtttggtgtaagagtgcaggactgactctgagactcttgccgctacagtgcacttgtttttctgaagttgattc

SEQ ID NO: 425322 - DNA, 113 bp, Homo Sapiens
ttcgaaggtcgcgtcttttactagtgcatgcactcaattgtttctcacgttgagatgtgtatgtagttctaaatttgtttttaactgtcatgtattctctctttttctctttt

SEQ ID NO: 425323 - DNA, 488 bp, Homo Sapiens
  misc_feature (134)..(253): n is a, c, g, or t
  misc_feature (455)..(455): n is a, c, g, or t
gttcgacggagactctcaagtgccaggcaggctaggcactgagagacagaatacagcaagacaaacatagttgcttcctttatggaacttatagtccagcaaatatgagactccctggatttgagtcacaatgnnnnnnnnnnnnnnnnnnnnnnnnnnnnnnnnnnnnnnnnnnnnnnnnnnnnnnnnnnnnnnnnnnnnnnnnnnnnnnnnnnnnnnnnnnnnnnnnnnnnnnnnnnnnnnnnnnnnnnnntgctgatatgtgaatgcatgtgaaactcataaatcataagattggcacttacagcttgtttcactgggttgtagattaggtgtgcatgtatggtttcactaaaagcttgtacttgaggcctaacaaaattagcaatttaattatgagtgtttaataaacgctataattactggacacgactctaagtagcagaagatatggncggggcgagcagatagatgttagagagtctccg

SEQ ID NO: 425324 - DNA, 477 bp, Homo Sapiens
agtcgacggatatctcatcttctcccggatggcaaatacgctaaccggctcagggtgtgcttcacttctggcatcctgcttccagcatcacttgccatgatcattactatcaagccatgctaggcatcatgacctctatgcagatagaaattactggattatctagagaatactttcccctcttgcttttcttgactgccctggcagttttcatgaaaatatagttcacctcatgagtatggctccctcccactttccaccccaacttcctttggattcccttcccagaacttcagcattgtctcttatggtgggcaagtttctccacagttagcaagtattcagtagcaaccaaggttctacaagacttctggggacctaagaaacactctcaaactacccactatcttctcaccgaaagtaattctttgcctctacttcctatccccaggcctctagtgggtagtttgagagtct

SEQ ID NO: 425325 - DNA, 100 bp, Homo Sapiens
aggtgaggtgatctagaggatcccagtcgacggagactctcaacaattaaacgtggttggtttaattgtgagaggtcacgttttttccattcttgctctc

SEQ ID NO: 425326 - DNA, 370 bp, Homo Sapiens
  misc_feature (25)..(25): n is a, c, g, or t
agttcgacggagactctccaccctncacaaagctcagtgtctactgttcccttctttgtgtccatgtgtactcaatgtttaggtcccacctctaagtgagaacatgcagtatttggtttcctgttcctgcattagttcacttaagataatggcccccagctccttccatgttgctgcaaagaacatgatcttgttcttttttatggatgcacagtattccacgatgtatatgtgccaccttttctttatctggtgtattgatgatgggcatttaggttgattccgtgtctttgctattgtgagtagtgctgcaatgaacatatgagtgcgtgtgtctttatggtagaacaatttattttcctttgggtat

SEQ ID NO: 425327 - DNA, 157 bp, Homo Sapiens
  misc_feature (53)..(53): n is a, c, g, or t
aagggtgatgctgaggtgatctagaggatcccagttcgacggagactctctanagataatcattaaagtgacaacgacaatattaaaaaaatacagtatgctactacttctgtgtaagagaggaagtaataatacataaagctacggcttttttcgg

SEQ ID NO: 425328 - DNA, 394 bp, Homo Sapiens
  misc_feature (28)..(28): n is a, c, g, or t
agttcgaggagactctcacgtgcagagntagagttatgaagaggtgcaaagtaccatatgggtcattaaaagtgatggcacggaggggaggcacctcttcttctactctctttgcatctacccctaggaataaatgggttccaagacccatttattcttcatattggggcacatgctatataaggataattgatccagtacatactctgtatcttggagtatggcatcctatccttgtagaatttgcctatgagctggtgttcagctgtaccttcagcaggttgttccaatgttctatcaagctgacaaattccaagtggtgaaaaaagtgatattattagtggatcctgtggatatgggtccactcctgcgcttggttttccataaaataggt

SEQ ID NO: 425329 - DNA, 157 bp, Homo Sapiens
tgatataatgtgagatcgcatgctggtcaatacaatactaagtaaactcaaatggtgatactgactgaggctctgcaaagaggaaaagcaaactcctatctggaaattgtgtctatttctatgacaaggaaatgctggtccttccagtgtggaaggg

SEQ ID NO: 425330 - DNA, 364 bp, Homo Sapiens
agttcgacggagactctcgggcaccggtgtggtcatctggggcctgacagcatcactgcacagtcttctacagtagctgaggccagctaataacaggctttggttatcagaaaccaaaacccaacaaaccaaaatccgaatcaagacgcttacccagtgggtttctgctcaggaaattaaactgtggaagcatatacaaccaatatttgaattcaaacaggtttttgagtttcaagttggtgctttaaaggtgaacccctggctgcctggaaacttgaacctgtcagacccgctcagaacctgaggtcgggcaggctcagcctcacccacttctggatcttcagctctcactcccacatcttgt

SEQ ID NO: 425331 - DNA, 540 bp, Homo Sapiens
  misc_feature (249)..(249): n is a, c, g, or t
agttcgacggagactctcacttccatgtgatttgccatgggctaatatatggaatgtgagagaaaaagaagaaacaacaatgcttccaagattttggggcagaggtactgaaaaaatgaatttccatttatcagaaagagaaagactgtggtaaagcaagttgggaaggaaacagcagctcagttttccacattcagtaaccctcccttatctagggtttcactttctgcagtttcacttatccatggncagccacagtctgaaaaatattaaatggaatattccagaattaaacaactcgtaagttttaaattgagcactcttctgagtagcgtgatgaaatctcatgatgtcctgctgtcttctgccctggatgtgaatcatccctttgtccagcatatccatgctgcatgtggtacctggctgttacttgcctaagcaagtggatggctacttgcttagggtccatctcagttatcagattgaaaaagcagcacatatacatagggtttagtactatctgcagggtcaggcatcact

SEQ ID NO: 425332 - DNA, 210 bp, Homo Sapiens
  misc_feature (164)..(164): n is a, c, g, or t
  misc_feature (172)..(172): n is a, c, g, or t
ctataatgtgctagtgttagtagatattttctaagatatcactggaatttctgaaatgagaggccttgcagtgcctagtaaaatgacatgttggcattgcaagttgctttcacttcgtggctctacggtgatacggcattcatttggagtaaagacttatgctnttgctatntaaaggctttgtatactttttttggagagtctccgtcg

SEQ ID NO: 425333 - DNA, 309 bp, Homo Sapiens
gactgcatccaacgccgcctccatggtaggttgaagactagttaaaataattctaacgcgtattgaaaaaagaaagtgtaaagatccagtattaaaatgaatgtttgagaatacagtggggacaactaggtaattcactgtcttacgcttatcagaagactggccctttgaaacgcagcctgttattgttggtcagatcatgtggcacttaagtagccccttggtcatatttttaaaagcaaatatagacagtgacagtcgctacaggggaaaatcagagatacattcatatgcacctctttggtgctt

SEQ ID NO: 425334 - DNA, 303 bp, Homo Sapiens
caagctgccagaggtatgacgacacagctgtgtcccagaaaccttgctgttccttgagcctgtgtctcctctttgtccccaagaacacgtgacacagatggcttctcgatcctgctactgtccctccaattactgggctaccaggttctcaggctggagcccgggcattttcaaacacaaggatggttgcactagctcttctgcatggacgtccattcaagtcaactaaaaacggtgaatatcagcccagatgtcagcacatcagactcctggacaagcacaccatctatggtggacaagcac

SEQ ID NO: 425335 - DNA, 167 bp, Homo Sapiens
  misc_feature (99)..(99): n is a, c, g, or t
tcgtatacgacttcgtcttgatatgaatctgtctgcttggcggtcagaattcactctagcgcgcatacgatgcccggcgcctcttatcatggctcagtnctgaaaacaacaaatagaacgcggtctattcattattctagctgggtatcaggcgggttggatgagtc

SEQ ID NO: 425336 - DNA, 207 bp, Homo Sapiens
  misc_feature (66)..(66): n is a, c, g, or t
  misc_feature (114)..(114): n is a, c, g, or t
  misc_feature (125)..(125): n is a, c, g, or t
  misc_feature (149)..(149): n is a, c, g, or t
  misc_feature (164)..(164): n is a, c, g, or t
acacgccgctagaggtgcaacattcttggcaccggcgccaagcacggcacccagcagcgcaacagnatttgcccaagcaatgttttccattcaatccaagcaacgcaacagtcngcgcaggttcngcaagcacgcatccagcatcaccngctcgttcagttccngcacccatcaacacgcatcgccgcaccggcgcgcatcgcggcg

SEQ ID NO: 425337 - DNA, 505 bp, Homo Sapiens
actgcatcaacgccgctggctagatggtagtctatttgaaagataaatcctgtgccataacagtgactgaccaatcgtgctctagggacatgggagagatcgccaggaaacatgagtaatataatcaagtcactcagtacaggggacctacagacagcatagacgtatgtctcagaagagtacgaatgatctatacgagcgatgtcgacaagaatcgtgccttcgatatgggaggatctgcccgttgtcaagtcgaagatggaagcatcccggtttccgaagaagttctcagccttacaggcgtcggaaggatatttccgaaaaaaataccttgcctcttgctcaactaccactggttaaatcacagcacacttcaaatcccagtactgataactcagagcaggttttgggatgacaggacaaagaatttgaactaatgcaaaaataagtagcaaatattaggaagagcatttgtataaagtctttatgtacaaatgaaaacata

SEQ ID NO: 425338 - DNA, 154 bp, Homo Sapiens
gactgcatcaacgccgctgacttgcacacgccgctccggattcttaggatctgaacccgactccggagtggcgggttggatgcagtcgactgcatccaacgccgccgcgaggacgtaggagtgccgctgcgtccgcggcggcgttggatgcagt

SEQ ID NO: 425339 - DNA, 453 bp, Homo Sapiens
  misc_feature (133)..(186): n is a, c, g, or t
actagtccacggttggctagagccactgctcagccaattgtccccatttaaggaccactaccctggaaaccagcagtaaccagaccctggtgggtgctgagaaaatgttgaattattcagatagttgattcannnnnnnnnnnnnnnnnnnnnnnnnnnnnnnnnnnnnnnnnnnnnnnnnnnnnntttttaaaaaaagtattggtttactattagttattattagtggcattattatgaggtggtttccatttgttttcctcagtggccaccagtgcaactgattttgtcatatactgtactcattgatgccaaatatatatatcttatttaatgctgacttcaaacctgggaagttgatttgtttatctcttcttaactttttggaaatgcagacacaaaaagattcagcaaatggcttaaaatcgaggtaactagccaaccgtggactag

SEQ ID NO: 425340 - DNA, 166 bp, Homo Sapiens
cgtatgtctcccaggtccagcatcagacatatgtaggtgctctgtactctgacatgtgactttattaaggggcatgtcaacctcttagatcactttcctcaatccttagaatgaataacttgtacacgtagccaacctgtggactagtagccggaccgtggactgg

SEQ ID NO: 425341 - DNA, 467 bp, Homo Sapiens
  misc_feature (125)..(217): n is a, c, g, or t
ctagaggatcccactagcccacggttggctcaaatgttaataaaatcacacttttataggaaaaaagacatgaacaaaatcttcaggatatatataggcatgatccataatagaaaaaaagaatnnnnnnnnnnnnnnnnnnnnnnnnnnnnnnnnnnnnnnnnnnnnnnnnnnnnnnnnnnnnnnnnnnnnnnnnnnnnnnnnnnnnnnnnnnnnnaaagctgctaatttgacatgtcatactctccgtagtgcttatgttaaccacaacttgagtgaattcaattgaacagaaccacagtgtctgggaaaaaatcaatctcagaagaaccctttctccccacttggctggcttcatggcacttggacagagaagtggaaattcagagattttgcaggataacaatactgacagctgaaccccaaacaatagcagcctccgcgagactagccaaccgtggactagt

SEQ ID NO: 425342 - DNA, 262 bp, Homo Sapiens
actagtcacggttggctgaagtacgctgatggaaaggctgggaaaacttcaagggacaagtgacattgaattggaccttggagaatatgcagaatttattgtagatacgtagagtccagagaaaaggggactccagatgagggaggtttgtggccagaagtacagcatgagacatgaatgagaataaacaaagattacaggaatgtcttggctctgtgtgacctccatcatgggacatgaagccaaccgtggactagtgggt

SEQ ID NO: 425343 - DNA, 351 bp, Homo Sapiens
  misc_feature (19)..(19): n is a, c, g, or t
  misc_feature (249)..(249): n is a, c, g, or t
actggtcacggttggctangttgtttctctttcttgttaaacaaaattatttctgctcaaccaggtgtgattatatgacaagtcacagaacctaagccttaaaatgtatataataaatgaatatgctaggaaacattgcagaagagagatgcaatattcacttcaccaagcagttggcttccaggaaaataaataccatgtgactaaataaataatgagcaataccaatgtgatccaattccttgcatnttgagtcccctatcttctaagaagtaggggaacagaacttgactaataagggtttatagattattggctacctggcttttaaatgtcaggtagccaaccgtg

SEQ ID NO: 425344 - DNA, 136 bp, Homo Sapiens
acaccatggtcaggacggtggaactggtggctgaacaagatggggaggaagctacctggggtcctgggcccttaacactatttccatctgaggcgtctcagatcccagcatctagtaacaaatagaggcacagcag

SEQ ID NO: 425345 - DNA, 115 bp, Homo Sapiens
atgctgaggtgatctagagatcccactagtccacggttggctactagtccagttggctactagtccacggttggctgggctggcccaggaaagacccttgcaccattctggggtc

SEQ ID NO: 425346 - DNA, 439 bp, Homo Sapiens
  misc_feature (337)..(345): n is a, c, g, or t
actagtccacggttggctatgttgacagccttgcatcccaggatgaagcccacttgattgtggtggataagctttttgatgtgctgctggatttgacttgccagtattctattgaggattttcgcatcaatattcgttagagatattagcatgaagttttctttttttatgttatgcctctgccaggttttgataccaagatgattctggcctcataaaatgagttagggaggagtctttcctgctcaattgtttggaatagtttcagaaggaatggtaccagctcctctttgtatctctggtagaatttggctgtgaaaccatccggtcctgggcnnnnnnnnnggttggtaggctattaattactgtttcaatttcagacttgttattagtctattcaggtattcaacttcttcctggtttagtcttggcagccaac

SEQ ID NO: 425347 - DNA, 565 bp, Homo Sapiens
  misc_feature (465)..(465): n is a, c, g, or t
  misc_feature (470)..(470): n is a, c, g, or t
actagtccacggttggctagttacatcagatataatgggggtataggcattgcataaatatacccattccacatgggagaaattggccaaaacaaagaggttacagggcctatgcaagtccaaaatccagcggggcagccaaatcttaacactctgaaatgatcttctttgactccatgtctcacatcctgatgcaagaactgggcgcccatagccttgggcagctccacccctttggctttgcagggtacagcccctctcctggctgctttcatgggctggcattgagtgtcttttctaggtgtacagcacaagctgttagtgtatctaccattctggggtctggagaacagtgcccctcttctcacagctccactaggcagcaccccattggggactcagtgtgcaggctccaactccacattccccttctgcactggcatagcagaggttctccatgaaggncctgnccctacagcaaacttcttcttggacattcaggcatttccatacatcccatgaaattgagacagaagtttccaaacctcggggcttgagttctgtg

SEQ ID NO: 425348 - DNA, 274 bp, Homo Sapiens
actagtcacggttggctgaggcattcgagcccaggcttgaatgccgtgagagaacagtttatatgaatatggggaaatgaactgcccaggcagttcatgctgaggaagtgctgtggccctggactgtaatgaacccagtacatcattttatatttaacacatgagaaactggacactaaaaggttacacagcaagtgagcagagagcttggaatgcacacagtatgatttcagagcttaagcctttgaaggttatgctcttctgcttttctttc

SEQ ID NO: 425349 - DNA, 379 bp, Homo Sapiens
  misc_feature (66)..(66): n is a, c, g, or t
  misc_feature (80)..(80): n is a, c, g, or t
  misc_feature (187)..(210): n is a, c, g, or t
actagtccacggttggctagttatatagagtgagatatgaccagctgccaaatctagaaagtagtntgttggtatagttntgttttgaaggttttactgaacagtccctccaaaatatttttttaaaacatacagcactattaagggtaatttatttactttctgacactactttttaaaataacannnnnnnnnnnnnnnnnnnnnnnnccataaaagcggggaagtgtggcaactgagaagctaagtaccaggtttattttagaggcagtaaacacagcctagggccctacttataattatgacgggaaaaagactcatttgggcttcatagggtttggagtcacaaaaacacatctgaagccaacgggggactagg

SEQ ID NO: 425350 - DNA, 186 bp, Homo Sapiens
actagtccacggttggctcatcaaggataatctcaaccatttttccccagtatcctagaaagtcatatcaatggtttgttgagacattttacatccaagtcaaattctggttgaatactcaaatcaagatggcctaaaaagggagataatgacaagcaagaatgaagagaaataaatgaatccagc

SEQ ID NO: 425351 - DNA, 386 bp, Homo Sapiens
actagtccacggttggctttctaaaactgttgctacaagcctagacttaaaaaatcatgaaacccttcccaaagttgctgatttttacaaaatcagacctcttgcctgctaacatttccagaccctgtctgattctcatcacatctcttctcttctactggatctatgaaaccccattgagtcctaatcgtactataacctacctcccagtacgacacttaacattctctttatctctgagtgtgctcatttgccaaaggcaggaaagtctataaattccaccctgcaagagcccctagtaaagacttctctatgcaggtctgattcatagaaagattcattttggttgcttaggaaatcaaagctccactaacaattatggtatc

SEQ ID NO: 425352 - DNA, 349 bp, Homo Sapiens
tccacggttggctactagtccacgtgttggtatagtccacgggtggctactagtccactcgcagtcgtacaaggaggcttctctgtgctggtgagaattacccaggcaaccgtgtcgacttagccaatgtccaagaactggtttcctgggtgtgccactgtgatgacgacatggttcagagactagagagagacttcaagatgagtcttcagctgaagagcagcctggagcagctgggttgcgtgagttgataatgtgatgattgaaggacttgaaagcttatggaatggaagagccagttaacctaaagcagtgaggcaggttctggtacaatggtctttctacaggc

SEQ ID NO: 425353 - DNA, 247 bp, Homo Sapiens
cacggttggctcagaaggtagtcagatgtgagactgcttccttgagacattttgtgctatgttttatacgaataattaaaaaacagttggcgttcatacaaatgtctatgtgacatgataaacatggagaatcccaaagaaaaaccgaacagatacaggatccagagataatgacacacctccgcgatgatatatgagacgcatgacatcagatactctgctccctggctctacaagcgtgacctgc

SEQ ID NO: 425354 - DNA, 128 bp, Homo Sapiens
  misc_feature (81)..(81): n is a, c, g, or t
actagtccacggttggctagtcttctgcctgtatgctaagccactgtgtcaagaaggacttgccagtaaggaaacgcctgntccccttggtttcagagcattcatgtggctggggaacctgggctatt

SEQ ID NO: 425355 - DNA, 518 bp, Homo Sapiens
cggttggctggtggataaggctgaggaggcaccgctagatggaccggagacctgtcttctttgctgaatgggggatgggcctcagcgatctccaggcttatactgctggggacatgcctgaacacagtcaccgggcacacggaatgggtcaccaaggtagtttggcaaaaatgtcaagtcaagtctctcttgctcagtcctggagactagatcctcttaaatgcagaccaattagtagattcagattgggccaatcgggcacagaaatcaacagttagtggttaaagaccttgtctgtctctggagggtagaagtatttgtctgtagcccagacctcattctgatggcgaataccttggccggagttcagcacctgggcgctaccagtgggactttgacagttatgatattctcaggggcctcaggacacctgtgatagctgacttgggcttgcctggctctggagatctctttgccctggtgtgtgagaacccgctacctgttcagtcatggacttg

SEQ ID NO: 425356 - DNA, 482 bp, Homo Sapiens
  misc_feature (23)..(23): n is a, c, g, or t
  misc_feature (259)..(259): n is a, c, g, or t
  misc_feature (375)..(375): n is a, c, g, or t
  misc_feature (439)..(439): n is a, c, g, or t
actagtccacggttggctacagntggcaaagacctcagggagagaaagaatgatatctgagggaaaagagtactgggcagaaagaagagcaagtacaaaggatttgaatcaatgatgcccacatgccacatccaagaggctagcaaaaacaatgacctctccaattcctgtcttttaggatgaagcctgaggcaattctttttgagttcagtattctaacacgtctgaagaagaaaagttgcagccgctagcccatatngtgtctctgtgtgagttggaaaaaaggcaaatcttcctccaggtgagtggttccctattcaaggcacacagctagacgaatggaatgtgggctgaatttcaggccccactcactgncttaagccaggtggacttgcagagggcacaacttgcatggcattatgcaaaagccccaggcaancgtggactagtagccaaccgtggactagtagccaaccgtggac

SEQ ID NO: 425357 - DNA, 186 bp, Homo Sapiens
tagacccatccagtcctgctcttcaggaatgtggtttaggtcaaaaggcaatgattagagcctgcttttcccacttgcttgccatgtgcttttaacagtgcctgggccttaatctccttttcctggccttatttatatagcaatgacaaacacacatgttcacttaccagccaaccgtggactagt

SEQ ID NO: 425358 - DNA, 355 bp, Homo Sapiens
ccacagctcatggtttcacaaatacgtgcccaggttccctgtaaacacaaatgcaatttactaatcgtatgtagcttacaagcctacggagcttctcttttcactgtttcttcaacataaagaaagagaccacgagtcctctaccctcaaaagtgctttttacttcccgttaaggtaaagaccacgtgtagactgtacattaaccttggctatgcagcactgcaaaggagagctgctcccgcctctgcatttcccactccgtgtctttgccctagtggtcctcccctcacagctggcgaccctagaggttattcattccttggagggaaactgagggaggccggaagtgagtgag

SEQ ID NO: 425359 - DNA, 334 bp, Homo Sapiens
tcatcgatgccacaacaatcggtctttcatctttacacggtttccttacatatgtatgtatatgacttaacataaggttggtgtacattttctcctaagtcctctatttctcagtttcttcaacggtctcatacttgagctcctctccttcctgggcattggatgacacagctctgaccggtatttcttcctttattaacactttttcctccactttcccttaaacagatgctcaccgggtgggtaccaatattagcccacttatctttttatagtcttttaatggaggcaacataatcggtaccaaccaggtggcatcgataaacaccgggta

SEQ ID NO: 425360 - DNA, 156 bp, Homo Sapiens
ggtgtgtatcgagtgccacccctagcctgaggggtggcaacaattctgacctgctctccttcttccgccttcgttcccattctgagtcttctcattatcctgagtgtttaaaatgataaactccttcgtggcatcgataaacaccgggtaccgagc

SEQ ID NO: 425361 - DNA, 303 bp, Homo Sapiens
ctatcgatgccaccgtgcagttgtgttggtcccaacatgggtctatgtcaccatgctcctacaaaccaaggcacatatctgcaggtggaatacaaggatgatagttaagaaatatagagcggcttttctcaaatattcagaacggtagtctcttggaattccaccggtacagcatgtacccggtggaaaggcgtacaatatccagaatgcagacctttccaggtgaatgctggttttaactgattaaacccggcatatccagattttatttaagggggaatcaaggtggagtggcatcgataa

SEQ ID NO: 425362 - DNA, 495 bp, Homo Sapiens
gggtctatcgatgccactcaattcaagaagaaaagatgggtggtttctggcgggagatgagtggaatcaaaagaattaaggggcgggaagggtttagcaggcatatatttatgtgttatgcttggctggcattctaagctttttttcctaatataaaagttaataattggtcaactagtaacctctgtgtcaggtagtgtgctgagggtttaaatagaagttagggaataaaaatagtttctatcctcaggaagtttatggactagtcagtaaaaaatacatcagtaattaaaactcagtaaattaaaagtttggtttagggttataacagaatatcagaccaaatctctgatgagactactgtaaaaacggtttaaaatacaaaaacaaatatctttgatggcacgggggactaaccaaggcagccaggtcaaatttggcaggagccaaaattgtagagaaaaatcctattgagttgagcccgtatgtacccct

SEQ ID NO: 425363 - DNA, 595 bp, Homo Sapiens
  misc_feature (21)..(21): n is a, c, g, or t
ggtgtctatgaatgcctgagnattttcacagaaccagcaaaaccaggagtggagagttggggagatagagaagtaggcctaaaactccctcctcttgtagtcttttttgacttaatacaccattgggtctgtcctggtgctatggcctatcacaaaggactgttttaagagagaagcaagccacagccttgccagataagtctccaacaccagcagaaaagcacggaccctgatctgtgggaggcaagggtctcccattatttctggaggcaaatggtgccttctagtgaaatggtgccaccatttgctgatgggggtgcctgttctcaggatgtgtggaaactcaggcctgagggtttctacatggtttattcaatctaactgcatacctagcttggcagaatggaggtggcatcgataaacaccggtgtttatcgatgccacatgttttacttctttatgttcctcacatgtggcagctgctcagaagatgtctgtgaacttagcacgtctcgcttcatagattcataagacattggttatggctccttctttggatatctgacatatttttggaacttttaaattctaatac

SEQ ID NO: 425364 - DNA, 367 bp, Homo Sapiens
ggtgtcatcgatgacacccttgatatctgggacgtttcctgtaagccagagatatcaaggtggacttgtgatgggtagattgtttattatacagatatcagcttgggaatttgaatgtttaattatttgccttgtcgtagtgtcttcaaatgaagctctatttgagcatctactgggattggtacaatatgcagacaagctggctttgtgtgggtcgagtcacctgtgcttgcaggatgggggtgcttgctatatttggaagtgatttagtggtatcctaggtttatcaggaggaaaatacatctttgcatttatttgaacatttgatttagaaagggacagtgtgtggcatcgataaacaccgggt

SEQ ID NO: 425365 - DNA, 295 bp, Homo Sapiens
tgtttatcgaatgccacataaaatagagacagataagagcctagagtgcatacaggtggtcatcacatatagtccattctgaagttccttttctagctatccagagatgggttgcacaaggagtagagaagaggaagccttctctaataaattaggacaaaaactgattcccactccatattaaactttcaggaagagttcagtaaatgcatcaaattttccagctctggaggtctgtaatgataggagagagccacacaagctttcttaaaatggtcatcatcatactggtgag

SEQ ID NO: 425366 - DNA, 325 bp, Homo Sapiens
  misc_feature (189)..(200): n is a, c, g, or t
gggtttatcgatgccaccgtgttggtatggaggaaaagggcatgctgcatcttcttcctgacctccggggtctctggccttttgtttccttgctcactgaggggtctgtctaaccaagcaggctagatagtgctggcacacattgccttctttctcattgggtccagcaatgaagataagtgtttgggnnnnnnnnnnnncctccacaaggtagcaaattctcaggaaatacagtttatatcttcctcctatgctcttccagtcaccaactacttatgcggctacttggtccagggcacaaaaggccggggcatcgataaacacg

SEQ ID NO: 425367 - DNA, 209 bp, Homo Sapiens
tgtttatcgaatgccacccctggcactgtgaacgtgtgtgggggtgggaggctcacgtgatgtgtgtgtgtcatggattccatggggctgagggccagaacgtgttaggacatgtggagcaggggtgagacggggcttcccacctggggaaaggacaggggtggcaccaaagaaccgaagcagaggcaaccctgtggcatcgataaaca

SEQ ID NO: 425368 - DNA, 289 bp, Homo Sapiens
tatcgatgccacaaatccactgctccctccctatcattacctatatcctccagatatccaagtcaaaagcttgtgtgagtgatgaagaaagagactaggaaccccactcaagaccttcagagagatggccctttctgagagagtctgctagctcttcaaactatagaaagaacatgggctttgacatcaatgctttaggtttgaagtgtaaccatcccataagttaactgcatgctcttgggtgaggaccctcctctgtgaagccaaaatcctacccctcactctggca

SEQ ID NO: 425369 - DNA, 489 bp, Homo Sapiens
atcgatgccaccacatttctcacttgcgcagatgggaaggagctgggaccgagaaagatgtggtggacgtcaggagggctagggaggctgggtctgagggaggcggtggggaacgagtgcaggatcgccaggcacaggctccggggtgagtgtccaggattcctcatgctcccattggccccctcctgaaggttgatttgtccggagtcaggtttgctaggtgagtggggcaccgggacccagatactagtccagctgtcttctgagcccacgcctaagtaccttacaggtactgttagctcagtggatgctcgggtaacttccatgaccggatggtcagttctgaggctgagagagaggccacgccgccggccagtgcagagctgggccttgggtgggttgcagacaagaaaggctgggagtgctgcctggagccccaggtgcaggtggaggggctgagggttactctgggagaaggtgcatcgataa

SEQ ID NO: 425370 - DNA, 237 bp, Homo Sapiens
ctatcgactgccacctagactagctcatgtctgttgctctaggaatattcaatttaggctatgtcataaggtggcttcaagcgtctagataattcaggtttttatgcaggcagcttataggtattcattgccacaaaaggtttttactggtctcttcatattttacagttgctttagtcttagtcaataactgtggtctagtatagcaggcttattatgggattacttgtagtaacc

SEQ ID NO: 425371 - DNA, 529 bp, Homo Sapiens
tgttatcgaatgccactttcgtgctctgtggatgtatctagggaatctgttgccatcagaagcacttgtggggtgattcggcttcctgccgatccacggtcgggcattcaggaaccagcgcggacacgactgttctaagatcctttgctagtcgagactgccatatgcggcacaatgaataccgacaaatgaggcggtgcttagcataggtgcgggggttgtaggagaaatatggtagagcctattctagagaacctacagtgtggggggatattggcatcatgactgagtaatttttatacaatgtgatacgcgctctaataggatgtgatgcaaaagagcccaggatgcagatgaggtgattaatttgcagccaggagaagttggagggggaagggaatgctgtgttaactgctttccatgcatttcatgtactgctcatcacaattctgtgagctggatattaataccactatcatcctcaagtcagaaaaaaggagaccgaggatgatagtggcctcgataaaca

SEQ ID NO: 425372 - DNA, 400 bp, Homo Sapiens
tgttatcgatgccacccatgacaagtttgtgaattttgtaatcacatatattgtcaatgggtgggagtaaagttttgctgatgaagttaatcctgtgataaacataaccatctgtcatttttagagaagcaacagcaggctctctgggataatatcctttgccatatggcatattgttctctatgaatatcttatacgttgaaagtgatattctcattataattcaaatttttgaagctgtaaatggcttggatttttgagcagttatgaacctctgctcttgtacacagaactttgaaaatgatgatttatgaacagcaatgactccatcttagaacaataaagacccaaggtacattttcataaggtacaattagatgccatgttgtggcatcgataa

SEQ ID NO: 425373 - DNA, 533 bp, Homo Sapiens
gggtttatcgatgccacctctcgttttcccattacctttaaatgagagagtcagacaactaacccgccaagtctaataatagcatgataagtgttctgttaggggaagttttaagtgggaacacagaggaggtggtatgcagaaaggcttttgaataattaggaaaagccttcccagacctctaagctgaggtctgaagagtaagtaggagttagctcagtgaagaattgtaaatctgtgtttctggcagaagaatatagcttgtgcaaagtccttgagacaggagatagaagacgctgccatgggatgtgaaagaagttcatgtgaccatagtgcaagatgggaagtattagagttgtggcaaaagtatgcaggggctagatcttcaagacatgtgaattattattaagaaatttgggtttaatcctgaggactcccctcagttcttttaatgggacattaacctgattagatttgaatgtgtcgaaagatcactctaattacaacatagtgattaggttaagaaccggatg

SEQ ID NO: 425374 - DNA, 136 bp, Homo Sapiens
aaacttggccaagtcctgatggaaaaaaatattaccagttttatctggtgacaagtgttttcattaaggctaatcagttttatagttgaagtatcttatagagataaactgtatgttaatttaaataaaggaaggt

SEQ ID NO: 425375 - DNA, 341 bp, Homo Sapiens
tatcgattgccactgccgtcagtgaaatctttgatgtcacaatataatagctcctgaaagaacagcactaatacttaatgtaacatgaaaccagagctctgcaatggggctgtctgctgtcaggaacaaacaatttcaccactgttcctcagaagtgaccagatgagatctgccttaaggaaacaattctggaggcagggagggagtatggaggattaattagacagggggctagttcagtgtaaggaaatacatctgtttttcctgtttctgtccatgtgattgtcttgtgaacagtgggggacttttgtgggactgtggcatcgataaacaccgggtac

SEQ ID NO: 425376 - DNA, 490 bp, Homo Sapiens
gggttatcggcataagtgtgtaaagattaaatgagaaaaggcaggtaaagccccggcgaggggtcggtacaaaaagcaataaatgccagtttctttccccaggcttgaaggctgatgcctaattctggctggttatgagacccaggaagattacttaaaatctcagatcctcagttttcacatccatggacttaccagatcgatctttccatctgtccattcaataaatttcattcaatcatcactaagtgggcccagactaagtcctggaaatctttaaatccctcatttaaaaaatatggagaatttcaaatgtctgaaaaacagattatgcataaccaacccccatttacccaccactcaattcgagtaagccacctttcagctttagacttcagagggcccttgatttaggatggcatggagggtggaataaaaatatcagggggtttctgttaactccaagtttaatacgagttaccagtataat

SEQ ID NO: 425377 - DNA, 444 bp, Homo Sapiens
gccaagccaggcctcagggagatatgttgctggggtgctgtctagccctcccactacatcatactcccaagcagccttacaggatcgtcctgcaggctccaccagactatcaaactgaagccaccaaaagccctctcatgtgacttcatacacagatcacccagcacagttctgatgatataagctgtcacttatctgcaagtgaactgaatgtcaagatcagtggtttgtgatcttgccatctgatgtcagatttagctcacaggagatactcattaaaatcatttaggaagccaaataggatgtacagcaggtcaaaacccccaccacgaggaaggaaggggagacatgacccattttctgcagacttttactttagtttggtattattctttgagagtcttcaagcaggattacaaatgggttgaatcctgctcattctag

SEQ ID NO: 425378 - DNA, 371 bp, Homo Sapiens
  misc_feature (151)..(164): n is a, c, g, or t
tatcgatgccaccagactcctttcaagatctcttgtaaggcaggtctggtggtaacgaactccttcaacattgcttatctgaaaaaggttcctatttctcctttgcttaaagagcttagtttggctggatatgaaattcttggttgaagannnnnnnnnnnnnnatttaagaatgttgaatataggtccccaatctcttctgacttacagggtttcagctgagaagtcggtggtaagcctgacagggttcccttggtaggtgaccggccctttctctctagcggcctttaacatcctttcttacatttcagcctgggaaaatcggatgattatgggtctggggggtgatcttcaggtggggcatcgataaa

SEQ ID NO: 425379 - DNA, 561 bp, Homo Sapiens
catcgatgtcaacggcgagaaatcttttaccttcaaatgaacaaagataaacacgatgatatttatttcaacaacggctgcaacaaaacaggcaagacaatactgggcttgagactggcacttgggaaaacagcagtagtcttagaaaaatgcccagcactggtacccaacaattacacttctgagatctagctaaaagaaatgatataaaatatagaaaaatcatttcttccagtgcatatttatcatattcatttgtaatcacttaaaaacaaaacagtcaaactcaaatcatcaaaacatgggaagggttcagtaaattatagtaattcccacaccaaatcatccattcgttcatcaaaaacacatgtattaaccacttcccattagacacaccacacctctgttctgtgctggagctgctcttgtggaacctcccagtccactgctgactgcaggcaggcatatccacaaataaaagtggcagactcatacaggtgagaagacagaggtctgcacagcagagggcgtggtccatccacctaggaagagcccaccggg

SEQ ID NO: 425380 - DNA, 506 bp, Homo Sapiens
gtgtggttaagcagaaacacacatgaaacatgtttgtggataaatacagttaacaaaaatgtgacaaggggctcactggagcctaccttgtattttccttaagagcagtagctcagtatttactaattcattgtttaaaggggctttacagagcgtaactaccatgcataacaggaatcaattgtacctaccagatttttcttgactaaactgttgaaaaaattttgtctctaacaattgggaaataaattgtacctttttctgtgtgaaatgaaacttgctcataaaacaattcaaaatctagttaatgcttcttgagagagacccctttcttgatcagcaggttctctggtgagcctatatagaatcatagcaagaaagcagccaatgaagacagaactcataggcttgaaacactaattgtaatttcttaacattttcagttaatacttatggtgtgcctcggaattctgggtgcaggctgggcatagtggatcgataaacac

SEQ ID NO: 425381 - DNA, 106 bp, Homo Sapiens
tatcgatgcacgcgcccggcgggtgtggttttaactgagtctcctaggtcttaatgagggctcctttggatattgtaagtaataatcatggttggctgtaacactc

SEQ ID NO: 425382 - DNA, 460 bp, Homo Sapiens
tgcccttatatctattaccatgctttaaaaatgtaaggtaatagaatataaggtggatggaaaggggagaattatattacattcattaagtcagcagtgctcaaatagggactcgtatatgccttgagcatagatgagtcatttcagaggaaccacacattcttatgtgcatcactttatgaacagaaaaatatgtctcgctcaagatttgttttaccactttttaaatggtggacttccgtagccagctgtgacttggaaaatatacatttatttgcgaacattactgacttcaggatagcattactgaattccacatattactgtgaattttcccagaataaaaagtatcgatgtacagttatgtatgggtccaaataacttattgatttattgattctttaatgtacttgttctagaaatatttatctttacaagtggcatcgataaacaccgggta

SEQ ID NO: 425383 - DNA, 356 bp, Homo Sapiens
ttatcgatgccaccaattttggaagtaggaataagatcagattttaaagtttactggcatattctaactgtattagactaaccaagcatggtaattagttttcagacatcctcaccatgaagcataacctccaactattcacagtggaaattacactgtgtgattaacttggagcttctgtgtgggccttctgtatcactaaagctggggaagtacaacttccatgaaagaattccaactactatgagatgcccaggctatgagcaacccaatctagccacatagagaggccacatgaagcaagagatgttccactggcccctctgtgtggcatcgataaacaccgggtaccgagc

SEQ ID NO: 425384 - DNA, 393 bp, Homo Sapiens
tgtttggaatggagatgaggatagtaggggcagcagtgctttggtggagaagatgatttagtgactttggacttcctgagtttgaggcaggacacaggggaatgttaccctaagagctcagcagagagaggccaggattggaacgtgtactactcttgaccactggagctccagacatgacccaaatgcctggtgaatatctagaacaggtgaagagcaaggtgaggaaaggacccgagggaacaccaaggtttaaaggatggtggagacagtgagtgaggaactaagaagggagacccaagaggtggaagtcaaagagcggaggctgggaatgaaagccattggaaggtacagtctcttgcaggagtgagactgtagtggcatcgataaaca

SEQ ID NO: 425385 - DNA, 120 bp, Homo Sapiens
catcgaatgtaccacagaggtacttggtttgaggagctaagacttagtcgtagtcctctcttccagaactttacttaacgtagaaccagtttgaaaccacaagtacctctgtggctacaa

SEQ ID NO: 425386 - DNA, 151 bp, Homo Sapiens
tggacaaggacgaacaatggtagaatctcagcttaattttgtgtcttcagactcccaacctttgagaaatagtgtctaattccttcctttatttagatgaggcgatataaaccaattcctgatgttactgacacttaagtaagtttcaagg

SEQ ID NO: 425387 - DNA, 207 bp, Homo Sapiens
gattacttttgtgaaacttacttcagttaagagtgtatgcatatgtactagatggcaacgtaacatataaaagttgaaaaacacaggtttggaggatcataatgtaaaacacatatcttaacatatcatggccagctgtatggccacgtagctctttgagggttgggacattcttgatctatatatccctcatgcccaatgtcctac

SEQ ID NO: 425388 - DNA, 111 bp, Homo Sapiens
aaaacaaaagacagacctgtaaccgtcttggtgtgcctggctctcatcttagttcaaaatatagaagtaaattctatggccagcgaacaatgaccaaaatagctctcatca

SEQ ID NO: 425389 - DNA, 124 bp, Homo Sapiens
ttcagatctgggtttgtctgactcgagcacacgctgatttttctacattgggttgccacctggaagtaatctcttagtattgagaaccttccaggtggcatcgataaacaccgggtaccgagct

SEQ ID NO: 425390 - DNA, 400 bp, Homo Sapiens
ctgcactggccaaaacttttaaattatggtaaagtctaatttattattttttcctttaaggatcatgattttgatctcatgattaaaaactctttgcttaacccaaggtcatgcatattttgtgtgtattttcttctgaaagttttatagctttacatataggtcaagggtccactttgggtggattttcacatgaagtgtgaggtggaggttgtgggtctgttgctcatgggcggcgaattgtcccaacagctgcagacacaactcctctccttctgatttcctctcatgtttgttcatacaccatagacagaccgtgactgtattttgagtgagtttgcaaaaatatggccagtttgttagaacttgacccaccatctgctcacttatcagtttcagg

SEQ ID NO: 425391 - DNA, 297 bp, Homo Sapiens
ctagaggatccggggtaatcgatgccacttacatttttgtggaaagctagatagctcgtgtagacagtagacaacaaggtaaataggttttatgcccagaaatgggcctttggctaggcctttagtggtgtgggcagggaagttagctggaactagtttaggactctgcgttggatggcagtttggttggtgactggtggatacccggtgtacaccacatgatttccaaccccttttagtggccacctttgtgtttcagggctgggggctggggtcacaaggtgggcatcgcataaa

SEQ ID NO: 425392 - DNA, 256 bp, Homo Sapiens
tgccacagttatgtgactatactttttaaagagtcctttaaaaagcaggacaatacccatttcccggggggagaccacgaacatacagctacgggatgaatacagaaaatgacaatccggattatgatgccaccgagttctgggagctgagaaagagatttctagaaacctagattttaaaagtgctttatctcaggcccttagatagaagcaaagatgatgacctcgggggcatcgataaacaggggtaccgagc

SEQ ID NO: 425393 - DNA, 547 bp, Homo Sapiens
  misc_feature (160)..(228): n is a, c, g, or t
tgtctatcgatgccacaaactgatgataagtgtcagacccgggagttgcctgctagtctagcacgcacccccgctagcccggccttccagctctagatggatgtatgcctttccacaccacaagcgaaagtgcggggccaggaaatgtggtttccctctnnnnnnnnnnnnnnnnnnnnnnnnnnnnnnnnnnnnnnnnnnnnnnnnnnnnnnnnnnnnnnnnnnnnntgagtgtggtaagaaaaaatacgggggggcatgggaagacttccaatttcagagccgcgcagttcccttgcaaagtgggaaagggttccacagcacagcccgggggctgctgacgtccaggccaggaaccataagaggtgagtgcgccagggtggggtgtggctgctcagctcaggtgggccggggcagcacaaggcctgacagcctccagtgcccacccatcttgcacatggtgaccataccaattctcttagcctgttccctacctctgtcattcttatcctccaccatttgagctgagctataaccaaatctcagg

SEQ ID NO: 425394 - DNA, 507 bp, Homo Sapiens
  misc_feature (88)..(192): n is a, c, g, or t
  misc_feature (367)..(384): n is a, c, g, or t
  misc_feature (415)..(432): n is a, c, g, or t
tcgatctagaggatccgggggttctcgaggccactcacatttagcacgggtcaggacgttctatggcaaaagagaaaccttctcattnnnnnnnnnnnnnnnnnnnnnnnnnnnnnnnnnnnnnnnnnnnnnnnnnnnnnnnnnnnnnnnnnnnnnnnnnnnnnnnnnnnnnnnnnnnnnnnnnnnnnnnnnagtagggatgcagggatttctctttttgcccaaggggaatggggaatttatttaatttttttctcaattatctggtaatttatttctctcaattatttggctctcagactgggctcaggtggggccggggggagccccttcaggcgggctctaggtgtgggcaatatacctctannnnnnnnnnnnnnnnnnaaggacgggggtctcattcggggccacgccnnnnnnnnnnnnnnnnnncacgagactggggtcagggcgaacctgggcgtcgggggtccaaggaattctcgggcctcagcctccggagtcccg

SEQ ID NO: 425395 - DNA, 234 bp, Homo Sapiens
gaggatccgggggtatcgatgccacaaattcatcgtaatggatcaagacctccatagactctaagaatagttcataatttttttatttattgggacacatgtgtttaacatctacagcttccgggttaagaaagaatcttttggtaaaaatagtatcctacataggacagggaaataacaggaatctgagacttcgggtggcacttcagagactttcttttgcttggcattttt

SEQ ID NO: 425396 - DNA, 570 bp, Homo Sapiens
  misc_feature (43)..(90): n is a, c, g, or t
tgatctaaggatccggggtatcgatgccatatcccagacgagnnnnnnnnnnnnnnnnnnnnnnnnnnnnnnnnnnnnnnnnnnnnnnnngggtgtcttatatacatgaaataggcagcactattagccttattccctagtttcagcagagaaggcaaaaagaggttacggatgtctggaaacagaccagcaaaattggtcaaagagctcaagattcatcaaaaggtgtgtggagatgaaaccaagtcagtgacccctgaagatacagagaaagatgtggtgtcacatgaactcagtttcggcaacattctatcatagtcgggtgctgaaaatgcacaaaccaaacacaagcatgtagacgggcccaaggccctaccccaggtaagattatgcggtctttcacataccaaggagatgaaggaacaacccttaatattttcaccggttaaataccttggccagaagccggagttaaggaaaagcatatttatctattcagttagactcattgggttaagtttgaaagtcagaacaaagtatgtacatttaatatatgttactaaatacaat

SEQ ID NO: 425397 - DNA, 166 bp, Homo Sapiens
gactcggtctctaaaaagatttttttataaaaactaaacaaggcactatattgtatttatgcggataaagtaaacggactaaaattcggtttaacaaaagaagatgctgattaccctaacataaaacaaataattcaaaaaactatagacattttaaagaaaattc

SEQ ID NO: 425398 - DNA, 500 bp, Homo Sapiens
  misc_feature (466)..(466): n is a, c, g, or t
ccactgcggcccgctcttcatcctctttctactctcctatattgggatgatcagtttctcttttgggatttatttatttaagcatctctatgtcttctgggatggggtcaaagaggatgggtcatcttcagatttactgagcaaatttccaaattcgtgagtttccagatgaaaagagtgaagaacgccgggtggagtcaagaggttcaagtcacctccctagtggggcagcccttggtgagcaaccggagccacctttcccatgggcatgcctcctgtgcacatgcatgcacacgatttggggaaagaacgtgaagaggaaataacccgaaggtgggctgggcgtggtggccctgactttgtgttcacataatgttttcaaagttcctcgaagttgtagtatatatcagaacttggttcctttttagggctgaataatattccgttttctagatataccaccttntgcttaattcatatttaaaatgaagcaaaaggtg

SEQ ID NO: 425399 - DNA, 527 bp, Homo Sapiens
  misc_feature (14)..(14): n is a, c, g, or t
ctcgatgtcaccgngcccagtgagcatctgattttaatctagaaaaacgggcgaagacaaaaggaggcaaagagaagaaaccaacatggatgaagcagaagggtcttatttcagatctgggctctggtaagcggttcaatttcaggttatgtagagaactctctaggactcgattggcttatggtaaaaggggaatctggataggatgtcaaattagcattaattaaaggagacgctataggtaaagctctcagcactcggcgagcacccaacatgtgagggcggacttctacatggtcatccaagatttcccataagccaggctctgagctaagtgctctacaaatatctcacagagcccccactacaatgacacaggcagcattagccctgctggcacagaggagaaggcaccgagaacggaaggaagtaccctttctgaggtcagtcagccaaggctgggtctcggtgacatgaaactccctttcttatctttttctcaatttccccacatggtactattaagc

SEQ ID NO: 425400 - DNA, 310 bp, Homo Sapiens
tgtctatcgatgccaccagagtacttctggtgggtttactccagtgtacttctgggtggtctgtgccccaggctcaccgggggctggatggcccctatggctgcgtcttccttcattctctagggatccgggcttcccatcttcccagccaggatttggatcatcagcccccaggggctgtgttcctctagcttcctcctttggggtgttcctcctccagggactaaagtatgttaacacattaaggaacaacggtgtttcatagtttatgccacccagcataagtggcatcgataaacaccgggtaccg

SEQ ID NO: 425401 - DNA, 287 bp, Homo Sapiens
tctttatcgatgccaccttagggtagaaaaaaggaaggcaatatgggacaccgaagctaataagacatgagtaggattaaattttcagtctagtaacacatgaggaatgccggcggcaaagcaagaccaagataaatgacataagaagacaaataaaatggcaacttcacggggaatgagatatggtagttgaattggaagcatctggccactaggtttcaccaaacatcatcatcatagggcagcaaacatcaggggccatcgataaaccaccggggtcacggagc

SEQ ID NO: 425402 - DNA, 148 bp, Homo Sapiens
agtgagagctgggaaatgacagcatagagcagagatgtgggtacatgaagtgagacagagaccttcctacgtgtgccctttactctcccaacttggtcctgtaaggtaccgatgccacggcagccccagcgggtggcatcgataaaca

SEQ ID NO: 425403 - DNA, 425 bp, Homo Sapiens
  misc_feature (192)..(192): n is a, c, g, or t
  misc_feature (223)..(223): n is a, c, g, or t
  misc_feature (372)..(372): n is a, c, g, or t
gacggactccccggtgttatcgactgccacctctgacggggtacgcattactggactactgacttctacgacaactggtgacttcagcggtggctggacgacggtgtgacacacgacgactggacgacgtgactacagaccgtgttactggtcaacgacgttacgacgacggggtggactcactgcacgggntctgtgtaaacccacttactacaacgacctnttgggtttttacctcctgacatgacgactaggacagccactcacgacacggtgctgacgcccgacgaccgtgaccaacaccttggaccgtgctatgttgacacgacgcacacggtgacacgtcagacgacacccctctttacggaccgnctactttcacgacaacttccagaccacgacggtgactacgtgactcttcaacc

SEQ ID NO: 425404 - DNA, 343 bp, Homo Sapiens
  misc_feature (18)..(18): n is a, c, g, or t
  misc_feature (82)..(82): n is a, c, g, or t
tgtctatcgactgccacnctaggcacttcctgggccatagatggcatcttctggtgtatcctcccatggcagaaggcagctnctctggggcttcttttcttagggcactaatcccattcaccagggctctacctttatggcctaatcaccttccaaaggccccacctgctaacactatctctgtgggagttcggatctcaacataggaattgggggggacacaaacattccagccatagccccctgttataagtaagaaaaccagagcacagagaggtcggcagctgaactgtgtcactgatggatgcgcagccagtggcatcgttaaacaccgggtaccgag

SEQ ID NO: 425405 - DNA, 271 bp, Homo Sapiens
ccacgtgggaccatgattcatcctctggctaaggtcccagttgggcatcttccaagaccatattattggagcacaattttggatgcagaatcatctcccggttcccctactcgctggtgagagggaacatttcctccttatgtgtcttagaatatttttacctaacaggcttaaacaaaacaaatttcattcttaacatcaggctctgaaagttccttttagttagcattggctatatggacagcgggttggacaagtacatattttagca

SEQ ID NO: 425406 - DNA, 476 bp, Homo Sapiens
ggtggtcatcgatgccactatttattcaggaagcttctggactagtccagtgaaaaggtaataaaacctgaattaagatagtggaagaagaggagaagaaattaaaagaaattcagtggtaattcagtagtacctggccctttacgaatgaaggtgagtgagatagcaaatgtgaggcttttggtttggatgtctggatagatggttcaggtcattaactgagattgggaaggcaggcgaaaccagtatggatgattgaatttggggtgtcttactggctgcgtcaggagatgttccgtcagatagccacaagtaaaggctggaacttgtggaaggaagagcccgagataggagttactgcatacaggcaggagccaaagccatgagaacgggtgagtctcactaggagagagctaagatggataaggacacaactctgaagggcatcattatttaaggaggtggcctcgataaac

SEQ ID NO: 425407 - DNA, 491 bp, Homo Sapiens
  misc_feature (96)..(96): n is a, c, g, or t
  misc_feature (467)..(467): n is a, c, g, or t
ttatcgattgccaccaccagtctttttcatgtattatcagttctcatgtgaacctcacaggactggtggtggtatcatttctcagttgaccaaggnctcacagagattaagcagtttgttcaaggttacacagcctccacatagctgagctgtgcttggccgcaggcttggctgagcacatacttgactcaaaggcactcgcctccaaagctgaagcttcgttagatgtagatacattgttgtcttctcagagtcatcagaaagttagtccagggtaagaaaaaatgtcatctccaggcccagagggatagcctgcagcttagagggcacaggtttgccagtgttcattgaggaggtgaccagagggtgaatgggcagccactggcacaaactagcctgctctctgtggccaagcctgccctctgtggccatagtgaaagtaccaactgggctagggatgcctctgnccttagggttggtgccagagttca

SEQ ID NO: 425408 - DNA, 125 bp, Homo Sapiens
tgtttatcgatgccacaatatagagggtatctaaataagtcgctatgacaatgtaataaagtcattattttcaacatttattgaaattaccacaccttaactctactctagaagtggcatcacac

SEQ ID NO: 425409 - DNA, 337 bp, Homo Sapiens
tatcgactgccacagacaggacgggtagcctgttaatattctcatttgcagtgtgtaaggtacctgttcctgtctgtggtatgataattgtcaattgggtactttgggttagttttccaatctttggtcttctttaaaggggagagagtgggagatttccagcagtgcagatccccggtcaaaggagaaatgtgcaggagttaagatgagctgcccatctatctaaccatctatgtatctgtctctcaagtgggtggatgggggttgctatcttggctgtataaagaatcctaaaaaccttgtctcataagctagaggtttcctgatgggtttaact

SEQ ID NO: 425410 - DNA, 495 bp, Homo Sapiens
  misc_feature (255)..(267): n is a, c, g, or t
tgtttatcgatgccacctaatatatcaataacttcctggaaatctgatgctttttaaggaacactaggaagttatgatatatttaggtggtgtgtgagctgagaacactattttggaggaaattttatagtgccatatatatgttataaacatatgtgaccataatcacatttgtaggaaaaataacctattaaatgatgtgtgactggctattataaattttccactaaaatagttaattaattgttcgctgannnnnnnnnnnnnagtgcttggtacagtatatattcttctgatgcttatggtagtataaggtacatttcttgaaaaaaacaaattgaaattactctgcctattctgttcgcaaattaggaaaaggtaacaattcttttagtagtggaatatttcggtccagttcttgagatgccagtgaaggtcaagaatgtagcttcagaaccagtggaatctgagcttactgggtggaatcgataaaca

SEQ ID NO: 425411 - DNA, 368 bp, Homo Sapiens
  misc_feature (18)..(18): n is a, c, g, or t
gggtttatcgatgccacnataagataagtattactaatttttcatattaatttaggtcattagtaatactttattgcttatgtggtaaaacacattaatcatgaaaatattttctagcttagttttaaaaattctttgccatataacttttaaataaacaataatatttatcccattgtgtctgcaaatgaaaactacatcctttagtattgaactgataacgttttttgctctcagaaagttaccttgttcagtgctagcctataatggtgtttgaagtttaagagtggcattgttgtttgactcagcaaggaaatatataggaaatatcgtaatgaaaatagaatttcgagtggcatcgataaaca

SEQ ID NO: 425412 - DNA, 374 bp, Homo Sapiens
  misc_feature (237)..(307): n is a, c, g, or t
gggtttatcgatgccacgcctcttctgaatagttgaggcgtggcagcaggaagagttaggtagatacaaggaggcacatgactgaatccagtacaatctcagtatcactaagagtagaacagagagatatttatgtgtctcctggtgagttattatacagtaggaactgtgctgtacatatcttctacgaaagttaaaaaaacttcaaactcagaatttagtcagtcttttacatgnnnnnnnnnnnnnnnnnnnnnnnnnnnnnnnnnnnnnnnnnnnnnnnnnnnnnnnnnnnnnnnnnnnnnnnagtatggggtattaaatgatattaagaagttaattttgtgagatgaagtggcatcgataaccgggta

SEQ ID NO: 425413 - DNA, 117 bp, Homo Sapiens
  misc_feature (21)..(22): n is a, c, g, or t
tacatggtggtatatttaaanngccaaatcgttgagagaattcattttgtctaggaaacattcgtattctttttctcgcttggatgtgtacattcagactatgatgctcaggatttg

SEQ ID NO: 425414 - DNA, 300 bp, Homo Sapiens
tttatttcttgcccgctgtgatattctagaatatagagagatggcacagggcacaatagagcgagtgattatatgtgtggaaatagggtcccagtgagggcgtgtagcgtagagtgtctagggagagagtgaagatgcttttcaattactatatccaagttagaggggtattcgtgtgattcgtgctagagaatctcgcgcgagaggggatatattccgtgctgtgctgagcagtgtgttatatatgtgtctatttactcatatattgtgatctattactctttagccagaatacgagat

SEQ ID NO: 425415 - DNA, 498 bp, Homo Sapiens
  misc_feature (288)..(288): n is a, c, g, or t
ttttcatcgatgccactttctcctctgtaggcatcaatttttacaaagggccgaatgataaaagtccacaagaccgtcacccagaacggctgttgcaggaagcagaggcctgagcagcctatagccagaagcccaggcagggggtgtgccaactacacaggcccacatgaagagcctccatgagggagacgttatggcaagaatcctctaagtctccaagggacgagatcagaacaatgtatggaaggtgaagtgatacagatttcagcttaataaaaggaaggcggnccgaaaaatggaactgttcaaaaccacaatggcttcatttaatgggttcgatgtccccagtctgcaggaatgctgtagaagattcaggtagtgagaaatacctcaacagacaagaaagctacttcaaggacttccttcggcaaggcctttcaaacaagttttaacatggaaaacacccatccttcaaagagcttgaaggatgggtggcat

SEQ ID NO: 425416 - DNA, 414 bp, Homo Sapiens
  misc_feature (68)..(80): n is a, c, g, or t
  misc_feature (102)..(230): n is a, c, g, or t
  misc_feature (313)..(313): n is a, c, g, or t
cgatgctgtcaagtgctgatacaggcgtgagcacgcgcccggcaaattatttatggtattttatttannnnnnnnnnnnncagacggagttcgctcttgtgnnnnnnnnnnnnnnnnnnnnnnnnnnnnnnnnnnnnnnnnnnnnnnnnnnnnnnnnnnnnnnnnnnnnnnnnnnnnnnnnnnnnnnnnnnnnnnnnnnnnnnnnnnnnnnnnnnnnnnnnnnnnnnnnngaaattttgggtggtcaatatgacttcgggataaatctccagcttcaacagtacttctttggtccataaatctcaggaaggtntcaggcagaaaccggttttaacccggtggataatcagagggagtgtgcttaaggatttatggcttaatactattctttaatggcaatcctaggtatctata

SEQ ID NO: 425417 - DNA, 348 bp, Homo Sapiens
tgccacggtggtgtgtcaatggaaagaagcaaccacgtggtataaagacttaagcaatctcatagtaagaaaggatgaaccttgaagtgtgtgacaggtcttggtgtcagcagagagaattctcttaggaacaaaaggattcttctgtgtttgttagagagactgaagaaaacaagcaagaaatagtgctatatcctggaggcagaaaatgtataattgatgacagcagaaacaatagaacaacatatattaggctctattttagagggattgagaaaaaaataattaggaaactcgcaccgagaacgtggcccgacaatatttcagaaggggtggcatctataaaca

SEQ ID NO: 425418 - DNA, 571 bp, Homo Sapiens
  misc_feature (483)..(483): n is a, c, g, or t
ggtgtctatcgatgccacaatatcgatttcacaaccgccgcggcttcttacccaaggcggggagtatttatttatttttaattaaagcaagttaaatggatggagtctggagggtttggcaagggcgctacaggtaggggactatactgtaatggcatctctacctcagacaaccagcctggcaggtgagccttcagagcccaccaaagacctcctgaaggataagcaaacaggaactgggtcgccctccacccaggatgacacgggtgagtgtggacagtcaaccaccatgtcagtttctgcaccaccttggttactgccacgtagaaagcgaccacacagccccattatctgttcccctccatgaattcccatccttcccttgcggcactcccacccaaacaaacccctggtcactgggatgcaacttccgggggttgcaacatctgagccacaatatcttgatttcacaaccgccgcggnttcttacccaaggcggggagtattcatccatttttaattaaagcaagttaaatgaatggagtctggagggttccgcaatggcagtacc

SEQ ID NO: 425419 - DNA, 225 bp, Homo Sapiens
tcgatctagaggtcccggtgttatcgatgccacttcacaatattttatcaaaaaactcacctgagaaaactcaaagaatcacaagtattaagcgggagcccagaaggtctgagtgaaagggaggagaccactgggtagatatagtccagtacgggacgcatatcctaagtggtctggtggccttcattgggcccatggagacacagagggaactgtggtgagtgt

SEQ ID NO: 425420 - DNA, 295 bp, Homo Sapiens
  misc_feature (156)..(156): n is a, c, g, or t
actctaaggaccccggtgtcatcgatgtccacatgccctcatgagcggctgtggctgtggagggcatggaggccctagggtgctgttcctggaaggttttagcaggagagtcctgaggcaatggagggtctctacgggaacagcaggtattccctngagcctcagcataagtttcatggtgcctatgtgaaaacctatattccatagagtggtgagttacgggggaagtggggggtgcaggagcaggcggtgatgggctggcctagaaggggggcatctgataaacacggggtac

SEQ ID NO: 425421 - DNA, 370 bp, Homo Sapiens
cgtagcgcggtgactctaaggatcccgggttatcgatgccacatagaagtacagttttatatacctaataattcccttaaatatggtatttagctgggaactcaagcactccgctttctccttaatggtatttctcaagaaggaaaggttataattaccaaagcagagttactatgaacatctagacaaactaaaggaagcatttggaatggtaagtacccaagatatttctattactagaaattatggaaaacgatgacaataaccatttctatggttcatatacttttctttaatccggtcgatcacatcctattataaaaaccacccccctctatagatggggggtggcatcgataaacaccgggta

SEQ ID NO: 425422 - DNA, 228 bp, Homo Sapiens
gttatcggatgccacggccaagattctcatttatctgggcaggggcatattccatctctgcagcaaggtaaagcccggggggctagaagttccttcacagaacctaggtgtcagccagtcagggatatggtccgggggcttcccataaagaaagctaaatcttggcttcgtgctactccggagcatgcagtttggattttgggggcatcgataaacaccgggtaccgg

SEQ ID NO: 425423 - DNA, 354 bp, Homo Sapiens
tcttatcgatgccacatacagacaactgtaatgcagtgtgataaatgctgtagtaggaggcatggagggtgatgcaagaatagaagagggtgttgagggtggctttctgcagccagtaattcttaagctgagacatagaagaccacataggctgtagccaggcagagaaggggaatgaagatatttggggctaagaaaatgcaggtaacaaaggtctagaggtctaaaatgcaagagttggtaaatttggcgagacatgggtaataacgggtaaattaccattctgtcactcttctgacaatgccacccacaatactgctttgtgggtggcatcgataaacaccgggtaccgag

SEQ ID NO: 425424 - DNA, 485 bp, Homo Sapiens
tatcgatgccactcacctcaaatagatgttctaagaataatatgaaatggacaggtgttaaaccggcctaacaaacccggcaccgtactaaaggttagctgaaagggaaggtaagataacctagggctttacaaaaggtgtaccttatagcaagtgcttagtattaaatgaatgaatgatgcttttcagtggctattactcggtgatccttaagccatacggccttactacatccagttttttaacggtggaaagacaagaaccttttaccttcagaagtgcttcaggattcgtaaaacatgttaagtatccggacactacaacttcaagaattatacatttataatatcccaccaataaacatctaaccataaacacttcagcagcatctaatagccacctatcggcctaaatgatttacacatcattagaaaggtattcgggaaatgaagaaggcagataggtggcatcgataaacaccgggt

SEQ ID NO: 425425 - DNA, 336 bp, Homo Sapiens
tgcaccaaattcagggcagcttggtggatgctggcatcgtgagtgtccattgaggttggtgatcatgaatatatagtgaagtcagtcagctgggttatgtgatttttcttcagcaacattcagctgatggggcataggcactagaaaaggcagacaatgggatttaaccaggatgggagtggtgtcaggtggcagtgatggagaggacaaatgatggagggtattggcaagggagagatggtaattatggaacacggcatcaaaatgggacaaagagggtgcagaaccggagtgggtagataatggaaaaggggcatcgaaaacaccgggtaccga

SEQ ID NO: 425426 - DNA, 428 bp, Homo Sapiens
tatcgattgccacctcatcacttagaaaaactaaagtggtatgtagacaatcacactttgaatacattacccaacagggaacacagggttcaacagaaaaagtgaaaggaaactccaaaatctgggaatgagaagaaaagcagacagccggtcgtagtcaagaccggctgggaacgggcaatgaatccctaagagagagtgagtgagtatctttctgcagtccactttcccactggggaatcatacagtccaggccacagcagagcaccctgacccacccaaatcctgaatctgatttagggagcatccaagagactgtgagaaggaactgcttcaaggaggcaacatgcccggggtcccacacaattcctgagaactaagtagccacagtaagatgcgattcttacggtggcatcgataaacaccgg

SEQ ID NO: 425427 - DNA, 269 bp, Homo Sapiens
tgccactgggaatacacatggggggtatagtctgagctgatatgcatgaaaggcggcctctcagtctctcttggagatccccggataatgatattaaagataatttatactaaaggaatttctaaaagccagtctatatgtaacttatgggcactctgtgcacaatataattttgttggtagtgggacactttgtctcagacatgtgtggcaacattggaaagaccaccactaactgaagtctacagttagtggtggcatcgataaaca

SEQ ID NO: 425428 - DNA, 569 bp, Homo Sapiens
  misc_feature (49)..(50): n is a, c, g, or t
gatagccaccgtagaactatttctttctacggggattttgttctgcctnntgtgtgttttacttggcctgtatgcttttcttatcttttctagtttactagtcatgtatcctacattttagatgccttttcttgatatcatttaattttaactttatgtaatctatttaaaaatttttctcagaatataaataatagttgcagtagtagaactaaaggtagtgtcagaaacagtagggtggtgcctaccatgttatgttagtgaccctgtgtctttggtttagggatctagtggaacatgaccagctatccccttttgcctgagataccctcagcttttgatcatcactactgagtttttacatgttttagtgaaactatgaattactcaaatgttgtgatttaaaatgtggaagataagctgttgatatgctagttcaaaaagcaattcaaactgctatgtggcatcgataaacaccggtgtttatcgatgccaccaggctaatcgaatttataaaaagaaaatctttcctccttttggttaaatccctttgcggttttctgagcgcg

SEQ ID NO: 425429 - DNA, 478 bp, Homo Sapiens
  misc_feature (462)..(462): n is a, c, g, or t
tgccaccttaacgaggcggaagggacaaagaagtaccgtaaggccagcggttaaggtggaaggtagggaggagcaggagagagagaaggtggatgcaggcacggaaagcaatctgtaagtttgacagagatggtcagcaagagtgactctttggagcagtattgtgaatgtcaggtcaaaggatgtcggtcttctgtgtccaagttttccacccctgccatgagtgttatagctagggagaaacaacgtgtaaactcctgctatttcttacttggactattttagtgatctcttactaatggcaatgtttgccatttcttcccctgtggcaagctgtgatttcttctatttctaaccagttctttatagaactggtaggacttatgtttgatagattccttccgtatttaaaaaatttcatcgtgttccattgcctgtggaataaaacccttgcttcttgtngtggcatcgataaaga

SEQ ID NO: 425430 - DNA, 391 bp, Homo Sapiens
  misc_feature (184)..(202): n is a, c, g, or t
  misc_feature (210)..(300): n is a, c, g, or t
tgtttatcgatgccacaatcgttttaagcagattggggcatttgtgggatttattatagagggcaggaaagactggtgggaggagataaaactttctttgtcgtctttcacatttttctcattgcatacctttttttacctatacttatcccacttgcagcttttcaacacctttacttaagannnnnnnnnnnnnnnnnnngtagagcnnnnnnnnnnnnnnnnnnnnnnnnnnnnnnnnnnnnnnnnnnnnnnnnnnnnnnnnnnnnnnnnnnnnnnnnnnnnnnnnnnnnnnnnnnntgcacctggccttctacttttctgcgagcctcctgaagtttccacacataaaagaggtcttggaatactctgtagcacaatacaattctca

SEQ ID NO: 425431 - DNA, 318 bp, Homo Sapiens
  misc_feature (13)..(13): n is a, c, g, or t
gcacaggtatgtngtcccctctacgtgtccatgtgttctcatcggctatagcgagaatatgcggtatctggttttctgttctgcttattctcacttataagggagaatctgcagaaaaccagcagtatctggttttctgtttctgtgttactttgctaaggataatggcctctagctccatccaagtccctgaacaggatcccattcttttttatggctgcatagtattccatggtgtatatgtaccatgttttctttatgcaatctatctatcattgatgggcatttgggttgattccatgtctccgctattgtgaa

SEQ ID NO: 425432 - DNA, 222 bp, Homo Sapiens
  misc_feature (116)..(116): n is a, c, g, or t
acacacgcatgcatgtgtctttgtaacacaacaatttatattcctttgagtatatacccagtaatgggattactgggttgaatggtatttctgactttaggtctttgtggaattgncatatcatcttccacaatggttaaactaatttacactcgcaccaacagtgtataagcgttcctttttctctacaaactcaccaccatctgttactttttaactttt

SEQ ID NO: 425433 - DNA, 122 bp, Homo Sapiens
gaggatcacgatgtccggtgcataaccctcacagtaatgattgctatgtgagacctatttgagatgtattctgatagcagttgtcaagtatacacaatacattatgctaagctgtaggtcac

SEQ ID NO: 425434 - DNA, 386 bp, Homo Sapiens
atgtcgtggacggagggacacagagaggagttgtgaaatcatcctctgaacatatgaattgagggttcagtgagacatctaatgagtatttctagtgagaaattatatgaatgtgggactggagttaagagggaaaccgacggtgattttggaaacaatggtatcagaatcttccagccagaatgagactaacggaaggggaacatgggcatttgcaaagctctggccagaggatctgacccctttctccctatccacccactatccaccttggtatcagacaagtctccattcctactgccaagggtatagtgggcatagatatactccagagatcctaggttaaagttctggaaatactctccttaaataaattagattatcta

SEQ ID NO: 425435 - DNA, 239 bp, Homo Sapiens
  misc_feature (59)..(74): n is a, c, g, or t
ccccgactagcccgacatgttccgacggacatcgtgatcctcgaggatcaccatgtccnnnnnnnnnnnnnnnntggggatgaggtgataggtgagtgggtaaactaagtgtttaggttccttctcaactcagacatttctgatgatgatgtcctaatgcagggatggtataacaaaatagatacaacatgcatagtctggcagatgaggaatattttaaatagctaccaatcatttag

SEQ ID NO: 425436 - DNA, 396 bp, Homo Sapiens
ggatcacgatgtccgtataaagcagcaaacccatttacagcgtttagtagtttattttaggatgctcagaaaacattaaaaattgatatagccctgtttgggtcaaaaactgtacataaccagatcgaggtccaagagactatgatgtatttcttggcttctctcaagatctctgggtcccctaaagcagatttgactttccaggaggttcaactatatagaacaattcttgaatcatttcgagtaatttggaatcagactactttacaagttcctacagtacagaccctgtcctcatctaagaggttgaaggttcatggactgcgttaacacttttgtcaaggttacatctaacaggactatatccgttggctataaaatgccaacggacatcgt

SEQ ID NO: 425437 - DNA, 388 bp, Homo Sapiens
ggagcttatattaatcgagccttagtgtaagtcagacacggttatatgtactttacatgtgagccttagtttctataaggtagtacatgtgggttccatgacgacgaaatgacttaattcaacaacagtataaaggatggtctgatattatccctgttctacttgtgaaaaaaccgaagcacgagaagctgaaggaacttgtgcatgttcacacaggttaaggggtagatctgggattccttgccaggtagtctagctttctttctggaacacaggtagtgagtccttatccagtgtgattcgcggatccactttatttctcctctcactccacttgattaagcaggggtgtcttccactcccatagattcccgggttgcctgtcggg

SEQ ID NO: 425438 - DNA, 426 bp, Homo Sapiens
  misc_feature (349)..(349): n is a, c, g, or t
gaggctcacgatgtccggtaggacagcagagaaagctttcagaggggtagacttgcaagctcatctaaaccaactccttcaaaacagactccaaatatttcaccctacaagggatggggaactcgggaagacgggcatcagccgatatggctgaacagacggcaggttgggaatccaaatgtgtctacaaatgttcacggatggatggtcatttggttctccccacattttagtttggctcattttacagcccacagccggtcttgtggaataaatgatacaagcaattgaagaaggcacactgtgcaccatggggacgactcaggcaatctgcagcggtggtccaggnctactcagctcagcctcagtcacctgcaatgaaaaccacctctggccatcagagtcaatgatatagacggacatcgt

SEQ ID NO: 425439 - DNA, 622 bp, Homo Sapiens
aggatcacgaatgtcgtagtcatagatattggaatgactatttctgccaaaatctctcagtttctttagttgtccgaatggtttttattcagcagtgaatagttaggtgttaacaggaaaagtattaacagaggctttacatcaattctgaaaaagattttttcccatagtagaagaatcagaataggcagattgtaatcctgaccctctgtggcatttcagaaaggctttgaagtcattggtcttagtttttctctcctgccttcagtctctggtagttgaaactccggagttccaagaattcaatttatgtaattggcgatgacttcacacacaatgattcagagactcaagctcctccatcttgtggtatttaacctcctttaggtccttgaagtccattttgctcagtcaacgaatgggaaaagataattttagaggtgacttgtatggattaatcctgggagacaagtgcatcagttttgctcaaattccatggaaacacaaaactaactgtggcaggcaaatatgctctagctctcctccccagacttcaaagcaggggctgtcttcaatattggcagcagaacaatgctcaaacgtttgttgcccttggtacact

SEQ ID NO: 425440 - DNA, 495 bp, Homo Sapiens
gaggatcacgatgtccgtcttccagcgctggtggaagacggaggaatgcttgagggaacgtttattgcatgctgaatccagagctggaaaccaggtttgagccaatctaggcacgggctccctgagcagggcaccctctgtctctccacctgatgggttgattagactcacagagaaaggaccgtcttacacctggaaaatcaaaagccaggggcagcctgaagacacgctggtcatgccagtactctaggggctaggattgctgtctcatgacggtgcttggcccgagaaagcacatggagagtttttcgtcaagaagtgttacctcttttatggagatgctcacagactgggcatttcactgtcccctgtccctgagacacagattctttttctgaaatctggtcaaaataaactggcgatgttgctgcagccaagctggcttactctgggcagtgccttttttctcacggacatcgtgatcctcgggtaccg

SEQ ID NO: 425441 - DNA, 155 bp, Homo Sapiens
  misc_feature (11)..(11): n is a, c, g, or t
aggatcacgantgtccgtgttctgtcgggctagtcgggggaggatcacgatgtccgtccttatcataatggccttcctcaaggtcaaacttttcccaaatgtcttcacttctccaaacaagaattactcctttctattttgaaaccctgtttgtt

SEQ ID NO: 425442 - DNA, 187 bp, Homo Sapiens
gtgagagaagtatatggaaatctctatcttaacctgtacatctagaagaacattctcccttgcttgatgaaaaactgtacacaaaagagggtggaagagtcctgaaatcatagccaccaaatagtgaggaccgggcctagaggcaaaaagataggggacatgatggaggagaggatagaagtagaca

SEQ ID NO: 425443 - DNA, 333 bp, Homo Sapiens
tactcgaataggccgacagtgatgggactggtggactcggtgtaccatgtgtgtactcatccagacgcggagtcagtacttaatgtgatttggagcccaggacgcacggtacttctagtgtcaccgtgtgggtcactgtctcgggtggttcttactgatttgcacccgggacgcaggcactcgctgtcacctgtctgtcactgtctcgggtggttcttactgagtttgcacctgggacgcaggccctcgcggtcacctgtctgtcagtgtctcgggtggtacttactgagttgcatctgggacgcaggcattcgctgtcgggctagtcggggg

SEQ ID NO: 425444 - DNA, 158 bp, Homo Sapiens
atacgatcgagctcggtaccgccgactagcccgacagcacattgattttctctagttaccttttatgtgtgtctttatctgtacgtgtaactattattcagttgaggtcagtgaccactttttaactgtaggttttttcacctataagagaaaagaca

SEQ ID NO: 425445 - DNA, 286 bp, Homo Sapiens
cgatagccgaagccatcgggctggtaagatcggtggggacaaaagagaggcagtggagactgagcagtaggtttttcagtgttcagatgaagagactatgagcacgaggaatggaagagagaccaagaggaggagttggagtcaagaaaatgtaggctataaaacgggtatgactgggtcatggaacaagaggtggggagtagaacctgtcctttttctcatctttcatttttggacgtgtcctttctaagagaaggctctctgccgcctgtcaggctagtcgggg

SEQ ID NO: 425446 - DNA, 304 bp, Homo Sapiens
tgtctccctggtggtgattgaagaagtgaagctgggagtactgtgtgaggtgatctcggtggtggcgatggaagaagtgaagccaggagtattgtgtgacgtggtctcagtggtggcaatcaaagaagtgaagctggcagtactgtgtgaggttgtcttggtggtgtcgactgaagaacttaagccgagggtattgtgtgagctggtcccggtggtcgtgatcagagaagtcaaactgggagtactctgtgaagtgatcttggtgctggcaatcacagaagtgaagctgtcgggctagtcgggg

SEQ ID NO: 425447 - DNA, 542 bp, Homo Sapiens
atacggtgatatttacaaggggacccagcagatcagtgatcagtgctgacttaagaagtggtcactaggttgagtgagtgagcctgtaccgtttatatggtgcgggttactcctggatggggatgtatagaagagtaggagttaagtactgaaagcatggcccccagtatctattagggctcagactgttcacttattaaagatcagtttctcccaattaaattactttgttagagggaaaattccccttgtctccccacagtacccctattcttgtaatgaagtaaggaactggtctagtgtcagtctgctttggggaaataatgggtttcttctagctcaatcaggattattctttaggagctgtttttagtatttattacaatcccatttaaagtgaccagcttccttgcaaaaataataaagagcattctttggtatcaggcactgatgtgtctttggctccttagattgggcctgctatttggcagaaggctcctgagctgctttatgtgtggggccatgagttttgcttgttccgc

SEQ ID NO: 425448 - DNA, 318 bp, Homo Sapiens
ctctggagtcgtcgtcgaacctccgacttctgcgttctagattaatggaatacaccagtgcttgggataggctttgggtctaggattaaaaatgccctagcgcaattcttagcataaggcacacctagatcccgttatccccatatcgtagtgatgtagtcgaaaccatcaggctactcattcaagcaatagcgcgggacgtacgccgtaatcgctaagattactgcaggccagctactcatgcacgtaatgggaagcgccgacctagcagatatcaacattaaccttccctcttacatttatcatcttcagaattct

SEQ ID NO: 425449 - DNA, 390 bp, Homo Sapiens
ctcgcccaggcggctcgtttgaccaggttcttcggagagaactgtgggaggtcagatcttataccgaagctgtacttcccgtgagtcccgtgtcatagcgttcgggcatcctccttcctgcggggagcagctggtttgaccctggactctcacgagactgcgcctggagaaggacgggttctctgtcaccctggactgtgaacgcacttctccccagaggaactcaaagttacggtgttgggagctgtgcttgacggtgcctggaaaccactgacggacgcgccaggatgaaccatggtttcctctccagggacgtccgcaggacataccggatcccagctgatgtagcacctctcaccattacttcatccctgtcgggctagctcgggg

SEQ ID NO: 425450 - DNA, 191 bp, Homo Sapiens
gttcccccgatagccgacagacactcaaactcaagctagtgaatgtgaactcttctcttgactaccctatattctccctttgccagaaaagaacttcaccaattgtgctgaaacaaaaatctgctaatcatgtgagattcctctctttccttcaaggtcccctgttccctcccctgtcgggctagtcgggg

SEQ ID NO: 425451 - DNA, 403 bp, Homo Sapiens
  misc_feature (144)..(198): n is a, c, g, or t
  misc_feature (274)..(274): n is a, c, g, or t
ttgcagtcgtttctactctgtaacctggagtaatttacttcacttcactgttttttcctctctaaaaggggacggatgaaagccaatctcatgagatctggaggaaccaatgagacagtaggcacacggtgcccgctgttgttnnnnnnnnnnnnnnnnnnnnnnnnnnnnnnnnnnnnnnnnnnnnnnnnnnnnnnntaagcccatttactttaggctttacggtgccttttctgtgccacagatgtccgtcatgtgtaaacttggcgagacnataagcagtaccagggtccagtggtactctgaacaaaaatggactgtgaagtattaataaaaacgcttagaccgaatatttggcatatggtaagcacgaaaagtgtgagatgtaagaaataataaaata

SEQ ID NO: 425452 - DNA, 455 bp, Homo Sapiens
ctggacatggacacgctatggcagcaaataagccaacggagtaggacatgcccatagagctccgcggtggggacaaggaagagtcacagcgaaaggtacacagatcacatatggtgaagcaactatagcagaactttagatgccatctggacagctaagagtgacttactagtacgatgcaggcagatggatctctttggacttgagagaagccaaaccttctggaaggaggatctccaaaatcaaagccagaggttgactagtaggctgtagccacatcaacacaatgcccgttgctgcacacctttccatctgcacattttagttccaggaagaaccattcccttatgttcatcatcgttggaatagaacatcttgcaaggattattttgtccaggtgaattatcttagcagtataaccaggcacatattacatcttctggtgcacatggaat

SEQ ID NO: 425453 - DNA, 234 bp, Homo Sapiens
  misc_feature (85)..(97): n is a, c, g, or t
  misc_feature (99)..(108): n is a, c, g, or t
gatagctgaagtgataaaaacagacatacagcaagtgtaacagaacaattgacttatagcttgtgatttactcgggtacttgtannnnnnnnnnnnncnnnnnnnnnnttacgtctcatgaaatgggtcacattacccactaagggataatgattctcaaagtgagtcactagtgcggagaaaagtgaatgggactgggccagctgggacaacacagcgaggccccatttcttt

SEQ ID NO: 425454 - DNA, 587 bp, Homo Sapiens
  misc_feature (555)..(555): n is a, c, g, or t
aggctcgggtgtgcgaagagagcaccggggctgaacgggccggtttgctgttcaggttacgtggaaacctccaacgtcacgtggcggaagagctggtcaacatgatccagactcagcgcgcttacgagatcaacagcaaagcggtatcgacctccgatcagatgctgcaaaagctgacgcaactgtaatctgtcattgacgggcccggcttgccgcgcccgtcattctctttcgtgaaacaaaggcgatacccgtggtaaccacatattcgatggcaatcctgccgcggcagggacaacgctggctggcgggaatggtgatgctgacgctaagcggctgcgcctatatcccgcacaaaccgctggtggacggcgcgaccacggcgcagcccgcgccggccagcgcgccgatgccgaacggctcgatcttccagacggtgcagccgatgaactacggctaccagccgctgttcgaagaccgccgtccgcgcaacgtcggcgacaccctgaccatcgtgctgcaggaaaacgtcagcgccagcaaaagctcctccgncaaaggcaggcgcaaagggccagcaagttcgg

SEQ ID NO: 425455 - DNA, 245 bp, Homo Sapiens
gggggtctgtaaagccagcccgcagttataggtcggcttagcagagtaacgaattaaatcaggtggttcgcttccagccaatcacccagcatacgatgccggcggcatcatccaggcgggaaacacctcgatttgccccagcagcaacagcgtaccgcttactaacagtgtagcgccaacgccgaacaaataacgtgactgcccctgacgaacccgctgagcctgcatttggttggtcagcttat

SEQ ID NO: 425456 - DNA, 119 bp, Homo Sapiens
ggtgtgctctgatatagaagcgtagacatgcagctaaagccagtgcctggaaaactatctttgcagagcatctgtggacaggtgttctggaacatgctctgggagacatggttgtatcg

SEQ ID NO: 425457 - DNA, 322 bp, Homo Sapiens
acaggccagccataacacctggcagatcttcctggagcccgcattttactggacatgtaaggggtagcgcggcttcaaggcaaccttttaattgatccttgcgaacagttatgtgtgaaatttactgccaatctgtactggagtcgactacaacatgtgtgaccgaaatagaatgccagggcgtgcacgttctaaggtaaagcttgggatgtcagacaaattttgcatcccactgagtgtcatttaagaccacatctccattcagctgcctcccattcccagaatctgcggtcacggtcttcggtggctgtcgggctcgggg

SEQ ID NO: 425458 - DNA, 222 bp, Homo Sapiens
taagagtctgaagtcattgcagcattaactcaaaagtccacagccgtaaagtctcatctgagacaaggctagtcccttctgcctatgagcctgtaaaatcaaatgtagttagttacttcttagatgcaatgggggtatagttattgggtaaatacacctgttccaaatgggagaaattggccaaaatgaaggatctacaggccctgtgcattgtcacaatct

SEQ ID NO: 425459 - DNA, 187 bp, Homo Sapiens
tgtgaaatctccaattgaaaaggtatgcaaggattttatgtttgttgtttattattgtgttcacacagtgcgagcccactaccttcatggaatatcacgataagcgcttgcatgagcatgccactaatggcgaacgggggtatttccacagcatcagtatttttcccaatcccgtctccacttgatg

SEQ ID NO: 425460 - DNA, 314 bp, Homo Sapiens
  misc_feature (254)..(267): n is a, c, g, or t
tagcgatcgaatcgagccggtaccctcgcgaccgtgttatccgacgatgcacagtttcgttttctacttcaattagattcctgtgtgttcgacacagcgaacgagatgatgtagtcagtcagtgaagttgggcaagagaaatggaacaacaaaggcgtgattctcacttggaacatgtgactgtaataaagtaaccagcagttcatgttatgaaggaaaatatgggtaattggctaagatggcattagaacacnnnnnnnnnnnnnnaaaggggcggataacacggttcgcagaggggagatcctctaagagtc

SEQ ID NO: 425461 - DNA, 525 bp, Homo Sapiens
ctgatacaacgtcataagcttcaagaactgtcgcacccaataacactttctctgaaccgtacattgggtgttcctaactgaacctctagagtctagcagactgtagatgatactcttaggccctcacctcgcagctaattgcaaattatgtttatggtggatttaaactgtagagcgtttaccctcccgttctgaaaagatagtcaagtagacatcttctaacccaatgccagtaagcagatgcacaagtgacacatccgtgagcaatccatgctcaccttgttctatcccgcatggcctgtggctcatcacacatgggaacgtactaagtgcatgcttaagaacccatgtaatccactctcatatttccttttctgttctagggtatttattaaaaacgcttttcatgaactactaacttgatttcaagacccggtaacaggttgaaacctacagtttgaaactagggcagggctgtgtcagggctcgtggtcaacatcggggtcacaacttcagttggagggc

SEQ ID NO: 425462 - DNA, 386 bp, Homo Sapiens
gcgaaatcagaaggcaggtttcaagtacagctggtcagagaaaggatcactagtgaacagaccacccaaaggtaggaaagagcccagggagacaagcttaggcgaagaggactcgcgctttggacctaagtgtcaaggtctgcgccgagtgcacagccctcaccttcgggatgggctgacctacacaaggtcaggtgagagctttcatttataaggtcccccagatgatcctaatatgtagtcagattgagacccagtgttctaaaagggccaaaaagacaagggaaaaagggtggatgagtcgttgccaaaaagtgctggtaaatatcgtttctcaagaggctcattcagttcatgagaacgcccaagccagttggcaaggacag

SEQ ID NO: 425463 - DNA, 669 bp, Homo Sapiens
  misc_feature (93)..(169): n is a, c, g, or t
  misc_feature (473)..(533): n is a, c, g, or t
ggcagtgtgtcagctagatgtactacacatggctacgaaaacccgagctaccaggaggatgaggtaggaggacagcttgcgccagaagttccnnnnnnnnnnnnnnnnnnnnnnnnnnnnnnnnnnnnnnnnnnnnnnnnnnnnnnnnnnnnnnnnnnnnnnnnnnnnnttataataatgataataaattaattgtgcatcattcaagtaacttgtataactggaaaaaagcataaccattgaatatagtataatagtataatagtataactactgatcatagagttccttttacttgcccctaatcttttcatttctcataagactaaaacatggttgacccattcaaggcagttcatcacagaacaagtcaaaaagccaaaagaatggcatgcaagctgtaggctgtgttatccactactccctgcaagcaggggattcggtcattaacaatcagcaggacttttaacttnnnnnnnnnnnnnnnnnnnnnnnnnnnnnnnnnnnnnnnnnnnnnnnnnnnnnnnnnnnnncaactatgacagataaaaccattttgcttatgtaagaatatgtaacataacttgtgcttctcacaaaggaattgcttactgttatctgactcagtaggttcttcaaaaataactcctatcgaatggtgacctgggt

SEQ ID NO: 425464 - DNA, 483 bp, Homo Sapiens
ctgtgtagaagggttttctcttagcctagacggtgcatgtggaattttccccctcattctacttacctgtctaagcattcacaaaatcatgaagagtcacaacaatcatgttcaaattatgaaattgactgcctttcatgaagcatagttttctgtgacttcttataaagcagcacatataactattcttatttttaacattagaaaattcattctccatgcattaccttttcataagaaatcgtggatcgctattccgtgttctcacaaccacatcccaggaagagctgccatttaggaagaacactgtcatctgcccagccctgtgctatgtccatttcacttactcctctcaggaaactatgagacaggtgacagcagcaaacagagacagggttgcggtcatggtacggtaatgcacagttgtatacttttgtgtcgccactgctgtcattttatatcacaggcaacttgaggtgggac

SEQ ID NO: 425465 - DNA, 474 bp, Homo Sapiens
tcgggcgatattgagtgatgatgcccttttgctgtgggtacaattgaagtcttcaatctaacagatttaaatcaaagtctgcaccccaaaacacattcgtctcaagcacacaggaatcattacaaaatctgatgatttactatgcacaaaagaagtctcaaccaaacccagggaatctatgtcattttctgagcttgaggaaaggcagccgccagaagtcgtctcttagtaggttccctcggactcttttcactaacctgagctcactggaatgatctagaacatgtatatacgtcccgtatacgtgctggctaacctggctagttgtgctttgtatctagcacgtaaatagaactctacaaattgggggtagaatgaaatactgttcagtgcaagacttagggctatctttaagaagtggaaattaagctaaggttaacattgtctactttatgagaagattccagtataggt

SEQ ID NO: 425466 - DNA, 469 bp, Homo Sapiens
tcgtcgaaggtgtgatcgccgccgggagcgttagaccctccatggtcagcaggcatgcatgtctgggaggtctgggggttacagctgggattaggaggggcagtccctgctgcccctgacttacgaacgacacccacccggcggtcagagagactccccccttgcctaacctctcccttcccaaatacaacactgaggaatttctagggctcccaggccacttaagatctggtaacccctcaacagaaattttgcttctctatctcacttgtgacctataagcagggagtgcagatgcctgaagctcttttgctcttttgcatggtcggtgccctgcgtcttagaactaatttacagagtttaacgcatctaatcactttctacagtgttttcaggtaggaaagtgactgcacagggcaaaattaaagtggggaaatagggcccaacccattcagctaaagaaatagac

SEQ ID NO: 425467 - DNA, 597 bp, Homo Sapiens
tccctcctatggtggccgagtgctgtctgttgagatggtggctccatggttgtgaagatgggaatacgacagatgtcacagtgatcgtccgctgtgaccttgtcaatgccttgttctttgctttccccttcacattcacatttgcatcaccggggagggggaaaaaaggcccaaaagactctgaacgccgtgggtgacatcttgaaagctgattccatagccaaaatttgatgctcagagctggtgtgagccgtccattggagaaatgtgttcctggccaggacagtggggatgagtgtagagttgtccttgaagatactcatagaaggagatgtgcttgcatcgtgaagcaacaggtagccccacagctgaaggggtgaagttctgcattacatttgaatccctgtccaaagctcaagttctcaagcggttcctagaaggaccagtctccaggaaaccagtgagccttaacaccaggtggagtcatggctcagtggggcgagatgcccgaagagatcattgcataactgtatgtgttcgaattgagcagacttgtgcatatgaacaacaactgcattgagtcttgagaggtagcct

SEQ ID NO: 425468 - DNA, 603 bp, Homo Sapiens
  misc_feature (471)..(471): n is a, c, g, or t
tcgtggacggggactgagccctctttttctctttgagctacctttccacagtcaactgcacctcatcctgaaggtcctgtcccttctcttagcccccatatgcataatgatcgatgatcattctatcactcatcctaatccccgggattactcacattagctcactacgacccccgtctcgttttctttatttcctatccctacccctcagatgtcttcatggcttaattagctttatccctcagttaacatcatctcatgacagtacttcttacccttcatacagccctggtcacctctcttagaaactccctcactctaagcccctatccaatcatggagttcccaaccccgttatttatttggactaccttctaagacactcttccctctgtatctacattggcttgttttcttcccatggcggaagcatcagtagggtaggtggaatccttttcggcgggccccagnaacctccttctggccctcttctataaccctcaaactctttcctttcctcacttaatccgctggttctctgccagttccctatctttaagctgtggctcggttccttcttgaagcttcaacttctctctaaac

SEQ ID NO: 425469 - DNA, 375 bp, Homo Sapiens
tgatcccttccccagaaaattagctatcatttcaatgtatctagaaaatctttgctattaagattttatcttttcttcactctgttttgatggcagaggtaagcagcagcaaagtatccaaaaaaagggccacatataatcgctaactgaaaacccaggtcctagatcactgaaatactatggtacttcaaagttcgttatttacatttcttttggttatctgccaacgtgaaagaaacatcacattacttaaaacctccactgactaagttatggtccaccaacagtttcagatggctttccgattggttttcatgttacagagcaccaataaggtacagatacaatgaaaagtgctaaggaagatctttgacc

SEQ ID NO: 425470 - DNA, 397 bp, Homo Sapiens
agttgagtcgtacgtatcttacagtcggtctttggtgtagtacatgtgtaagttacattttattatggaaatgatattagtgaaattgacagctttctatggttaaagattatcctgtaggtgagccaaggttctctgtttttctgatttctcttattcattccctataatttcagcattttcgttctcattgacttaatattcctgagggtattattgtgaatgtctttgtttatgttaactccatacttcaatactttatgtagttttctaataacaccttcagtatgtgttctaatgaaaattttagcagagcacctgccctttctgggtaggtaattattttttttggttatgaacttttcctatgccatttgaatttctgtgcccatttcaa

SEQ ID NO: 425471 - DNA, 445 bp, Homo Sapiens
tgtaagaaaagtcgtgattattacagattcattcagtagacgatacagatacatacatacacagagctgtccatagactattgagttagcaatgatacatatagtaaatctcaagtaataataataaagaagatcagccagtcatggtaggacagatgtacttagcttttccacatatatcttgtaaagatgaagtaggggacacacttagaaaactgggagaactgatgaaaagtacccagttctggctacaggctctgattcttcctctagtgcagttggagagggagcttgtttactgatgcattcccagattcacactgatgctgtactcctagggttcagtctctacggcaaacagtctgtcaactgttgtgtggtcaaggactattggaacacgtccttggccatttgtagggcagcatattagcttgttagtatggga

SEQ ID NO: 425472 - DNA, 483 bp, Homo Sapiens
  misc_feature (289)..(320): n is a, c, g, or t
ttcaagaaaggcttataggatacctagaataccttcatgtatgtggcttgatttctgtttcaggaaaaggggggcgggaggcgagacaacagccgtgttccagagtctgtcctgagatgtcgctgagtccagacactggggctgcacgtgccctgcagatgacaaaggccggcagttcagcacacgtgcaggaggggttaaagccaatattgagttgtggtacttgtagtgataatctgaacgattattctcctgtaaaaataattggggaggggcgggtgtggtacgnnnnnnnnnnnnnnnnnnnnnnnnnnnnnnnnagtatgtgttatatagagtggcgcgtgtctaaagtatgttacacaacatgtgcgatactcagcgcttaaaacagcagcagtgtcctatgaagtgccactgtcagttctagagcctcgggtgcgaagtcctggtcatgtcaccttgcgtgtcacaccccgggag

SEQ ID NO: 425473 - DNA, 520 bp, Homo Sapiens
ataaagacgatctatggaagatacagtctcggcgagtggaagtcatgattaacattctagtccattctgtttctagaaaatttttctgtaaatatattacatagagaaaataatgtcctagttttttcacttggcatcataacagagcattttccatgtaaattaaaagtcttcatatagattgttttaatggctgcaaagtatgctgtgtagtggacatatgataatttacctaaccatgttcccactgtgggtcaacaacagaatggttcaaattgtacattatcttgtatatcacacggagcatattgaggctgaaaattgggctccatttgggatcctatccggaatttggcaaggaacttactatctagttcactatttgatatcaccagttcttggtacataccatgtactttctacacagaagagagaattgcatgtgatactcattgctgctggttggctcttcctttccgtgtctcttttggccaagttaacccactcttttctttcttaa

SEQ ID NO: 425474 - DNA, 385 bp, Homo Sapiens
  misc_feature (142)..(222): n is a, c, g, or t
tagaattgctcagttgagtgaaatcattctttggaaatccatgcgcagacccttctgtgccactgcatttgctactgaaatcaacccgtgataaagctcaggattgagagttaacctgggtccaagacatggtaccacttcnnnnnnnnnnnnnnnnnnnnnnnnnnnnnnnnnnnnnnnnnnnnnnnnnnnnnnnnnnnnnnnnnnnnnnnnnnnnnnnnngacttgacagtgttgctgaaagtgttaagaggacaaatgtggggtatagggtatttgtttggtgtttggtacacggttaagcacaattctaagaccaatttcttattaaactctaaagtattaggaaacgttgtactagcaaaattagggtaggtcgagaaag

SEQ ID NO: 425475 - DNA, 233 bp, Homo Sapiens
taagtgaacaaagacatttccatgggaaaaatacgagggcttaaagaagtactagaagtcgaataaagtcaagttaagaggtcggaaaagagtacgaagaaaaacaaatagagtccattcaaaaggttgcataatagaaggaggagggagataatcaggggataaaaacacacgttagatcacgtgtcgtatcttgcgatgtgatgctgcataatcatgtgccaaatctgaat

SEQ ID NO: 425476 - DNA, 166 bp, Homo Sapiens
acgtgcactccagcatcctcagaaactaagaggatactagagtacacagaatggcaaagaattatgcagattgtagaggacaccgtacattcctaggaggtcaagtccctgtgggtgatgttttcggtatggttggtctaaatggagcggctagaagtgtcttgtc

SEQ ID NO: 425477 - DNA, 378 bp, Homo Sapiens
ttggtccgtggtatgtgtggaggatactcatcagctcgagacatcttcgtgctaaaaggagaataggtcgcatgatctatccagccatctatcaagccacccaagccaactcatacttctgatttttcctcaccccaatatattcaactatgacagagacctgctagcgcgggctgctctgcaatatgatatatctatcgtctggcttcggccttagaccagcacttgatgacttaaacaagtacaagcagaggcccctttgtcatgcttctgccctcagtcttgccttccctattctattcaccagagggctatgagactgagctttctaaaacgcaacgctaatatgaccgcgtctccagtctggaagccttcact

SEQ ID NO: 425478 - DNA, 560 bp, Homo Sapiens
  misc_feature (76)..(134): n is a, c, g, or t
  misc_feature (146)..(286): n is a, c, g, or t
accgggcgcgcgcgacgtgttatcccaaggtggaatatctcaaagcaagtcaagatcagcatatgatcgtcagcgnnnnnnnnnnnnnnnnnnnnnnnnnnnnnnnnnnnnnnnnnnnnnnnnnnnnnnnnnnnaaaagtacctannnnnnnnnnnnnnnnnnnnnnnnnnnnnnnnnnnnnnnnnnnnnnnnnnnnnnnnnnnnnnnnnnnnnnnnnnnnnnnnnnnnnnnnnnnnnnnnnnnnnnnnnnnnnnnnnnnnnnnnnnnnnnnnnnnnnnnnnnnnntaagtgaacaaagaccattttcatggaaaaataagagggcttaaacaagttctagaagttgaataacagtcaacttaaaaggtcaggaaacgagtacgaagacaaaaaaataggccattcaacaggtggataatcgaaggcggagggagataatcaggggataaaacacatcttagttcacgtgtcgtatctcgcgatgttaagctcataaccatgtgccaaatctgactcatcactcagttggtaagcatcatcatatggtaatggcaggtca

SEQ ID NO: 425479 - DNA, 148 bp, Homo Sapiens
  misc_feature (107)..(107): n is a, c, g, or t
gagtagtctgtggtatagtactatatgactcgattttcagatactacaaataacttagaaaaattgagtcagactgaatagcatccttaaacacggcatttacaatngctagaaattagtaatgtagtctatcatgtgcgtttgaata

SEQ ID NO: 425480 - DNA, 164 bp, Homo Sapiens
cctagtaatcgagccggtacctcgcgacgtgtatccctgccttttatggtttctcggttagttgttccctcatttctcaacttagtcctcaagacttctgaaacgtctgtgtgccaggcacttggtgtgcctgataataccaaaagggataacacgttcgcgag

SEQ ID NO: 425481 - DNA, 583 bp, Homo Sapiens
cccactagatgaaagcgagaatgtggtgtctgtaagaagtgtatctctagcaattctgataagctgctaagcaaggtcgaaaagttagttataaagcattagtattacgtcgtctgcttatgggtagaacatgtagcccgtgtggctttggaacttaataagcctcctccatgaggatctaagtctgtaaagaggatcatactgaggataaagtgtattctgcagatgaaatttagtgtactgtataactctttcaatgacatcctcaatgtacacggctgagggcatgttaggggatgtcataagtgtggatagttgtgggagaagcatccgctgatgcggtaactctctccataataaggtctctcgataagctatcatcttcatcagtatcgtaataatgaggtagcaaagtggcaagcttagaaccatcgggaatattcttctcgaagatatttgagacgttcaggagagggtcagtcgaaagcttatccagttatacccatgggttatattttagcagattcactgcccagttcattaagctgatgtagcctaagagcagtcctgaggaattcatcat

SEQ ID NO: 425482 - DNA, 636 bp, Homo Sapiens
  misc_feature (357)..(357): n is a, c, g, or t
  misc_feature (475)..(475): n is a, c, g, or t
  misc_feature (512)..(512): n is a, c, g, or t
gatcgagctcggtaccgtcgcgacgtgtatccaggaacaaagagtttagaccgatatgtcaggtcagccagtggttcagggtatcctaacagttagaaccctttttcactcccagagtttctcagttgggctgataaattatgcgatcagacttcccattccagtcaagatggagcagcccaatttcctactagtctttcctcttacaacttaaaaacccgtggacgtaatgcaacaaacataggaaaatcgaaagatggacagaaggagaggcttctagggacatcaggactcgaggaacaacacagaggtgagttccctgggttttcttttatcctctcatatatcccagatggnacaatagagaagcctgcaacccggaactgccaataggtacaggtaaagaaacttgtccctataatcaaaggaccagaaaaagggcacaagaagaaccttttggataatgcttacccgnccaaaacaccaaaggaaaaactgtccatacccagcanctccaggtgtcagtggggctaagcagagagctgaatgtccacccacatgtgggtggcacaagctggggacgtaagtgggccttctgcttttgcaggaataatgtcaggcagggccatcagagaa

SEQ ID NO: 425483 - DNA, 489 bp, Homo Sapiens
  misc_feature (42)..(401): n is a, c, g, or t
tgtactgggacacttatatttcggactgactgaaagtgacannnnnnnnnnnnnnnnnnnnnnnnnnnnnnnnnnnnnnnnnnnnnnnnnnnnnnnnnnnnnnnnnnnnnnnnnnnnnnnnnnnnnnnnnnnnnnnnnnnnnnnnnnnnnnnnnnnnnnnnnnnnnnnnnnnnnnnnnnnnnnnnnnnnnnnnnnnnnnnnnnnnnnnnnnnnnnnnnnnnnnnnnnnnnnnnnnnnnnnnnnnnnnnnnnnnnnnnnnnnnnnnnnnnnnnnnnnnnnnnnnnnnnnnnnnnnnnnnnnnnnnnnnnnnnnnnnnnnnnnnnnnnnnnnnnnnnnnnnnnnnnnnnnnnnnnnnnnnnnnnnnnnnnnnnnnnnnnnnnnnnnnnnnnnnnnnnnnnnnnaacgaagaaaagaaaataatcacatcttacatcagtgagtccaactttccttttacaaaactagaataagaagagatattcaatttaa

SEQ ID NO: 425484 - DNA, 205 bp, Homo Sapiens
gaatagtagggcatctgatttggaaagtcctaaaagaagagaaagtgcaagtataatttcaatgcactcatccacagggcagcatcagggtcaagttcagtcaggcaaaagcatcagcaggtccccaaatctctgccccaggcaaaacaagcgcaaagggccaagcaaatcactgctgcaaaactatcttgcaaacaccagtgca

SEQ ID NO: 425485 - DNA, 405 bp, Homo Sapiens
  misc_feature (140)..(170): n is a, c, g, or t
  misc_feature (189)..(197): n is a, c, g, or t
  misc_feature (265)..(303): n is a, c, g, or t
atcatcgagagtcgactgtgggcttgaaaggtgtagagaaggccagtcgatagcataacgtcggtgagggaggtatcaaatggtgtcattgtggatacttggaatctcagaagaaatctcatcactaggaaatgatggcnnnnnnnnnnnnnnnnnnnnnnnnnnnnnnngagcagaagaaatatttgnnnnnnnnntggccaagaatttagttacagacatgaaaactccagaaccaagaagcccaccaagcatgatgaatatnnnnnnnnnnnnnnnnnnnnnnnnnnnnnnnnnnnnnnntgatagcaaatccccaaatataggtatatcaatcaaattcaaacggctgaaaattaaaatcaaaaacagtttggaaggcagtccaagtaaaaaaatacatga

SEQ ID NO: 425486 - DNA, 657 bp, Homo Sapiens
  misc_feature (388)..(388): n is a, c, g, or t
agatcgagtcggtacctcggaagtgttatcccaagtagtgctcaaaatagaacaagaaatgatatatataaaaatatttactaccaaatccattaatcctatcaaatgtaaaggctttaataatttaaaggagcaatacgtaatcttaataaatggaagttgattctcatattttaataaaataaaggagttgtgtactgatatgtaaatggtctggcagctgtcccataggttctaggtagacggaacaatccctttcgtacaacagtatgcctgacatgccatcatatgtcaccagcatattgatgattacattacatcgactagcagttaatgtacttccacaccagtggggattcgttcgaaattaaagataacaactcatttnggtattataggtattatatccacaaaaggcataacaggcagcaaggatccactttagagtttcggcttttgttttagtgttctgtcctcaagtctatctgcaggccctgtcccacataatgtgtgatctcggtatgttcttaaatgtatggccagtgccagagatactgaagacctccactttaagtcatgctcttaactggggttatttaccgcagccagttgttaggaatctttcaattgtgttccagtcatactccacatgtgtgg

SEQ ID NO: 425487 - DNA, 279 bp, Homo Sapiens
ccatttattattcagtacatcatcatcaaagatgctttcattagcagatataagtacacttgataattacatcttcaaaatacattctgaaatgttgatctcggtttttccttactttctgaaacgatatactttacatgtatattgttttacccgtttactagacccacattactcacatattaacacttttggtcaaacctaccaaccaaacgactgtaacctgcttcacatacaccttgcctactagataacttcttcctacgccatgccactctt

SEQ ID NO: 425488 - DNA, 430 bp, Homo Sapiens
ggatcgagccggtaccctcgcgaacgtgttatcctttcagacgatttattacacagttccttattaaaataaagtgggttacaggtacttcacacattctaatgcttttcttttcatttatctcaacatgacctaaagaatgtctggctatactttctcaatgccttacatgcagtctttgattcctgtagcaaggctttaagtgagcagtactgcaggtaaagcaaaaatgtggtgagcaaagctgacaccaaagctagtggttaaatagctacaagctaacagacatataatcaatacctaaccccaccagcaacattaaagcaaatgaactagtattttctaaatacctagcatagtacctattatatgtattttactgtacactgcagttccttttacaaaatagacaacatatttagtctttttt

SEQ ID NO: 425489 - DNA, 338 bp, Homo Sapiens
aactggtcaaaagctggcaaattagtgtaagctcaggaccggccgaacatcctttcagcattatgagattccagaaaatgtgaataggatgtttcagtggttaggtaatttccagatgcctttttttggtgctcagataattgaaagggcttcttttcaatacttcaggctggtcatgtacactatattagagtgtgtaacattttggaaggaattgggcacaggcatcgcttttccacttcggactctctaagttggaagagtgcctgccaggatcgttataaatacatcctaataaatatattttcaccaattttggaagttcccttttacttcaa

SEQ ID NO: 425490 - DNA, 436 bp, Homo Sapiens
caggggactagcactggattaagaaaacccatatagatttcatgtgagagccacaggaaaaacaaaacacatcatgtgagtatctgtaaatggtgggcaataataagtgtgtgctgagaattaacatgtcatgtttataccagatgtcaggtgtactgcttctctctctgagttgtcaaaaagcataatacagagagaaaaggtcaaagaatcctgggggatgtaagtggtgcttaaaggttataatgattgaaaaagatggcttgaagtctacatgtatcaccacttcagatgtcatttcatgtctcaagtggaaacagaataggccttcttaagagattggtgggatacaatatgtttcggcagtagagttgaaaacacactatggttaccgtaagcctgccagaatgggtcccttatctgaagatcatgatac

SEQ ID NO: 425491 - DNA, 141 bp, Homo Sapiens
cgggaacgtgtatcctctctcagtggggagccatatgaccaggcgagaggatctggaggcggaacttaaggggtgagaagagtaacagctcgtgaagtgtgacggccctgacttggatagtgtcgccgagaacagacaaac

SEQ ID NO: 425492 - DNA, 483 bp, Homo Sapiens
gattttacaaccaatgaacttacattgacacacagtcactcaaagtccatagtttacagtatcattcattcccagtgtggtacattttatggctttggacaaatgtataatgacgtgtatctaccatggtagtattacacagcatagtttcactacactaaaaattgtgctgtgtgtattcattcttccctcctccaatccccgggaaaccacagatctttttctggtctccatagtttggccttttccagactattatgtaatgggaaccagacagtacttagctgtttcaggtgggtttctttcacttagtaatatacatttatatttcttccatgcctttccatggcttgatagctcatttcttttaagtgctgaataatattctatggtcggggaacaccacagtttatttacccattcacctactgaaggacgtcttagttgcttccaagttttggctgttgttaataaggcttctct

SEQ ID NO: 425493 - DNA, 241 bp, Homo Sapiens
ccctcgcgacgtgttatccatcagacttggccagctgctctgatagtctttaagtcggcatggtatctgtgaaaatggcggggcagaaataggcgtggaatgtttacctaatgctcttccactaaatacccaaaggattctggaatgtgctacaagcagcatagctcctacttttttctccttctgaaaacagtactaaacaggggccgacctcagggtggtgggataacacgttcgcgag

SEQ ID NO: 425494 - DNA, 294 bp, Homo Sapiens
tgacgccgtgattatgcataataatattccctccactgcgtctttacatggtttgacgggaagcctggatttctggatatgagctgtagcagacatctcctcgtttgcgtggaataagcttttttaatcagtttatctaaagcatagttgatgtagacatttagattttaatgttgattccaagcaagagtcaacatttgcttggaatagcttttttaatctctttactctcagtctctgtgtgtggttaagtctcatgtgagtgtctcgttagtggcgccatatcgtttacta

SEQ ID NO: 425495 - DNA, 485 bp, Homo Sapiens
cgaacgtgttatccccagctatgtatgcctcactgctcttcttggtgttatggctacagtttcctcactgttctcctcatgccatgcaatttcacttggactttccaggctctgatgagaagttggaatttttaatgtatattggtttttaactgggcgtgtttagcgattatatgcttatcaatgccaacattcagcatcatgtcaattgcaggtcaagactcaattccactggtccacatgtcaagcaggattcaagtgagcaccggtttttctcctttgtcaaaagcaaaaatggtcatgagaatctaacacaaagtgtgttaaatgtaacataccttaatatatattaaagcataaatataagtgggttgcagactgtaagcaccacatgaagaaacacatcagaagttggaaatctcttaaaatatatccttgaaataaaattttcaagacccaatggcagatgaagaacgttacatata

SEQ ID NO: 425496 - DNA, 347 bp, Homo Sapiens
  misc_feature (182)..(303): n is a, c, g, or t
gagcgagaacatatggcttcctatgggctagcataagatttaataaagagatggactagttcagattccaatacaactaagctaattatttctgtgtcacagtacagttcctaactaactgaaattagttcctgataagaaactaaagctatttttcacaacaggtaagtcgatggcctgcnnnnnnnnnnnnnnnnnnnnnnnnnnnnnnnnnnnnnnnnnnnnnnnnnnnnnnnnnnnnnnnnnnnnnnnnnnnnnnnnnnnnnnnnnnnnnnnnnnnnnnnnnnnnnnnnnnnnnnnnnnacagtcgtggatagcctgaatattaatttctgtgcccatttcaa

SEQ ID NO: 425497 - DNA, 158 bp, Homo Sapiens
agggactataaatatcaatagttacatgtagctagatggcttccatgtctggatagcacaattcttgagtctaaatgtctagttcagggccttctcctcctaaatgacatggcctccaaaaggggggtattgtttccaaattcagaattagcataagg

SEQ ID NO: 425498 - DNA, 195 bp, Homo Sapiens
ggccacagcacgtcccaggagcgttggcgatccggcgatgaccaggattttcttatagcacttccgcgggaccggtctacccagctgtagttctggctaccgggggtacgcccatgcgcgtcaccaatcgatgccagctcaacaccaagaagcttaagtttggtgctcatgtccgcgcccttaaagacggcgtcg

SEQ ID NO: 425499 - DNA, 378 bp, Homo Sapiens
ctcatgtatgtaggagacagagaaaggacagagagaattcacacctagtataataatatattttgactgggtctcccaaccccagaaagtcctggaacagacagtgtatattctcctcagagaaacacttgcccacagcctgctctgacacagagttggaagaagaacggttctaaaggtggattgcttcattcatttagttttctcctcaacacactgggacaaaaaggcaaaatttcagcaggcctatcaccttgtcccctggctccctatcgaatcagtatatgctttataaaccatccgttgatcgctcagggtcgtgtctgtccacacatgtccgcaccttcacctaataatttccgtctatgcccctcccag

SEQ ID NO: 425500 - DNA, 182 bp, Homo Sapiens
tatacgatcgagctcggtaccgtacatggtttttaaagcctcaaccctgaaataatacaagcccagatggggatactaaagaccccctgtgacattatcccattctaacctttaatcccaaacagcctgaagtaaaagctgttagtgcattaaagattagaatgggataacacgttcgcgag

SEQ ID NO: 425501 - DNA, 108 bp, Homo Sapiens
tagtaataatatcatttgggctgtccgtgtatgtctattaaaaagttgtgtgaggggaatattttgagttcaaggagagggattacagattggagtaggggaaacctt

SEQ ID NO: 425502 - DNA, 474 bp, Homo Sapiens
cggaacgtgtatcccacagactctgtctaaaagcatttgccgtgaaaataaatgagagcacatgtaaaaaaggaaatgcagcaatgcatgcaacagaagttagaaagattacagttttaagataaagatgtttggtctacagcaaacaaagtgttcaaatcctctattaaccaatttaacaaagagttatcgtttccttggtttctgtccaaacacactaaatggatttgggaaaaatctcttctcacgttcttgtggtcatttaatcaccaggtttttaacgctacttccaaaccaatttttcatgggcttggcttccaaaaagaaaacattttagcattccatattgggaaaggtcattgtcactggctaagctatcagagtatctaaataaaactttatccactcatttctgtatggtctatagcaggctgaaagctgctataaaaaggaatctgaacttaaagtttcttc

SEQ ID NO: 425503 - DNA, 555 bp, Homo Sapiens
gatgaatagatatccgaggaatctgggttcccagctacctgctctaagtctttttaaccatactcttcctcccatgaaggagagcaggggggaaggtactgtattctaggagcttaaaagaactgaaaatcatgcaggaaagtaatgataaatgattctatgataagttgttaaaattaattaatactttgtaattaaatgagtttagggtcataatgattttaaaaatggctgttagcttaaaaactctaggcctctcataaataaaaccttatctaaatttgactaccacagaacttccttataaagaatgtgccaaatcatgaaagaaagaccacgataagaataggaaactacaaggcacatctcccacattctcttgggccttggccactaactccttttaaaagatttccccaactgaaaaataatcagacaaataaaaacctttattttcaatgttaaatgggcaaagttatacttaccacctacaatttaggggcattgtaagggggctgatcggttgatatcttaaccttctaacattcttttatc

SEQ ID NO: 425504 - DNA, 254 bp, Homo Sapiens
  misc_feature (41)..(131): n is a, c, g, or t
tgagcggtacctcggaacgtgtatcagataagggaattcgnnnnnnnnnnnnnnnnnnnnnnnnnnnnnnnnnnnnnnnnnnnnnnnnnnnnnnnnnnnnnnnnnnnnnnnnnnnnnnnnnnnnnnnnnnnagagtatgtggtatgctttacagtggatgagtttgaacgagatttgccgtctacaggtgtattcaagtcaagaaaattcgggcccgtggagtatttatagctaagagatagtactaaagagac

SEQ ID NO: 425505 - DNA, 176 bp, Homo Sapiens
ctcagcgctcggtcccgggtgctgtttgcgtggccgtgcttctggcgttgcacactgtgtacgactgtcggggactcctctcgacgtcgacctgtccggactgacatgcttgggacctggcgcgtctgtttacaccccgtcgtgacctgggcctcccagcacccgtctctcctcgg

SEQ ID NO: 425506 - DNA, 102 bp, Homo Sapiens
tcgcgaacgtgttactctttcctccagacctatctttacagaaaattgcagctgtcctacaaaacagcaaatagcaactataacaaaaaggcaccccattaa

SEQ ID NO: 425507 - DNA, 500 bp, Homo Sapiens
tggaacgtgtatcaagctagattgacttcattctttagccttagagagaagtgtgatgtatctcagcatcgtccttagcattacaactggtctcctctgttaggctgtcgacagtcatgaaagggcaatccacccaaggtaatgtaattatttgccctcactaaatgttaaaagcatgaccgtctttactcatggtcatttactcagaaatgagaaagctctgtctcagctgcttgatgcagagtcagtgtggtagagagtgacattcaacagatccagaaaggtgggtgcaggaaaacactgtaacattggctaggccctctgggcagatgtgacttttctttccagcatggcatttcaaacatggattcttcggctgttcccaactcatgcggcagcaggcgcctgcatcgccctgacctttatttttactggatcttttcctttttctgtcgatggtcactgtactccaccatctggggctgggacaagaaatccaa

SEQ ID NO: 425508 - DNA, 669 bp, Homo Sapiens
  misc_feature (346)..(409): n is a, c, g, or t
  misc_feature (589)..(589): n is a, c, g, or t
  misc_feature (611)..(611): n is a, c, g, or t
  misc_feature (625)..(625): n is a, c, g, or t
acgaatcgagccggtaccgtgatcacgatgtatccactagaggcatagagtgtcgggcagtggtgcagtcttaatacaggggctgattaggtaagccttattttcatatggggcatcccaaacctaaggtttcttctccagtctctcccaggaagctagattcatgcttctttttgcatatattgttcctgcttgaaacaggtgttagttattgctctctgaaacgtacctttacaagagtgtaaagaccccgagggtacatatgttttgggttgattcccagctatgcttaatatctgggtcctctcattagaatttaagttccacaaaagcgtaaaatctcatnnnnnnnnnnnnnnnnnnnnnnnnnnnnnnnnnnnnnnnnnnnnnnnnnnnnnnnnnnnnnnnnaatgatggatagttattctttaagacccaattccaatgccacctgtcccctcccaaagcagctatgtgtctctcctctgatcctttagtactgtttgcatttctctataataatacttacaggatactctcttaatggtttatatctgttttcccaattaagctggggaatattttatgngcggaactatgttttataatgncatatgctttgtgnctaaaacaatagaagttcataaatgcttatggttgaacggttga

SEQ ID NO: 425509 - DNA, 181 bp, Homo Sapiens
agcttgttgagaatgcctaaacgagcattttcatcttgtgcctatctgttggctcatttcacactctggggtatgggttaaacaaactggcttgatggcctgtggcgcgaccctgctctgggggaccatgtgccagtgtggcggagtttgacttgggggcggcaccaccttgtcaaactgg

SEQ ID NO: 425510 - DNA, 522 bp, Homo Sapiens
  misc_feature (472)..(472): n is a, c, g, or t
gcttgttagactgtagaatgttatttttgggggagaactaatggcagatgaacttagtggtcattatggttggatggaaaaaaaatagagtgaacagatacagctttctcacagaactttcatagaccagataactgcttcaagagctgacctgaagtaaggaggagtattatttcctatcttgagggatggcagagattttcaattggacctttgaatatatttactgtttggtcatagtcttgtgtgttagagtaagactcattagatttctgtgattttgaccacctcaggcacatagaagaaagaaaaaatagagggagatttttttataataaagtgaatgagttaaatgatatttggaaggtgtacaagaaacggaatggatcaaaatggctttcattagttacattttcttcttgacttttgtcacaagagacaaggtcttatgaagaatggttctgcctctgtngtctgtcaggtagcttaggatcttttatgtaagaatctctgttcctagca

SEQ ID NO: 425511 - DNA, 207 bp, Homo Sapiens
  misc_feature (59)..(157): n is a, c, g, or t
gtgggcgctggatgcaggattgtttgacgtccagagtttgagcacagcctcaggaaatnnnnnnnnnnnnnnnnnnnnnnnnnnnnnnnnnnnnnnnnnnnnnnnnnnnnnnnnnnnnnnnnnnnnnnnnnnnnnnnnnnnnnnnnnnnnnnnnnnntgcgcctgacgacggtcacggcacgcagtgacgccgtgatcatgcccctg

SEQ ID NO: 425512 - DNA, 377 bp, Homo Sapiens
  misc_feature (109)..(122): n is a, c, g, or t
  misc_feature (129)..(222): n is a, c, g, or t
  misc_feature (280)..(280): n is a, c, g, or t
aggctacagtctaggtcactacagcctcaacctaccatgctcagtcaagcctcccacctcagccacctcagtagctagggcacatgctcatgcaccactcctggctaannnnnnnnnnnnnnggtagannnnnnnnnnnnnnnnnnnnnnnnnnnnnnnnnnnnnnnnnnnnnnnnnnnnnnnnnnnnnnnnnnnnnnnnnnnnnnnnnnnnnnnnnnnnnngagtgagccaccgcaacctgacctgtaattttctggtaatgcttttgtcccctttggntgttaggtttatactggcctcttaaatgggaatgtgatactttcatggttttccgaaaaagttggtgtaagatgggaattatttcttcattgaatag

SEQ ID NO: 425513 - DNA, 606 bp, Homo Sapiens
  misc_feature (108)..(127): n is a, c, g, or t
cagaagtatcagaaactaagaggatactagataacacagaatggaaagaattatgcagattttagaggaaactgtacattcctaggaggtcaagtccctgtgggtgannnnnnnnnnnnnnnnnnnnaaatgagtggctaatgtttcttttgcattggaggccagaccactggaacattaacatttcaatattggaaactatgtttttcattcaatagcatgtctatagagcctaaaacagtgtctaaggaagaggatatgcttagtgaatatttctaaatgatcattttattcattttcttttttaaatgtatttatgcagcacaaaaacagcataccacagtcgcattaggtgcttgaaataatttggagagcaaatcagttaaaatgactagaaaggaatgagacaatgtctgagataagccctgatattcccattgtgcttgtccaaggtaggctttgataattcatcacagtcctctttcctgctgagcctgtatgcagcatcagaatcctcctcaatacagggcttccatcagccactacaatcagctggagttggacgtttttccaaaccatttgcactgttggctagactgtttccct

SEQ ID NO: 425514 - DNA, 286 bp, Homo Sapiens
cgtgcttcggagtagatgagctcaaagtctgttgggtgagacagatgtaaaaagatatcataatataaaaatacgaatgaaatactgacttgcaggggcccaaggggtagttgtaagagaagggaagatcagaggtatgggggcgtctttgaggatgtcacacaatctgatgtccggcaagtacttgacggacacactgtgacaagtttattgtaaatgacatcacaggggcccacagggtacctagtggacgcagctggaacagggggataacacgttcgcgaga

SEQ ID NO: 425515 - DNA, 109 bp, Homo Sapiens
ttgagctcggtacccttcgtactcgagccgtcagcgcgaaggttcgtagccctccagtgccggcacgctggtcaattggccgtcgacaatggcctcgcatgggttgcag

SEQ ID NO: 425516 - DNA, 483 bp, Homo Sapiens
tgaatttgtgagtgaagcgtgatagtgtcttcatgtctcccatttattttttacctgtcccacagactggagctgttcccactcagcagaatgattatgatttaaggtagtagaataatgacagcagttcgtatgttcttggagctccccagaggacagataggctgagtgagatctgtccttgtcactgctaatgctggcagtactcagtgggtgacttttcctttgggttgttcttattccttacattagacttaaattttccttttgggaaggccattatgaaccactttctgaatccacgggaagtctatgctaattacgagcactgtacatctgaatcaatgagcaatggatgtatggattgaaagaaccatcttgaaacagaatggcataacaagacaatctgggggatttaaaggcacagtgaaaggagctatctgcataggacatgatttgtgaagatgtctttctactccccta

SEQ ID NO: 425517 - DNA, 226 bp, Homo Sapiens
agatacgaatcgagccggtaccctcgccgctcgtggttgttcccgctgtagaggggaatctgtcaaaatagccactcggcagcatgtctgcatggtaacgggcggcgtacatcatagcatcaggatggtggaaatattatttggaaggggagaaaacattacagaaaattaagtagaaagaaatgagagttcctaactacttacagaattttctggtagaaagtag

SEQ ID NO: 425518 - DNA, 190 bp, Homo Sapiens
gagagtggagatggagagtgacaaatctggagtctcccttgagtcccttcctaggaggcagtggtgctctagggcgtcagagtgtttctatgctagtctttctattaattattatgggacagcaagttaaaatttggaactttaaaggatatcggaaagggggctcaaacaataatacaaaatattggac

SEQ ID NO: 425519 - DNA, 174 bp, Homo Sapiens
cagatcgaatcgagctcggtaccatgagatattaggtctcaaatgttataattataacccacttacttaaagacaaaatatttacaaaacaaagcttgatctaaagccatagctccgtctaggattcaatcacagaagaattaatggtgttttttaggataacacgttcgcgag

SEQ ID NO: 425520 - DNA, 618 bp, Homo Sapiens
  misc_feature (495)..(495): n is a, c, g, or t
agatagaatcgagccggtaccctcgcgacgtgtgatccaagagcgtatgggaatctcttttcttagcaagtcgagagtactgcacgtccaagttcttgcaggagagtaccaagctcgaagttcagccatcaacaagcatctcatacaagaagtcccactgaagcaaactgatttttgagacagggtgaacacagtcattaatgccactcatatctcagggcattctaaccctgactcccacatcaaggtaatatgaagacactgagctacccattgatgctgctgcttctacatttactgagagccaatataaagaaggacagtaattatgaatacttctgcacttccaaaaccacaatgggacctagaatgtattaagatgctctcccaagattcatttcagatttcagttccagagggaaaaggtttatctttcccgaagaactgggggacctctttttatcaaacaatgaaagttacactcatacatttctngtcatctttgacagccaggaagtttaaaattgaactaacttggtcacaaattgctggcattaccactggctttgggatctagaacatttattttcaacattaatttttgatggcttacttgta

SEQ ID NO: 425521 - DNA, 415 bp, Homo Sapiens
tgtgattttaagacagaataagtagtatacccagagtacctgttacctttaaatatggctcagtaattgaaaggcatattactagaagtatttggagataattataatacttggaatatcaacagataaaaatactagttgatttttcccctgaacttcagagacactcatttgacctccaaaatagaatgccttgttcttgatactcattttttcgttcaatacattcagtgttcctgctgcaggtgccaaatgtcagccttgagtttcgtgcttttaagtagaggtatagaaaacacagagcttatggagcccactctttctcagtttatgttactttcactgtgagcacctgcttactgtttggcaaactagacataactgttcagcatctgacggataacacgttcgcgag

SEQ ID NO: 425522 - DNA, 602 bp, Homo Sapiens
agttgctgggcgatcgattaacgacgatcatgacaggaagggagaataaaaggaaagtcgttatttatttcagctttcattatacaaaagatgttgccccaatttaccaatgaaaagacactgagggccacaggggccctctgagaccctctttccagggtcacatagctgaaatatgtgggcaaaacagtgtctttcccaaggctggtaactgtaggcccttgtactacactgtgctatacctggtagaaaagaatatagatatacaaactaaaaaacatcacctattttaaaactggttatttcatgaaatggcagaccataatgattgggtgtggacattaaacaaaaagagtttatatgcctcattaagataattttctggagctctgaatccatggtttatacataatgggttcagtatatttggtttagccacaaaatcactatggttaaatctttaattactgaaatatgaagttacgcaatttatttttgaagtctgcgtatgctactcaccaaatttttgtggtctacaacatattgtttcgcaatttcaaaatacattagcctcgtagtgcataggataacccgtccgcgag

SEQ ID NO: 425523 - DNA, 261 bp, Homo Sapiens
ggcgtaacagaaaaccaattaggaaccatttcaactgcacccccacgcaaggacctacccaggacctgtgcgactgtcattcctgctgtccagaaggctccttcccctaggaatccataagccaagctccctcagcttctttagggctttggttgtccagcacttcatctcaataaggatcaagggttcttctctgagtaggaatctcacttaacggcattccttaagtgactaacttttaatggacaatgattttaatgt

SEQ ID NO: 425524 - DNA, 496 bp, Homo Sapiens
gctttagagtcgttgtcggttaattccaacattggtgttgtctcaggtagatgtgtgagttgagattttcccagtgagtatcacccactttctgtctataccagcggtcccctttctagttcctcaagccaggactagagagctcttgatgctctttctctctgctgatgctcatttccgggtttcagcctgctgtgcatccaggctgaggaacatcagagggaaaaatgataaactcgccgccagtttatgggtacttcaaattgtggtcttcttcatccatctgctattatttttcatagttctcagatagctgctacatgcattctgttcaggttttacagcttcattcagtgaaagagacactgaacctagaaccctgttccttacatctttggtttctatttttaaggaccatccatgttgctttaagtacagctgtttaatttggtctgctgcatagtattctgtcatgtgtttgcaaatctcgttggtc

SEQ ID NO: 425525 - DNA, 235 bp, Homo Sapiens
ttagctaggaatagtcagagaacgttttataaaatacattgacttgtccatgggcttcatcggtcttagttcaggtgaactattaaagacagcttattaatgctataacactttttaagttaagaccagatgacaatgatgattttattatagaattgttgctaagcatatttagtgttatcagaatcattggcacatggactatacatttttttctcacacattctatacctca

SEQ ID NO: 425526 - DNA, 197 bp, Homo Sapiens
gatgtgtatcataacaactagaacaatagggagcacattagaaagaagtcatgttgcgttatttttataggggctttatgttttattttccatgtgggctccttctagatcttggatctgtaatacagcctccctcgtttgtgactatgtttccaacccccaatttggaatgaatgacctgaagctgattatcggaa

SEQ ID NO: 425527 - DNA, 203 bp, Homo Sapiens
tcgacgtgttcaagagggtctctggccgacacagagcagacccactgtcacctggtcaggcaggtgctgaggcatcagtgcaggtcgctcaccacagactcagccaccagcggcagtgctgggtcgtccagtggcttctgaccccaacgtgtccccagagcacagcttcccatgggccctttcttcccactacagcagaacgc

SEQ ID NO: 425528 - DNA, 516 bp, Homo Sapiens
gtcgcgaagtcacgtgatccatttatgtctcaatagttgaaggaagaagtcatgttgaagttcagtcagtatgagctagatgtggatgtatttaagtggttagttacaaagggagagtccagcttgaacagaggccatgcagggatggggatgaggtgcagtatagatacttgggggctggtcagcttccaggggtgggaagtaacagggaggaaagctagatcacagggatcctgctgagcttaagccatttagatctgatcttatgggcttgcagataggtaactggggcaatcatgtgataaaactaatgttttacaaaaatgatccattagtttgtagtatgctttgaaaacgggagagtcttaaagcagtggaataagttaaaccgtagaactacttctggcaagaggtatggagttctggtccttctgtctcatttgcatagccacctgctcccacatgtggaacatgccggaacgaatacaggactgagaataagtgggtcctgtgtgg

SEQ ID NO: 425529 - DNA, 226 bp, Homo Sapiens
cagttctgcgacgtgtatccaagaggatgaggtactgttgataggataaatgtcaacagacagaagctactatttctttttaatgtggaaacaatgatggcaaactgaagggtgggtcaatgaggcatggctttctcttcaattctacctccccttgctcacacgaccaacatcaaccccaaagaggccagtggcatttaatgggcagaatgaagtaaacttcagt

SEQ ID NO: 425530 - DNA, 130 bp, Homo Sapiens
gtggggaagggatacacacatatacctagtcgcatcttgatcccagagctaactaggtgtaggatggagtccttcaagaggtaactttaaaaattggggcactcagtgagaatcctaaatcctttctggg

SEQ ID NO: 425531 - DNA, 415 bp, Homo Sapiens
tccctcggtctactgttctgtctacacgaaaggccaagattgttactctagcacctagtacatgcccagaatgtggtatatctttaatcatcgtcaggtgaatgaatgagtggcaaaactccaaagtgagaatacacttaaggaggttatttcttaatggagagaatgcttcactctcctttgaacataaaacaagaatcaggtcccctagtccccaactccccatttctagtccactgcgcaaacagttttaagcaatgtttcattgggacatttcctcatttccccttgttctttgtaggtttagctgccagcctaaccacattagcattcagtagcagcaacaaaacggactcttaaaattctaaaaagcaaaaactttacaattaccaacagtaaaatacatgctcttttt

SEQ ID NO: 425532 - DNA, 430 bp, Homo Sapiens
ggtcggaccctcggctctacctgttctgagactaggctagagctctttccctgattcttactgttgcccaaggcctgttacctggtaagggagcgaatttatcctcatcttgcagccaaagaagaagtaatttttatcattgcaaggaaatattacacccaatccatgtgtcaggtctactattctaatattcattttcctgtgcacatcagataccacaaagtctaggttccaggatcactgaggtacccctgtctccattagtagagataatttgttgcactgatagataaaaagtacagtgtagctgtactgaaaatgacatggaactgctttctcaacccataatttttttctacccaacaatctcctctcccttcctctgagcagatgactttctcccccttaattgagacaaggtagagccgag

SEQ ID NO: 425533 - DNA, 374 bp, Homo Sapiens
  misc_feature (291)..(307): n is a, c, g, or t
cacagatagcagaaaatcctacaacatagcatcaacacctcccaaatatgctttcatcttttccagttagttttttctcccttttcccaaaggaacaatctccatttttctctaatgcttcctgaaactcaccaatcaaatccttagcagataatattatacccttattaacaataaaattaggaattatatctaaatgcatagaaactggaactgccatgaatgcttcattcattctgttgataacttgtgctgtgttgaaacttgcacctccttggcttccatgacacnnnnnnnnnnnnnnnnngggaaaaagagtttggctctggtaaccaggtggaagtgcaggggtatgatctgggttataactggtt

SEQ ID NO: 425534 - DNA, 215 bp, Homo Sapiens
tgtgtggtttccctactataaggtctctttagtctccaagtttttagtcatccccaaagctcctcttatatccatccacagaccagacagtgtcagcagttcctttctatgaagcagacacgggcattaggaaagccttctttgcctgagtccgtgtattgccacctaagctttccttgtctggtctggagcaaaccagacaaggtagagccgag

SEQ ID NO: 425535 - DNA, 606 bp, Homo Sapiens
gatcagctcggtaccgggatctacagagtgagggaggatgactcttggactgtccgggtcgttatgacaattctcgagaatggtgacgagcccatggatgaagtcgtagatgtggaggtcgtagtaagaagcctggattgttcaatcacttccttcttgcgtctcagtgcctggttctattggtgctggctgtggctcccctttgtcatacgtgaaggccctcccaaaggatctcagaaagcccccctggaacgtgccatagctcaagtcttattctagtacaagtaaggggatttgcaactggggttgaagtaggagcccatttagagacttatccgccttcatcactgagttatctcatcctgaagccatcctgtggatctggcagtagggctgggtacctggaagccaggtgttgagtatataggtacactggagcggtgagcagttggggtgaagattcgagctggactggaatccagatatggtaaggatgtgcccacggggaagtctggagtgaggcctatgtgcgttgctgataagtggggtgatagggagtgagaaataattcctgagaaagtgcttgctgacatccaggctgagctc

SEQ ID NO: 425536 - DNA, 307 bp, Homo Sapiens
catctctccttgctttggcttgctgcttgtttattcattgcagcaaacattccttgagtcggtgtcacagcctgtgacgcctgtgtaggatccagctatgcagactccaccctcaaaaggagcctgcaactggtcatggctaaatcctgacgagggctgacaaaccccaactctgcacgggccactgggtaccaactaaccgtgaacagattgtctggcttggggtagggcgtggttagagagaggaagttcctctgactgaggaccaagatcccaaggcagcaggcccactgatcctgaaccttga

SEQ ID NO: 425537 - DNA, 587 bp, Homo Sapiens
gagtcgtacctcggtctaccttgttcatgtcatggtagcatcatcaactgctgggtcattactaaccagatgagatggctcacagaaggcgccctgcacagctccttctgccttagcaggctggtttctcccccttggctctggtctatgtttcaggcaggagatgctgagagcatggctgtggaaacttggcataacactcagcatgaggctgtgtgaaactgctttgcaagatgctttcagtgatgcccagtgagtcaagtttttgatgcaaagaaggacattttccttctttcattagtgggtgtccttggtttgttaaaataggtgtgaaagtagtggattaccgaagagataaaatgacaatcctaacattcattttaaaaatttaaatgtgaaaatagctgagggattactgtcttcttaataaaactggttaggcattacatggaaatttaaaactgaaaacaaagccctttgtttttaaatttttacttttcaagtaacattatgatttacagattatttacagattgcttttggaaggagatactgggtggtgtccctctcatccttctccccttccc

SEQ ID NO: 425538 - DNA, 406 bp, Homo Sapiens
tcgtgccatttctgtaaacactgatagaatcttcctgtcagattttaaattacacaaatttaggaaagaagtttgtgtacagactcaccctcaggttccacttactgcagcttccatttttgaagagactactggattgactcatgcggtccctgtatggttcttagaatgtatgtcttagaaaaatctgagacagtccactgattctttatctggatgccgcactgagaaccagactacttagaggctatctctgtggccaccttcagattatactggtgtatttgagggaactatacatggtatgataccatgtatcattcctcatttgtttttagcccttggtcagtgcattaagttggaaattgtatctacatactgatagagagagtgaagtagaaggtct

SEQ ID NO: 425539 - DNA, 187 bp, Homo Sapiens
caaagaagaaaaggcaaggaataatgggacaaggaaccaaaacttttattctgaaaagagaaaatcccagtctatagcaagggcagttttccttctaaggaacagtacggatatatcatggctaaagaagcaggctcagcttcttggtccctttcactaattggctatggaaacttctaaaactagg

SEQ ID NO: 425540 - DNA, 272 bp, Homo Sapiens
  misc_feature (215)..(224): n is a, c, g, or t
cgtaccacattagtaagacatttaggggcagcacggatcaatgtgggtcgacagggtcgagttagggataactcccatatttctggctgggaaaatgagggaaataatgggattctttgataagatgtcttatctgtcttatacgttttaacttaaatgctgccttctttgcaaaattgcctgtgccatttctttatgaactgaatctgaattgnnnnnnnnnnggacagggagtctggcttggtcgcccaggtgggagcgcaggggcgtga

SEQ ID NO: 425541 - DNA, 268 bp, Homo Sapiens
  misc_feature (120)..(164): n is a, c, g, or t
ctagtttctgtatactctttctgaatacctagaagggttctacttgtcagtgaaacctcatgcacgccctggaacacacacaagataaagtctccaggccaacagtgatcaagactgcannnnnnnnnnnnnnnnnnnnnnnnnnnnnnnnnnnnnnnnnnnnncggagatgggtttccactcttggttacctttaaacggtccttccttgaagcttatccgggtctccgctcacaaagagggcagggagaccagggtagacgcgagg

SEQ ID NO: 425542 - DNA, 209 bp, Homo Sapiens
  misc_feature (94)..(94): n is a, c, g, or t
  misc_feature (103)..(103): n is a, c, g, or t
  misc_feature (148)..(148): n is a, c, g, or t
  misc_feature (177)..(177): n is a, c, g, or t
cggtctacctggttagaaatgacttaaagacaatcatcgttggtattttctgccctatggatcattgggacatggtctcttataggaggaaggngggcagatngaaaaacaaatataaaaacacagtcactgaagatgtggccacggngaggaccttgcagagctggtgttgttacnagaacacactcctatcaacctaagcatggttc

SEQ ID NO: 425543 - DNA, 183 bp, Homo Sapiens
ctgttttattcggaagctcctctctgtgcttcagaatagacagggaaataccacgtttagtgctgagattttaaatccctttcatttctctgtagactctccatcatgtctgtaaaggagaaacgtcttctcatagctcaccttctaagacaaggtagagccgagagacaaggtagaggcgag

SEQ ID NO: 425544 - DNA, 186 bp, Homo Sapiens
tcgagccggtacctcggtctacctgtctgtattcctcataactgatactaccgtaaggaagcgtctgctatttgaaacccagtatatcctgagcctgacagaacttatccggtctcatgcactcacttccaaagactctcaaattgaggtgagcactcccagccagccttcaattcagtacctctg

SEQ ID NO: 425545 - DNA, 547 bp, Homo Sapiens
tcggctctaccttgtctcatatcttagatatgagacgaggcagattagtaacttgaccttgacagtctgagcccttaactgccacaaacagctgctcctgacagaagagaaggctaagaacaaattaagggaggtggtcagtgaagacctttttaagagaaaagatgacaaagggcactatatcctcagcgatttgccctgtgacttctaaactccagcagtagttgttgacttcacaagccttggctgctgaagactctcgccccttcagaaagaggagcaaccttctcgtattacgtctcaggcatgctgaaggtgctctgaagatggcgtggttggtcagtgctttgggcataacccacctgtctaccttttggacatttggcctgataagtatggtgcatcttgtgtattttgatttataagtgtggctggttgtggactacataccgagcacccttctggttcttggagtatcaacatttcagcccacagactctcttgagttcaggcgattctcaacatcatgatagaccaggtagagccg

SEQ ID NO: 425546 - DNA, 255 bp, Homo Sapiens
tagcgctcggggaaaaaggaattatccatcgcagaaaactaaaactgagtttaaaggcacattactgacatgtttagagtcagccaatcagcaacagaattctgattgttctgtccccaccttcacccccacctcccctgtgggcttaagaaactcttacttatcctccaagactctgctcaggcatcacctctagaaagctctccttgcctccaccttccaagttgaattaggtggagacaaggtagagccgag

SEQ ID NO: 425547 - DNA, 205 bp, Homo Sapiens
tagtatatctcaaggttgactacttgatatcatttaagtatttaaatcacaaaccaattcatgtaattctatgctaaaaatccctaaatgccttcccatagtatatgaacaaaacagaaaaccctaatacttaaaggcttttctgaaagcttattctctaccagtctccatgttccagtggaactggagacaaggtagagccgag

SEQ ID NO: 425548 - DNA, 138 bp, Homo Sapiens
  misc_feature (86)..(86): n is a, c, g, or t
cctggacaacttggacgactggtccttacggactcctaccaacacgactaggtcctactgtctactactgctgttacactggaacnggggactcctcatagacgtcgacccgtgcaggcactgcacacgcttggcacc

SEQ ID NO: 425549 - DNA, 210 bp, Homo Sapiens
tcgagctcggtaccggaacaggtagctgccgcgctcgtcggggttgcgacagcgagtattgccgcgtgacgccggacggcgcggtgacgtcgatatgggcacccggttcgtacgcatcgaacggctggccgtcgacgcgcgaaacccgaaaacagcggatgtcctgcgccgcgtcgatcagcgcgtcgatccggacttggtggcggttcg

SEQ ID NO: 425550 - DNA, 191 bp, Homo Sapiens
gagacgagagagagaggatggagctacaattattaagcagagtcttgcataaaactctcggaaactcacaaccagaaaacattgggataatcatcgggtgcagcaaaatgctacataatccaaattcataggtcccatagctatgaagacgggcaaactcctggtctgtccacagacaaggtagagccgag

SEQ ID NO: 425551 - DNA, 175 bp, Homo Sapiens
tcgagctggtacccttctcgcgaggatgtgcacgtgcagtggttgcgcacatcagcagcgtcatctcgagctcgatgcgcatgtgggcatgtcgctgaggatcacggcggtgatcgggggcgcgattttcaaagccgcgcgcgcatgtcaccgagaagtcatcggcaatgtcgga

SEQ ID NO: 425552 - DNA, 363 bp, Homo Sapiens
  misc_feature (134)..(323): n is a, c, g, or t
agtgttactgaatctgttatggccagtgttttataacccccttcacattacctggtcagtaacttgcttcagatgaaaataacggcagaaagcataattttttgttgagatcttgtttgagacggtgtctcaannnnnnnnnnnnnnnnnnnnnnnnnnnnnnnnnnnnnnnnnnnnnnnnnnnnnnnnnnnnnnnnnnnnnnnnnnnnnnnnnnnnnnnnnnnnnnnnnnnnnnnnnnnnnnnnnnnnnnnnnnnnnnnnnnnnnnnnnnnnnnnnnnnnnnnnnnnnnnnnnnnnnnnnnnnnnnnnnnnnnnnnnnnnnnattgaattcatgcactaggcgatctatctggctcagtctc

SEQ ID NO: 425553 - DNA, 437 bp, Homo Sapiens
ggaggacaagagcagcccacagatgtgcaagtgaacttttctagagaacacatcactctgacaggccacatcagtctatgtagccctttctgaacacctaaaagaagtctaaactagcagtcgggaggctcagactgcataacgtaactctgatccaccaggaaagttccagaaactacttcagtagaaaggtagatcggaaaaccctctgaaacaagaacatgtacaaggagcttcggaggcaaatccccgatcacaagccagtcctccaggcggtgcagtgcagagacacgtcaaatctctcgttgagaaagcggctgcggattcgtaagcatatcctcccaagataagccgagattaggccctgataagcaggtcctatcagatagtctaatcagcatatcaccatacggctgggaacaccaatgtcatctcct

SEQ ID NO: 425554 - DNA, 161 bp, Homo Sapiens
  misc_feature (65)..(65): n is a, c, g, or t
tatccccaacgcctgtgctcacatggaacgtacctgtgttcacttcaatggtttaactggatatnagggctgtgcagggatgtgctgtggtttgacaaatgtgtttggcaggcagatatgctatggtcaaatgtcatcaccacttctccacgtcgtcaaat

SEQ ID NO: 425555 - DNA, 157 bp, Homo Sapiens
tacgatcgagctcggtaccatctctgtcaggtgtgctgcgtacttcccggctcacgcgtcccagcagatagagatgggggccgttagaagcaaaatgtgaaacgtatccgccatggtgctggtatctccggcaataaaaccatcatcgtagaaaata

SEQ ID NO: 425556 - DNA, 341 bp, Homo Sapiens
tgggaaaccctggcgatcacttgaattaactctcatacagtttcacacagttttcctccttcagtccctaaaatctaacagcctcaacccctgtcctataaaccctttccagtgttaaatataacaggaggaagagcatactcatgcaaattagaaaccacagctgtatggggcagagtctcacgggggccctcatcactgctcagtgctgcctctgctcgtcttaggtcagcttccactgactcttgtaagcttcagcaaatgtcccatgagtcctctacctgccttcccaattcccttagactcagcaaaggaaatggggaagacaaggtagagccgag

SEQ ID NO: 425557 - DNA, 114 bp, Homo Sapiens
caaagaccacatcatcgaaaccgcaaacatagtatacacaaacgcctgagctctatctagttatctcatcggctaacctcccggacaagcggcctaatagcactcggaataatt

SEQ ID NO: 425558 - DNA, 195 bp, Homo Sapiens
gagccgtacaagcgcgtagcagctctcccgggggcgcagcaatggcgcggccttttgcgccgtcgtctgtaacctttctgtcacattacctgattagtatgaagcccaactccgagcgccagggaaattctaggtgaatcttgaccgcggcgcgataactaaaaaggtaaccacgctatgaccaagcaactggag

SEQ ID NO: 425559 - DNA, 134 bp, Homo Sapiens
tcttacttacagcctgggagcgaataaaaataataggtagactcagagtggatcttggatggaaggtcaagaaatcaagtataataatgttatacaaagtaactggagattaaaggaaagaacccccttatttt

SEQ ID NO: 425560 - DNA, 266 bp, Homo Sapiens
  misc_feature (118)..(130): n is a, c, g, or t
accgcggcctactgtctgacaccacatcttatttctggcctgtataatttgattattttaagtaattcaaataagtagaatcttacagtatctatccttttaactttattttattcannnnnnnnnnnnnagacacgggatctggctcggtggcccaggttagagggcagtagggcatccatagctcacggcagccttaactcctcagctcaaggggtcctcctaccttagtctcccaagtagcggggagacagggtagagccgag

SEQ ID NO: 425561 - DNA, 417 bp, Homo Sapiens
tggatgtggctcagcatgagcctgcgccatcgcatgtgcttgtattaacagattctcatgtgtccttgctatcgtactggttaataaccgtgacactgagttaggttttagtataggatcattgtgaaaattctgggcagggagatgctgatggaagagtgttgatgagcataaagaacttatcttgagaaggtacaataatgacttgcttggtttctctttcctcatcttgccagataacctcaggacagctgtttttattcagcccattgtattaataaacacagaaagacagctactcatgtaactgaatacacaggtatttctgtctttgcagttgctaatacagtatcatagagaactcctttgtcccagcaaaacaacaaccagggcgtgccaacgagaggcgggttgccc

SEQ ID NO: 425562 - DNA, 151 bp, Homo Sapiens
gtccccgcgtcgtggtgcggggtcacgggtgtacgcgctgtcgccgctttcccgatgttttccgacatcagcgaacagctgaagagcttcatcttttccaatttcgtgccggccgccggcaacgtcatacagaactaccgggaacagttcg

SEQ ID NO: 425563 - DNA, 635 bp, Homo Sapiens
tagatcgagctcggtaccgtcagcgcttgccttacgatgcgatgacagtggtcttcccgctcgtcgcaagcacggcttcgaaaatgccgagttccgccgccaccgctggggcaagaggttctgctgcagctgtcgccagaacgagcctacggccacgcatatgctcctgacgtagataatccagaaaatcccgacgataaggcagtaaccccgcatccatggaaatgcggctcgcaatctgctgcttcaagtgggcttggccagacaccaaccagatgggaaacaaaaacagaaacaaagggttccgcttcaaaagaatgaaagcgctttcccatagaagatctgtcgcgaccagtgttccgtcgaggtctacggccaaaggcacttcctggctttttagccgctcatccatttttagtcattatcctcaaacccgccccggcaactctcgtcagccaagccccctgggcaacgaataaaaggagagcacaaatgaacaatgattagtcttcgctacaatcgataatggttattcatgggcttgtctctaccaaagtggcctttaagcaatcgctacgagttttggttaataaacacgtcatcctacataattgctggtctaacttgtcatcgcg

SEQ ID NO: 425564 - DNA, 276 bp, Homo Sapiens
  misc_feature (80)..(129): n is a, c, g, or t
tgggttactctttgggaaggtccataatatgttactacagttatgagatgtgatgcctatcttgaaattgtgtaatatcnnnnnnnnnnnnnnnnnnnnnnnnnnnnnnnnnnnnnnnnnnnnnnnnnnagtcatgtctactaaataacatgtacctaatggtaatctcactgccctgtgtcagaataacttgagacattttctgaaatattactgacattggttataaattacgtgagactgacattcattcagcaaaaattgagtgcttgttat

SEQ ID NO: 425565 - DNA, 566 bp, Homo Sapiens
  misc_feature (390)..(404): n is a, c, g, or t
acgtgatgatcgtgcgggatgaaccctcagctgtaatatcctccttgactgcaggactggcagtcgtgtggctctagaggaacctgtggcaggacaggttaagtaaggcacataggggagggggtagcttctgatgtgcttctttgctttctagtacatttctctcatttggtgtgttttattgtgaactaaaatataaacttagacttgaaaatgtgacaagtaaaaatggttgattagtcttggatgctaattgtcaattaatattcattgcatttgtttatagtagcctccaccctcccatccacggttttacttttcaaggtttcagttaaccatggtccaccgaggtctcaaaataagtgagtaaagtacaataagatattttannnnnnnnnnnnnnnccacattcatataacttttattactgtatatggttatcatggttcacttttattattagttattattaatcacttactatgcctaatttacacattaaactttatcataggtgtgtgtgtctaggacaaaatatagtgtgctctgtgctatgttagttagtt

SEQ ID NO: 425566 - DNA, 264 bp, Homo Sapiens
tcttgcgcttgccatagtaaaactccttgtaagctgtttcgattatgaagaaatgccacaaagccttaccagtatagaagtgtttaatctcttaagcggttaaacggtaaaaacagttaaaaataattaataatatgtacccagtattaacgacgctgtatgggcgggtgcatttgggctagcgttcggtgccgcgggcgatggcggtcaatgaagcgccactggggtgcgaggatggaccgaagctcgccggcgagtgcaacg

SEQ ID NO: 425567 - DNA, 194 bp, Homo Sapiens
tgtcaacagttatgatccttcatatgagactgtctatttaaaggttgttactaaattatccccaagagttaccttcggtaaacggtgatgcaaagcctttttcccttggtcctctgggatggtttctgttttccatgggccttctccagagttatcagaagttgtcattctcaggtagacaaggtagagccgag

SEQ ID NO: 425568 - DNA, 138 bp, Homo Sapiens
cctacgtgcgctgcgtgggcgaatcctgtgccgtgacgctggatcgggcgcgcatcgaagcggaaacgctgcgggttcacggcggtttctgcccgcggcatacggtaaaagtcttgcatcacgatcccgaattggcgg

SEQ ID NO: 425569 - DNA, 396 bp, Homo Sapiens
  misc_feature (43)..(43): n is a, c, g, or t
agctcggaccctcggtctacctggttgctctctcgtccagttngacttggtggaaggtactactcctactccacgggtatattaagcaaatttctactgtttcctaaggctcagcccagctatcctctccggcaagccatcacgggtatgacatctccaaacagactcaagagcttcctcggtgctcccattatgcctacttttagacctctatggtgtcccttatcactgccaaaattatttgattatttagccaccagctcactaaacttttaccttccccactctaactgtggagtcatcatcaagcagaagctgtaagttctttataatttcaaagcctcatgcaggacctggaagacatgaaaaatttaataaagacaaggtagagccgag

SEQ ID NO: 425570 - DNA, 135 bp, Homo Sapiens
tcggctctaccttgttctgttacatggggtgctcaaagctgctagtgtgtacccatgtaacagacagtttcattttagaccatgcttagttaataagagaaacattcattcactccctcagaacattttattagt

SEQ ID NO: 425571 - DNA, 381 bp, Homo Sapiens
  misc_feature (368)..(368): n is a, c, g, or t
ggtagtatacactgcttttaagatgtagcactgagtgtgactttttccccccttcacgtatttcaaaatggtttgaaatggggtcttaaaggtaagcgccctcatacatgactgaaactttgtgagaggtcttatatttgaatggacccttaatgatttatgtgaaatagaatgaagtcctgtctctgtgagagaacgtgcctcctcactcatttgtctctgtctgttttcatagccatcaatatagtaacatatttactatattcttgaatacccttgaagaaagaaatccgttttctattgtgcattgctatacgaagtgaagccagtaaactagatactgtaaatctagatattgtacctagacnaggtagagccgag

SEQ ID NO: 425572 - DNA, 127 bp, Homo Sapiens
agctctgaacagagactctgctctgacgcgacttgactgagagcacaggtcaggacacagctctgatctggcctgaccaacacaacagcgcaggaaagggcactgctctggcccggctcccaataca

SEQ ID NO: 425573 - DNA, 234 bp, Homo Sapiens
gcatctgaagagaatagtcttaacatcagatacccagtcaatgttcaaacggccccaattatcatataagttttttagcaactggttgttcaaatcaccatctagaattatttcagagggaaataacggtttccttgtctcctgctctgtggtcttttaccccttcaatttcatatacttaccttcttaatttttaagtgtaggcaaaagagcaggagacaaggtagagccgag

SEQ ID NO: 425574 - DNA, 416 bp, Homo Sapiens
  misc_feature (292)..(292): n is a, c, g, or t
ggtagctgtcaagacagctagagttggctaatgtagggtctctttgtgaagtaatgtggaatgagaaaagctggatagttaagtagaggctgtgtaatgttgatatttaggggagcatataaagaatattgggcttaatcttttagagcaataggaagtcattgaaatacattattgaggtggatgacatattcaaatttgcgttttgaaaacattgcaatatggagaagagatgtaaggccattagtggctattggttgattaaactgatcttactgcagtactctaggtnacaagtaatggtagcttgggctagagtggtggagccagagataatgggtagataccttaggtatttaggagataaatttgacagaactggatggtagatgggtattagacaaggtagagccgag

SEQ ID NO: 425575 - DNA, 172 bp, Homo Sapiens
tggggatgatatctcagtggagtatcttactggggttctgcatttcctgaatttgaatgttggcttggactgtcgttgctaggtgggggaagttctctttgatgatatcctgaagtatgttttccaacttggttccattctccccatcattttcaggtaccccggtcagtcg

SEQ ID NO: 425576 - DNA, 354 bp, Homo Sapiens
gcgtccgtgtaatatcatatctggagacagtcatgatcttgctagtgatttactatggttgggactccaaagttcagtgccaagaagctgccgcgaggtgagatcaagtgtgagcctatcgatcaggatggtcacctggcacgcatggcacaatctacctcactcttatcagagtctgagctactggcagtgctttcagctctgagttgaggcacctcgaagcttgtatctgtggtgaaggatcctacagtgctgtgggagtgctcacatttttcacaagagtaagtcccttaacaaagccttccagccatccaaggcctaaaggggggctttggcagacaaggtagagccgag

SEQ ID NO: 425577 - DNA, 390 bp, Homo Sapiens
tgtatacacagtggcaaacattgtacaactctctgaagtccttaaaaatcaagttttttacaccaaaagggagaagaagtttagtatgctgggctcctaaccgtgattacctttcctgcagatcccttaaaattaaaccagagctactcttgttttcataaaaaatgcttctgcaaactgtggaatacatagccagtcctcactattaacttgttctcctcacctttctgacaggaattcaacagaatttactgagcactccttgcaaaatcagagcagaagcaggaagtactaacagtgctgaaataacactaactaaaatcttgtctgagagaacagactggatatcattataggctgccatgttctctcagacaaggtagagccgag

SEQ ID NO: 425578 - DNA, 429 bp, Homo Sapiens
  misc_feature (413)..(413): n is a, c, g, or t
taagatcgagccggtaccgatgagtaatctggcatgtctctcacacactcaaatagacatgccaagaatgtatttgttgactaaagttgtggaaaattaacatttttccttaaaaagaacagtaaatactggagtaccccccaaaaaatatctactgaaatattcccctcaagcattgaatgacatttttaggtggtaacagccgactggctccctgtgtgtggtgaagtcatggagaacttggtactagtccatatagaataagagttagtcaatcacatctaacaattcagccatgggaaaaaatgagataatgataacactaagacatgagtaaaaaatagacattggtaccatttatggaattgagaggcaaaggaggtaggtttatttccatttcataaacatttggncaagatttactcatcg

SEQ ID NO: 425579 - DNA, 514 bp, Homo Sapiens
aagatagatcgagccggtacccgatgagtaatctggctcactcacatctgcaggagagcgtgtgtactctgagtgagccaagtcttgcttccagtgagtgtctggttcattcctcacataggcagcataggtgggaagtataaagaacttggctgtgtttatgaagagagacagctttaacttctcagtggggctggactgtagctcacctttagggttgatgtagggaagacaaataggctgctttgtgccgccttctgtattagcaaggcaaagaacagcttgacagtttctttgctcttctgacatgattctgtccatctagctggaatagggggctcaatttctgaggacaggtagctgagaatattgtggtttggggacctctcaaaaatacggagagtcttgtttgcctggataggagctctattccaaaggtgagggaaggaagtgataatgacttgttaaaagcaaccttttaggtagattgaccagggccaagatttactcatcg

SEQ ID NO: 425580 - DNA, 200 bp, Homo Sapiens
gatcagaaaaatggcggggaaagggagacccgtttcaacgaggatgtgtccggatgtcagcttggacaacagcattctggggctttcagatgccattataccctttaacactcttcatttccaccttacctctgtaatcacctcacaagggaacataatgccacaactacatcacaggagatatggaattctattatgag

SEQ ID NO: 425581 - DNA, 558 bp, Homo Sapiens
  misc_feature (289)..(388): n is a, c, g, or t
atgagtaatctggcagtgccatgatgtcaggcaagattttctgatttgagggcaacctcacttgctgtgaaaaatcatctagagtagtggttctcaaacttaagcaacagaattacctatatggaaggcctgtgaaaacagattgctagacaccactgccaaagttcctgatccagtaagtcgatgctgctagttgggaaaccttattttgaaaactactacaaagcaaggtcttgctacagctgtcagctatggaaggtatataaccaggagatggtttgcattaagnnnnnnnnnnnnnnnnnnnnnnnnnnnnnnnnnnnnnnnnnnnnnnnnnnnnnnnnnnnnnnnnnnnnnnnnnnnnnnnnnnnnnnnnnnnnnnnnnnnngttccccccaagaattcctatactcagtggttaccactgactctcagagcctgaaatgctcattcatgcagtctctcatctaaatagagtcagagcaacaagggggctgaagggagtaaccccaaggttaaaaatagcccggagtcctcgttgtactgattgacccatag

SEQ ID NO: 425582 - DNA, 230 bp, Homo Sapiens
actgagtaaatcttggcgagtgagagatctgggcgatgagtagatctggcgtcacaggagtgtccgcaactcgtgaatctacctgcaacgtcctcctcgctgatcctgcgcgaatggggatgatgcccttttttcgcctttgtgccttgggggagatgtgttaggggtctgaagcgagatcttcttggcctgaggagtctcagccacctagggcgagattcactcatacg

SEQ ID NO: 425583 - DNA, 379 bp, Homo Sapiens
ccaataaaaggtagcaggaagagaagagataatgatagtgctgtctgcatatgatcgattctcaagctgtattagaattatgtaggtatgtaatgtatagtatcgtaggtttaggttagtttactattagtacacgtgggaaagtggatgccaggccaattagtggaaggagattgattttgaaatgatgtaagttctctggaaaccacttgttacataagggaatatcaagaggccaggggtggccagtagttcctaatccttagagaggagggatctacggagttggaggatatgtagacagtgatctctcttctctggggaattagaggtgagttggagaaaactgtgggagagagggtcagcagacaaggtgaaa

SEQ ID NO: 425584 - DNA, 415 bp, Homo Sapiens
tctatttagtggcctgtgggataatgatagtaaatgctgaggtgttcaatgtttgaggttaggtactagattaacgagaactttcaacagctgaaagaccccaggcaataagaatccctatttgttagaaatccaactaaatcagtacagttgtgacaaaaagggtaaagaaaaagagaacaagtaagccgaatgaaggaggcggcagtgaagacaactatgggtagaagcagttcccttcaaacaaccgaagcaaatcctgctactttggaacttactcctatttccctcctgcactcataatgcctcttgtattgctgctgtaactctcgccatctggacttatctgctgcttggcttctgaatggttttctgagggtttgaaacattttgggaccacagatttcccacctgg

SEQ ID NO: 425585 - DNA, 135 bp, Homo Sapiens
gaggagtaaatcttggccgataagtaaatcttggccgatgagtaaactcttggcgacggagtacacatcttggccgatgagtacatctgggctcggccgccgggacttcctcatcgccaagatttactcatcgga

SEQ ID NO: 425586 - DNA, 454 bp, Homo Sapiens
acaacgtcgtggctgcaaagaacctgaaggagtgtgttgttagttctacaaattgtgaatctcctgttatcctccatgttaatttctaactttatcgctgtacagttggagaagatactttgtatgatatctgtattttaaaatctattgagacttaatatgtggtttaacatatgatctatcttgtagatggtcctgtgtgcagttgagaagaatgtgtaagctattggcgtcgggtatagcatcttgaatatgtctgtgagcactagttggctcatggtgtcgatcaagtcctctatttccttacctacttttggtctggttatttaatacatcattgagagtagggtattgcctccatagattcgttgaacagtctgtttctcccttcaattccgtacattttttcgattggctcttgatggtctaattatttgccacgatttcctcatcg

SEQ ID NO: 425587 - DNA, 202 bp, Homo Sapiens
tacaaaatagaaaggcacattgccactcacatttgccctgtgtatacattggttttaacattgctatgaagatactatccaagactaggtaatttataaaggaaggttaaattgagtcccagttccgaatggctggggagacttcaggaaagttagaatcatggcagaaggaacgcaggacccttctgccaagatttactca

SEQ ID NO: 425588 - DNA, 131 bp, Homo Sapiens
ccccgatgagtaatgctggcagtagtgataaatgtgcctgtgtgagttaactttcagaattaccggcggtgtgaaatactcatattcattagagaataaatggattaatctctatgggcctttggctacat

SEQ ID NO: 425589 - DNA, 225 bp, Homo Sapiens
ccggcccgtaggcatggattgaatgatcgctgatcgcacgaagattggtcaagtcatgtacgcatgcaagtgcatagagtaccagtggagtcgaatattatacatattatcagcgccccatacgatattatagttctacatactcggcgtgctttcattctcagtgattcatccctattatttttacatcacatgtcaaatgtagctcagcaggtttcaaacaac

SEQ ID NO: 425590 - DNA, 144 bp, Homo Sapiens
agatagaatcgagctggtacccgatgagtaatcttggcgatgaggatccggcggcgagatttcctcatcggcaagattagtcatcggccaagatttactcatcggccaagcatcggcccagatttactcatcggccaagattta

SEQ ID NO: 425591 - DNA, 201 bp, Homo Sapiens
acgactcgagccggtaccataaatgcaggagaaatgcttatgtatccagccggacaaacgggctctgatgttgttagaatggggcatgcacatatatgggtttacgctgttcctcttccatctctcattgtggcagatatcactaatcaatgatggcactcatttctagcaagtccatgaggcctcaaaatcttgtcaaaa

SEQ ID NO: 425592 - DNA, 486 bp, Homo Sapiens
attagaggggatccagtagatatctgtacgacatgtcttgtatagacataggacaagcgacagtcagttcccaatatctgccagggagagtcatggagtggttctgccacattgctgagtggtcagcaataggccaagctccacactgcaatgctgtacattcattattgatgtgtgatgggctcatgagaatttattatataattctttcaattttgagtatatttgaaatcttccatgaaaaaatattaaagaaaacctaacttttggtgactgggattccccaaagagatccccatatggataactgctccaagtttttattatcatcagacaactggagagggtaaaattatagttaagtgctgaagtcataaattcaacatggatcacttaagtctatgtatcagttcccatatactaacttcatcagacaactggagaggttaagattatagttaagtgcttaagtcataaattcaacat

SEQ ID NO: 425593 - DNA, 598 bp, Homo Sapiens
  misc_feature (47)..(55): n is a, c, g, or t
  misc_feature (479)..(479): n is a, c, g, or t
  misc_feature (501)..(501): n is a, c, g, or t
gcagcttgtgtatgactttctcctccctggctgtatgccgaacttannnnnnnnnaaacaaatcttagtatggaaggagaaccgtgactctctgaagctttaaaagagcactgaattatctgattcagaataaacaatgtattaaaatctaaaagatatgagaatttcttacaagcctgaaataggccattaagccatggatttaaacactgtggagcacacactgtgctaaccaagttgataaaggagagcacaaaattcaaggaaatagactataattttatatggcagaactgaagttttcatggaaagaaatctgtattttttaagagaaaactgtgattgaaagcaataaggatgacaaaaaaggaggtacagggagtgtctgaaccgggttgaggtacagggagtgtctgaactgggttagaagcaggggttcggtcagtgcctctgggcagaaggcagcagcagcccacggncgtctggctgtcactccaccgncccagcaccacgagggaccactcaagtgtcacccagcggactggggagatgtgttatctacccgtaggcagcccatttcatttgctatacacttgaa

SEQ ID NO: 425594 - DNA, 388 bp, Homo Sapiens
ctcattttgttgctattcagttgtttgagttccttatgtattttgaatattattttctttattaggcagaagctttgtagtttgatgtaatcccactttctatttttgcttttggtgcctgtgctttagggaccatattcaaaaagtcattgcccagacttttcttctagtagttttacggttttgagtcttacatttaagtctttaatccatttttgttgatttttgtatatggtaagagacaaagggtctaatttcatttttctgcatgtagataggcagttttcccaacactgcttattgaagagactgtcccttgcccattgtttgttctcggctcctttgtcaaaaatcaattggttgcaaaggagccaagatttactcatcg

SEQ ID NO: 425595 - DNA, 555 bp, Homo Sapiens
  misc_feature (369)..(369): n is a, c, g, or t
  misc_feature (501)..(501): n is a, c, g, or t
  misc_feature (525)..(525): n is a, c, g, or t
  misc_feature (533)..(533): n is a, c, g, or t
tttgtaagctcatcgtgtacaaagtgggatttaaggctgtgtaaacagattatgaattattgtttgaatcattcgttgataaaatctccaagagaagatctggcctctcaatttgatgtgtcattatgtaacaaccgatggtagaaaaatgtgcatttaggtatggtgaaggcagcttaggctgggttcaggcttctctgtgatcacagtgcatttagtctgtcggcaacagatctttgattgcttccctctgatcaccttatcccaggaactgggcattgggtaagaacttgggatcctcagaaattgaaagcagtcttgggtgattcatctacggttggaatcaagacctgggcagtaccttgtttngcagactgacctaagccaatttgggtatgctttaattagtgggtttagtttggtagcaacaggtaattgccaaagcttagaagtaacctttctgccaagatttactcatcgagccaagatttactcatcggncaagatttactcatcgggccaatnaccatcgncaagatttactggggatcctct

SEQ ID NO: 425596 - DNA, 529 bp, Homo Sapiens
gggcatgcagctgggccacggccgtcgttgacaccgatcggggacgtgggctaaggaaggcatctggaacaggggactccagaggtactacaccacccttcagaagggaaaggacggaaggatgcagaaaaaacagacaatgcaagaaaacaagcaagcctaacagtctaagaaaaacaaaacaaagagaataacttctaaaaattgacaaaagaaatgtggcatagtcatacaatttagaaatatggaggtaacccatagaagaactaaaaatagaagtagttaaagagttaaaatgattccctctggcgagaagacctgaggtaaggatgaccaggacaggaaaatacagctttactttataaattctctgtgctgctggcttttcggaaccatataaaggcataattgtgataaaaatttaaaaactgattttaagagaatcataacagcttactaggttcttatttaggtcaaaagtgacatattcttaggtcagtgattccaggtactcccaatacttactgaa

SEQ ID NO: 425597 - DNA, 161 bp, Homo Sapiens
  misc_feature (77)..(77): n is a, c, g, or t
  misc_feature (119)..(119): n is a, c, g, or t
  misc_feature (143)..(143): n is a, c, g, or t
tgcatgatagaatcgagctcggtaccgatgagtaatctggcttctttataaactgtttaggtcactctgtggaaaangagtggctacaagccaagatggtgctttttagaagagccctngatgggcaggccgtcaggttcctngtgtgccagtcaggtgag

SEQ ID NO: 425598 - DNA, 185 bp, Homo Sapiens
ataccagcgtgacaggtgagtccacacagtgtgcgagtgtgtactgtgtgtatgcacatggggaatacaggtacgtagaggcatgcacggtctgagtgtgcgtgttgcacacggatgtgtgcagtgagtgtgcaggcatgtacaggttgctcctgcggtgggagtgtgcctcgcaggctcggtga

SEQ ID NO: 425599 - DNA, 448 bp, Homo Sapiens
  misc_feature (16)..(16): n is a, c, g, or t
agcggggacaatcacngccaaaatagtgttaggtatgttagacgccagcaaggtcacgtatgtgacagtgctactcccagcaagctatatagcatatgagaattctgtgaagccctttgtactgtgatcctaaaatggagattgcctagtttcgctagaatgattacaggtttattaatcatgcatcttttcagttcacaatattttatatatgagtaatctgatacttagtcacattttattatatgaagtgattgcaagggtcagaatccttatttgtgaatttaggctcaaataagcacatattctacagtgaaaatatttatggtttgattagtggttccaaagagaagaagaaaataatattttaatcttaaaaaggaaagcaaggtagtagaggttctagaatttctagaattcatttattggacgtatcagtcaatatctc

SEQ ID NO: 425600 - DNA, 164 bp, Homo Sapiens
agcgggtaacaatcacttcgtgcaaaacagcagtggttgttcaaacctaacaatgtgattctcaagttctttacttccttttgtacttttcccgctcaatctcgagttctttacttccttattggacttttcctgctcaacagaagacttagatctcttcatag

SEQ ID NO: 425601 - DNA, 155 bp, Homo Sapiens
atcggtacatcagcttgagaggcttcactcggtgcacgttaaatcaccaggacgcatatatcttcactaaggtgcatatcagacaccaggacgcgcagtgcttcacacggtgcgtgtcagacatcaggacgcagagagcttcacacggtgcatat

SEQ ID NO: 425602 - DNA, 111 bp, Homo Sapiens
tggtcctaagataagagtaattcatcctggatggcacgacagactggcaaatgttgttctacctcctgttttcagtagccccttcagtaaatggtcatggaaatagcaata

SEQ ID NO: 425603 - DNA, 484 bp, Homo Sapiens
aggggacaatcacttatggtagggtatctgagtatggcgggagagcagggaaggaacccccagattccattccctctgtttgtctgctggtgacagcacataagcatgccctggacacccccatggacccaaatttagaaagtggataaattagggtgccattattcattttacaaaagaattcactgcaggagtcctttaaatggcaaagtcccctggtgccttttagcatccttatagatcaccagctactttgacagagaggctgggcaggcagagaattaaaattacagtgtaaggagccactgcccactgcagctcaatcccaaagaaaatcgcatctcagaaatgatggctatagctgacaggttctcatttactggcttttcaggtagggtgatgtgtccggcaaggccactcgatggcaggagagggggagtgagtggcatcagcaacctggggatgtgagctgtgacgagtacat

SEQ ID NO: 425604 - DNA, 229 bp, Homo Sapiens
  misc_feature (197)..(197): n is a, c, g, or t
agcggacaatcacttgggactgcatccaagagcagtggcattgagcaattgtagtacatctttatgcctacgtgtgccccagaatcttcagggagttgcctgtcttcaagagagagacagacttaagccatgaggctacaggcagaccagcatgaaataaaaatagagagcccttctagaattctctggaaggcatnagctctaaagtcagtgctggtggtgccaaagt

SEQ ID NO: 425605 - DNA, 190 bp, Homo Sapiens
gaatcacttacattgataaggcagttttcaaagtgcttttataagtatttgctcattgggtcctcagagtaacccttgaggtagctggtggctcaccagtgtggcatggttgtgattgaggactacttgtaccatagcgtcttacgtccaaagggcgtaccgaagctccgaaattccgtaaatcattggt

SEQ ID NO: 425606 - DNA, 367 bp, Homo Sapiens
  misc_feature (47)..(129): n is a, c, g, or t
agcggggacaatcacttactagttctattaccttaggtaataggaannnnnnnnnnnnnnnnnnnnnnnnnnnnnnnnnnnnnnnnnnnnnnnnnnnnnnnnnnnnnnnnnnnnnnnnnnnnnnnnnnnacaaagctctcagcactgtgccctgcatatcaatgctgtaattactccaggatccagaggaagaacctatacccctcgcgctctctgggtttctgcacgctctgcccagtggcctggcacctcagctttagagggcaaggtagagccaaccattaatcagatagtgctgggaccggctggggttttctgtggcatcccgtatcttcccatcaagtgattgttccccgctgggtaccga

SEQ ID NO: 425607 - DNA, 145 bp, Homo Sapiens
tccataatgttgttctttttaacactgcttccatagaatgaaaccctcaagactgagtcaatggttttgtaccaggtgattcctgcttgtagaaacattcgtagttccagggtccactatggggctaaactctgacctctaaagt

SEQ ID NO: 425608 - DNA, 499 bp, Homo Sapiens
caggtcgatctagaggtccccagcgcggaacaatcactggagatgactggctctggaagtccctgttctgaacatgttgtacagagggatacagacaaggcggaggagactgagggcacccagctgctactcctgcatgtcatcccctgaacacagtgtcctctgaactaactggtgattatgctggataaaattggcctctgggagaagtgagggcaggtggtgttcatctgaatgctggagagtgtagagtgtcttctctaacaaggctaggtaagtcatcttcaggggaggggcttacaaggactcattggggaagcgacccctgtgtatgcaggtggctatgctaagagctggtgatagagcaggctgtctcggtggagggctccctctcggactcagaggcacatttaagagcttcattgctggtggctgaaaagcacagcttaggtccttctgtgtatcttatagagatgaaagtaaagggcatcgggaacca

SEQ ID NO: 425609 - DNA, 128 bp, Homo Sapiens
ctgctttaagcatagagaacattaaggtttaagtgaggactgcatttgctctgaagaattgaatggcagaggagttggggtgtttttatgttagtccctttaaaaatgataagtgattgttccccgct

SEQ ID NO: 425610 - DNA, 489 bp, Homo Sapiens
ggatcccagggggaactactcactacattatgacgagatatgtcatgaacttaagtccataaaacgttattctgacaagacttggaaatcatttcgtagacttaatcctatgtaaagcttctatccatttgtatccgtaatgcaatagcactgcaatcagacgggctaagtcaattcaattgctaactcttctgaaaacttactctggacacactaacacgaagtaccacagtggcaaaagtaataaaatcagttttgtgcggctcctgccaactcttaacttggaaccactaagtaggtcaggcccgaggcgggcagagccccaactggactgcgcgtcccacaacgggcacctcacattttggcacaactccaaccaaacgaaacccagccgctcggagcccactccaccccctacggcgggacgttagaggccgtctccgcgtttcaccgactaggactgtggctcccgatagccgggaggccgaa

SEQ ID NO: 425611 - DNA, 154 bp, Homo Sapiens
agcggggaacaatcacttccgggaggcgggaaaacgtgtggtttgggacaagggcaggagtcgccagactccagcgggcagggatagcattggcttccctattcagcccgaggatctggagtcgtgtcctgcctcccaagattccagctggcat

SEQ ID NO: 425612 - DNA, 129 bp, Homo Sapiens
agcggggaacaatcactagtctgcaggtacaatagaaacgctgtacatggcatttaaaggcaaatgggattttcttcatggcagccaccctggacttcagacttgcaggccccagagcacagtttatct

SEQ ID NO: 425613 - DNA, 238 bp, Homo Sapiens
agcctctggaacttcagtcttcctttctgtaacggctacttaactttttacaaaatcgtttctaatcaatgccataggctaggagaccccacctcctgttagaactatctgaattaggagtaaatgagatctgagtcttttctgtgaataaatgcttcctggaagcatttttgctttgtggttgaactagaaatggctagctatattggataaacattaggtaaagatcttcaggata

SEQ ID NO: 425614 - DNA, 138 bp, Homo Sapiens
tggtccgaagacagaagagggacttcatgattttaggatttctgaggtagagcgggttgatatctatgatgcaacctaggaaaacttaccatgcctccctgttaaaggcagaataatttaatataaagcaaaggctta

SEQ ID NO: 425615 - DNA, 202 bp, Homo Sapiens
gggtgacgagatctggaagtgcgcttcggctatacggcatcgtcttcgcctccgacatcgagggcgcggatttcgccttgaccccggccgatgtatggtccgccctggccgcgcaaaccgtgcaggacggcgccctggccgccaatgccgccaagacctgggccgatgtgaatgccgagctgcccgcgcagcgactggggca

SEQ ID NO: 425616 - DNA, 119 bp, Homo Sapiens
tataaaatgggttgagcgaagaaggtcttggtatagcttagggagatgtatcatattgcttatagactcgaaggcaatgggtatggatgaggtaacagaggcagtgatgtagaaatgag

SEQ ID NO: 425617 - DNA, 506 bp, Homo Sapiens
  misc_feature (246)..(418): n is a, c, g, or t
cagctcggtaccgacgctctctctgtggggctggcctaattaggtgagcccctaagagggtcggaggctgttcctgaagacagagattctttggttgggttttgaagaagcaaagggctgtgttgtggagagggccacacataggaaacagtgggtggtctccatgagcttgcagcctcagtgctctccctgcatgaattgaattccaccaacagttagtgagtttggaaggggatcccaagcctnnnnnnnnnnnnnnnnnnnnnnnnnnnnnnnnnnnnnnnnnnnnnnnnnnnnnnnnnnnnnnnnnnnnnnnnnnnnnnnnnnnnnnnnnnnnnnnnnnnnnnnnnnnnnnnnnnnnnnnnnnnnnnnnnnnnnnnnnnnnnnnnnnnnnnnnnnnnnnnnnnnnnnnnnnnnncacacctgtgaaaccttgcatagtatatgaatgggttcccccagaggtgggctgagccccacctgaaaccactttgtggaggaggccc

SEQ ID NO: 425618 - DNA, 291 bp, Homo Sapiens
atagtgtggtaccgagctctctctgtgggggtgcaactaaaaagcggaaaagcacacctctgacacagtgacattgctcatccaacggtctggtgggtggctcgggaagggagggaggaggatggacaggcacgcaacacctggtctgggagaaagccttcacacctccaaattccccataccccttcctctcccttgagacaaccatgtggtcattgtccagcagccaggcactcattctagaaaatgctctcagccttgtcccaccctctgtccccacagagagagcgt

SEQ ID NO: 425619 - DNA, 163 bp, Homo Sapiens
tcagctcggtaccgacgctctctctgtgggggagagaacaaaagagacccgcctgcaagatttcaagtatcaagtcagctgggtaggtaaatcaggtccctggcttccaacggggctcgtttccctccaccttcctgttgcctccaggtacctctgtgcctcc

SEQ ID NO: 425620 - DNA, 145 bp, Homo Sapiens
tcagctcggtaccgacgctctctctgtggggagctgcgtacaggagactgagtctcgaatagggcacagcttgaaaggatgtttgaacaagaagatctttatgccattagtatctagcaagagacaaaccttggaaacccctctc

SEQ ID NO: 425621 - DNA, 367 bp, Homo Sapiens
ggctcggtaccgacgctctctctgtggggagaggcgatggcataggaagggcatgaaagagccaacaagaagcttcaagacactaacttcatccacctggccactttgcccaggtggactttgggcatcaggaagtgttttatgccactgagtgaagacatcttctcccattggatgtgcttatgccttggtaaaataagaaagccaggctagtgcagctctaaagttcccttcagcctatggtttgttccccttgaaggaggagttgatgttctgcttgccctgagtcctctcaaggattcagccagggttgagcatgagctccctgattcagaagttcctcatttcaaccccacagagagagcgt

SEQ ID NO: 425622 - DNA, 201 bp, Homo Sapiens
ttgataatcctcaaaagtggagcctggcaagcccactcaaagcttcagatccacaactggcacagcttcccttccacagattctataggttaaaacaatcaccggaccagcccagattcaaaagaaggagaaacaaactccacccctccatggaggaagtagcaaaaataatgtagacagtttttaccctttacatctgga

SEQ ID NO: 425623 - DNA, 503 bp, Homo Sapiens
catctcgatcgctatatcgtctggatgtgatacgtcgtggtatgcgtttatagtcgaccgtgtcaggcttgtaccattgattattggtcgtctactcagaacgttcagaatggggctatcctgcgagatccaaacatttgatttctattgataactatctgttgaatgaatgggtgcactggtctgatcagggtgtgatccaaggcaggtgtccatgtcttccaactctgaacctccagaatggagcaggcagcacacagcaggctctgagtgaattagccaagaatttctaagccagaagactatgtggggaaggggcagatatcttctgcaatggtatccagaagatctggattcaagccctgactccaccatgtgttgtgttatttggaagcattaagaatcctctgtctggggccacatatgcagcatcagaaggaatgtccgtgaaacaaacaagaggaccaaagaagataagctgggagaatccctgagactgtcca

SEQ ID NO: 425624 - DNA, 524 bp, Homo Sapiens
taaaatcattagggaggctgggggccaaggcagcctctttttctctggggacagcactggcagcccctgacccacatcatggggtgagcaagtgtccccagagctcctgtccacaggctgatggaggtgccccgggcctgggagcagcacggcttccccagagacctcatgggctccgtagtgacatgctccctcgattcccaccgctaccaggcagagctggcctccagccccacactcctctcctcgtggggctgtcctgttcccctgctgggccgcctactgccctatgagcaggggcaatgtctgttgttccttctctggaacatgataggagcttctcagaggatgctgtgtgtgtgttctcagcacgcagattctgcccagtgactcctgagtggcggcttctccctgcgttctggtctcagttaccttggctcatcagttctgtgcccctcactcaaagggaatgaacttcctttcgcacaggttcaagtccccacccttctcgggaacacatctcc

SEQ ID NO: 425625 - DNA, 558 bp, Homo Sapiens
cgcgacaggggtacatcacttcaaaatcctacataaggtaaaaataatctcagatacaagaatgtttaatgctcttcttagattctgtatttttcccctctgattttatactaacatacacacattttcactttaaagaatctcatttaggaggcttcattttaaaggagtatatggcagtatttgttcatttaaaaaatggcatggggaaaacaaaactgactttgaaaaattccctttattaacttactgattacctttcaggaaatgttccagccaccctctcctttttagttgttgtaagtctgtgacacaccattaaggaccaaatcatgcaccatgtgcttacagcatagctcctcttcctaaccttttcctttcttcctcgcccaactgactgatacatgcaacccaatccagaaatcaccacacatttggtggtaattcccctgaattttacttgcaaatgacaaaaatgcaaaaatgtcaatttgcttaattttcctaaagacaagggcaacttcacacccgccatctttttaggtttagagctaagag

SEQ ID NO: 425626 - DNA, 526 bp, Homo Sapiens
  misc_feature (72)..(370): n is a, c, g, or t
gagctcggtaccgacgctctctctgtggggctctgacacaacaggattaggttttataagaagagactccannnnnnnnnnnnnnnnnnnnnnnnnnnnnnnnnnnnnnnnnnnnnnnnnnnnnnnnnnnnnnnnnnnnnnnnnnnnnnnnnnnnnnnnnnnnnnnnnnnnnnnnnnnnnnnnnnnnnnnnnnnnnnnnnnnnnnnnnnnnnnnnnnnnnnnnnnnnnnnnnnnnnnnnnnnnnnnnnnnnnnnnnnnnnnnnnnnnnnnnnnnnnnnnnnnnnnnnnnnnnnnnnnnnnnnnnnnnnnnnnnnnnnnnnnnnnnnnnnnnnnnnnnnnnnnnnnnnnnnnnnnnnnnnnnnnnnnnnnngaaggcaaaaggtaatgacattttgacactaataaagtaggaaggccatccttttagagtaagggataatcaccaaggtattctgtgcctgcaggctgaggagtaggggaaggaggtgaacacgtgagccatccttgtctccagccccatcctgct

SEQ ID NO: 425627 - DNA, 260 bp, Homo Sapiens
cacacacctccagaggattccgatgctcccaaagttagaatcgtccttctttttctaccactgttcccaaggtccttaaattctttcaatcccttgtaccacccactaagtcatctcctgcagcctcccttttacaggttgtgttgtctgtagtaagtcattgcagaaattctctactggaaccatatgctaactgtgggtaggagaagaacaacatatgctcaggtggtagagtaactaaaagcaccccaagagagcgt

SEQ ID NO: 425628 - DNA, 132 bp, Homo Sapiens
  misc_feature (37)..(37): n is a, c, g, or t
aagtcggtaccgacgctctcgggggacagtgagaatnttggtacagccaggtcggccttgagaaagcaggctgtctaggtgaggtctacgcaaggtacagttcttgcaccccaagtttgcatttggacttta

SEQ ID NO: 425629 - DNA, 168 bp, Homo Sapiens
gccggtaccccctgttggaaagtttctccagttacgcggtggatgatacggcactcaaacgttccaagaggctgtcagggttcacttcaatattgataacaccttctagttcaatgccaagttcagccaatgttttgtccaaggcatgagcttgttcaattgtacgtg

SEQ ID NO: 425630 - DNA, 284 bp, Homo Sapiens
ctcacgatacgtaattataggcttagctatcacagtaagcaatttacatcttgttattcacctatcttagaaaccagtcacatttttagctaaggaactatcactgagagtatcaaatctgtaatgtctacctatctttttgaattttagatatggatactttgactttaacttatactcacaatcatcactatagacattcatccatgcattgaacaattactcaaaacactgtcttttggaataaaaaacagacacagtctctgtccccacagagagagcgt

SEQ ID NO: 425631 - DNA, 333 bp, Homo Sapiens
tgagctcgtaccgacgctctctctgggggggagtaggcataatgatatgacgggagaggagtgaggctccctgggtttcacctatgaaactgttacaccacagccctcccctccataaccccagtccatcagtgagggagtgcccattagccagatacactgatctgtctgttaagaggtaaattggaatcctggcatttaggagtcactgtggagacactggcaagcttgagggagctatgaaaaagagcaatgtccaatgccttcttgctcagggctccatcatggcttcgtggcatccctccagctccacgtgccccacagagagagcgt

SEQ ID NO: 425632 - DNA, 473 bp, Homo Sapiens
  misc_feature (400)..(400): n is a, c, g, or t
gagctcggaccgacgctctctctgttggggcaagtaaacttcgtgccttatttctcgtctgtaacacgggcaattacagtagtacatacttcgttatagtgaggattaaatcggttaagtaccagtaaaacgtctagcagaagtgccaaacacacagcaagcattcacgtgttagctgttgtgtcattatgaccattcggattaacgcactccagttgtcgtgcgagttgcgcttggtaattagttctcaatcaccttgttcttcataccttcttccctggccgttaagctctgtgccatcttttagatgagaggcttgtcctgtctccctcagtgcccctaggcctgtgccctcacatttcacttccacagcatggagggaccacaacagggtcagaancaactacaggatcaagttcaactgcacacaactccctccaccatcctgtctctgtggagcccgtcacccccgt

SEQ ID NO: 425633 - DNA, 438 bp, Homo Sapiens
tcggtaccgacgctctctctgtggggcagcagcactgcatatgtatccctcacactcatattcaccctgatgctccccactccccactcaccatgagacagttttaaaagaattgaccctaaagagttcgccatctgcctctcacgcttccccaatcctctccaatcagctgttgcccctaggtatccccaggcatcttcttaatgactagttgtctctgtgttgccaaacccaacactcagttccaatgcttgtctgccttgagacatcagtgtcatgtttggacagtgagtccctgcctccctgtgaagcacgtgcctctcttggcttcctggactgctctctctgtcatcctgattcactggctgctctttctctgcacctatgtatttttctcctcaacttccctcctgtaaacccaggagttccccagagcgt

SEQ ID NO: 425634 - DNA, 106 bp, Homo Sapiens
atctagtttcgggacgggggtcattgtggggaaacggaacatgtagagtagaaaaatgaactactttagaacaacaaggctaacaggcgaaagcagtgaatcaagt

SEQ ID NO: 425635 - DNA, 134 bp, Homo Sapiens
acctcacgtaacaagaggctgtcaatcacgagcacccaggttggggtgaggccggccctttgtggcttgtgccactgagtgggctgtgcctcgggcttggctccacctcaggtctccacatttgcaggatgtca

SEQ ID NO: 425636 - DNA, 156 bp, Homo Sapiens
tgtctcagtttcgggacgtgtgtgggggtagctgagaggggctgcaagcgtgtctggactctctggatccactctcattaccacgtgatcctactgatctgacgccatctccggaatcggaacaggatctgcgagccagaagatgcgggggtttct

SEQ ID NO: 425637 - DNA, 463 bp, Homo Sapiens
caagcatggctcgggtgaagttttaaactctgttcttctctcttgcctttctttggggacattctcccctttgggatctgtcctggacttcgcaggctgcgagaacttgttgacaagtgaaagctcggtagagccccggcttggtttgtggtctgcttatttttgcaaagtgactgttcctatttgcgctggtccttatcggtgcccctttgggggacttcggcactgatcagcgcgctgacagccgccgtccgggctgcgggaaaatggggcgcgccctccggggggcgagtggctgtgcccttgctaatttcctccgtaacctttaaactctcgctggaagctaccgccgcggctggtcacgtgaggcgagccctgggctgctggggaaaaatttcctcggctgggagccgggaccgggccggcggccggcgagggactgccccgtcccgaaactgagaca

SEQ ID NO: 425638 - DNA, 179 bp, Homo Sapiens
tatctcagtttcgggacgcacgctctctctgttggggtgctttgggtctgtgtccctgttgttgatctgccttgcccttgtgtgggtgtgcagttggtgtctgtgccctagtgtggggtgcctgcgctgtagtgggatgcgatggtgtctgtgccctgtgtgaggtggctggcctatgt

SEQ ID NO: 425639 - DNA, 428 bp, Homo Sapiens
  misc_feature (310)..(368): n is a, c, g, or t
ttcgggacgctactgtaagagtggtgaaactgacccaaggaatatctccaattcctaaatccaaggtatttcatagagagtgaaagatagcccagagtgtggtgaatgggaaatgccgagagcgaggaaaacagaaagaaaaccacagagagaccacagaggtggactgtgctgagtatgctggaaggaggaacggaaaagatagattcttaagccaagcaaaaagccaagggatgctggtggcaatgtaggcatggccttctaagatcttgagacagtctgaggcagctcctttaagaagctgaattcnnnnnnnnnnnnnnnnnnnnnnnnnnnnnnnnnnnnnnnnnnnnnnnnnnnnnnnnnnntccctgttcacagcaccaacttggccaccgtctaatggggttggccttttgttcttggta

SEQ ID NO: 425640 - DNA, 163 bp, Homo Sapiens
tgtctcagtttcgggacgtcatgattccaaccacatatcctccagcagcagcagtttgccgagggtgaaaagcgaagcctattgcctgtcgcttcttccaggaagtacgagagcggtcccttgtgcccgtgtacgcgctgtcgtacctctagagttcctcgct

SEQ ID NO: 425641 - DNA, 225 bp, Homo Sapiens
atatgatctgtaggaaggggaagagaatcttgctggagggatgtctttgagagaggtaaagaggaacagactcacgtggttcagcggtcagtcctcagggcactagtggacaattcatccatactagaatgctgagcctgttgggtacaggatgccagcaggtaggtgaatgagccttccttctggtctgactcgcgagacggtcggcgtcccgaaactgagaca

SEQ ID NO: 425642 - DNA, 167 bp, Homo Sapiens
tgtctagtttcgggacgggtaccaaagtcactaacgtgtccaggttaactcctggaaggcagcaacattcttgcttttgatggtacgaatatggcttctttcatttctttggctctttatggtacttcttttgagtggggcgaggctctagctttcccctcctcctt

SEQ ID NO: 425643 - DNA, 167 bp, Homo Sapiens
tgtctcagtttcgggacgagccggtgttcaaatttccctaaccatcctaaaggaatgtttagaacagttgtttcattggaaagaaggtcaaaacaaatacattttacatttttagagccagtcttgaactgtaaagtgtcaaaccatgtagtggggtaaggaggtgg

SEQ ID NO: 425644 - DNA, 308 bp, Homo Sapiens
  misc_feature (44)..(44): n is a, c, g, or t
tgtctcagtttcgggacgttgtgggaccccagaggctgtctgtncacttggcttctggaggacatcaactcggtgttcccagcctccgtgctgtggtcacagctgttgtttgggtgctgaacaaaggatgctgtagtcttggccctgtggagcttggctgttgggacaggaggtacaacggggagtggtgcctgtggacactggagtagaacccaggacatcagggcctcgggctcatggtcctatcaccctggatggtatacgcagctgcacacgtggaattgctcaaacaattcaggcccaacttt

SEQ ID NO: 425645 - DNA, 249 bp, Homo Sapiens
tgtctcagtcgggacgctagacactgtgacaatggttaagtccattcttcatacacctgcatttggtgcgggcctatttcctcctggccctacctcctaccttactgcactgtagcttctggaaggttacaaattccctcacataagcagccactccctggaacactgtccactctgtgtgctggaactgaggcttggctttgtcctgctttgtgtcaccaccctctccaggggaagaaacgcctcact

SEQ ID NO: 425646 - DNA, 161 bp, Homo Sapiens
tgtctcagtttcgggacggtgtgggggtgtgctgcgagggcctggacgcgtgtctggactctttggcacagctctcatccacgttttcctctgctctgacgccagcaccggtatcggcacaggatctgcgatccagaagatgcgtgcggttctcccggcag

SEQ ID NO: 425647 - DNA, 124 bp, Homo Sapiens
ggaaaccaaggctattttagtaaagcaacttgcccgcctcaccgagctaggaagtgttaagagacagcatttgcacttggcaatggactccagagatctctgtcctcgtcccgaaactgagaca

SEQ ID NO: 425648 - DNA, 375 bp, Homo Sapiens
aggatccccaatcagcatgacaggtgatgtcttcttttatgactatgtaactgcaattgtaagaatgtatttcgtgtcagtatttttggatggatgaataattttttaggttattgaaatctaagatcttaactcaagtaaaacaaggtttttaaataaaatttgatccttaagctcattctatgttgccaagacaactcagcattaagcataacatttgcttttcaaaaagcatatcattaactataatccccaccatgagcagctgagtagaaaggcaggttgaacctgaactccaaaaccaacctaaaactcagaaagtggaaggagcatcggctaggccctggcctctgggattcagatgcaccgggttca

SEQ ID NO: 425649 - DNA, 120 bp, Homo Sapiens
tgttagtttcgggacgggacccttggagggaccccggacttcatctgttttgtatggatgcagagtcctggctgaggcgctaacttctaccctcccctgggttggactaaatgagctctt

SEQ ID NO: 425650 - DNA, 138 bp, Homo Sapiens
tgttagtttcgggacgtaattttggctgagtctttcgctatcttcacgccaactggcgcctccttattctttatctgccgtcttcctaacacgttcgggtcgagtgcctagattatcggctcattgtctctactctga

SEQ ID NO: 425651 - DNA, 200 bp, Homo Sapiens
tgtctcagtttcgggacggagtgtgtgctctggaaagagcagttacagtgtcagggctgtcatcacaggacagcctttcagctctttgaaaactgcatcctgctacattttctcctcttcagcctggttaccaccgggtcccttgactcattcatttgctcatatattcattcagctggtccataaagacctgccaggca

SEQ ID NO: 425652 - DNA, 270 bp, Homo Sapiens
agtctcctccagcgtcccacggggtccactggtccgaggaatcatgacgccggtgctcagtctggagagcccctaccctctgtccccttaccggtgtctggtggccctgggaggtggctgtgatgtgcctctctgggcagctttctctgctcagtaaattcaagatgatctcagagttgtcatgtggcttgaaggacaggcatggcagtacaggggcctgatgatgtcgcctccccccacagagagagcgtccgtcccgaaactgagaca

SEQ ID NO: 425653 - DNA, 487 bp, Homo Sapiens
gccttctaatagagacaacgctcgaggtttaagcacacaaagggagtctattacatactagttgaactacttgttttttccccctgaatctccagaactatgtcctgtgtcctctctaggtctccattacttccacttacctgttttcagaagcccagccctgttgcttagtgctgtgataatagttcttaattgaatacctataatgctagacataccacaagccttgtcacaaatagaatggtgacaatgcctgcaaaaattcttttatgtaggagaaaaagcaggaatttaaataggaaacttgaacttttaatcaatttgctgctattactaaaattagtctttacatagtgctctattagggggaagcagaatgatttttatatgatgaatcttttatcctttgtaagttgagtgaacttcctggattgatataattagagggcctgtcattatgcctggcatgggaacctgcatttcaagc

SEQ ID NO: 425654 - DNA, 492 bp, Homo Sapiens
ctcaacgctttatacatcttgaatcataacgaatatcatgtttccaggtaaactgaaccattcacattaatggtacctacgaggttctttttttcctagaaaatgctatcagtgtatcatattaggctggtcaagggcatacactgggttgctcactgatttgggtaaatgatccaacctctctgctcaggttcctcgattgaaaactgggatcacagtaactcctgagtttactgtaaggactaattgagtaaagagatatgctaaccattattacattcccaggtgatcatatcagttaagcatttgttaagcgcctagcataacgtgaaagcactgttccagcatgacaacaggcagagacaacttttctgatggtgacaagtgctatagagagaaagaaagttggggagagggataaggaattaatgtatgtgtgtcacgaggtggtggcgggagatgccttttagtacaggagagcttggggtatat

SEQ ID NO: 425655 - DNA, 105 bp, Homo Sapiens
ccgtaagtgtatgaaaagtgaatctttggtaaggatcaccgacagattgaccggtattgcgcagggaggcttgacgcttttcgccgattgccgcgacgaaattgg

SEQ ID NO: 425656 - DNA, 566 bp, Homo Sapiens
cctcgaggcttagtacttcatgagaatagagaaataagtcttgcatcttctcaacacgaaatcttgtaagtcttcctatatctgtacctatcttcctttaacaaaaatgtaaagactgcttcctcaattataaaaggagaagtactctccttttaatcattgactaagtcattaagcattggttatgtatactcaggaacttattcatatattctttctcaagtttatttcttctgtcatccccttgtgtctagtcttcccctcctctcctggatcatttctatcagcatacaaacatgatcaatttaagaaaacttttgattccgcagcctcatccagttactgcctcatttcattgttctcattttcaaattattcaagagttactgataaatgccaaatctattcccatatctccatttactcgtaagtccaattcaatcaagctccagccccatcatcatacccaaatcatttatgtcaagatcacagccactgtcactggtccttctctcatttgaactttcaacactagtaaggaattgactaatttctcctttcggaaa

SEQ ID NO: 425657 - DNA, 255 bp, Homo Sapiens
ggagaccaatctgggatgtgttagctactttgagtatagcttaccctaaatctggctgtataaagcacttttattcagatgttcatatttcagcttattggatgaaacattaattctttgctttatgcaccatagcaagtaatgaagttatcaccctaataattgcaattttgctttgttatttgtggtttaaagatttagaagagtgttttatttatgaatttgctttcagatagaagtataaatgcgttgtag

SEQ ID NO: 425658 - DNA, 311 bp, Homo Sapiens
gttctggagcatgccacactcaaacatgtgtgcacacaccttctgtaggctgaaattccaacatctgtgtcttagccacttaaaaccatctctagacacctaactccacatacataccactgtgtgaatgagcagctaggagtagctgtcttcagactaactcctaagttcactatccttgtaacttggctgtaatcaccagaaacctcatgttggtaacctctatagctgatcagatgttccctgatatacagtaaattttggccataaataaaagacagttttacattacccaatttaggcacctgtgt

SEQ ID NO: 425659 - DNA, 180 bp, Homo Sapiens
cgatcgagctcggtcctccattcatattatcttgcatgatgtcatttctcatcagaaattactacctttaaagcggtaggtttaattgataacttcttttcaatgtggatgtcagcttggattgtggcgtggatgtttgcatttccaagtgtattagtctgtgcaccgattgctcaaaag

SEQ ID NO: 425660 - DNA, 101 bp, Homo Sapiens
cggactgggtatgcgatggagtctgcgtgatggaaatggtgatactctagactcgatcgtgtgaagcctgatatctagtaacataggtacgtcgtttaaca

SEQ ID NO: 425661 - DNA, 163 bp, Homo Sapiens
cgatcgagctcggtaccacgcggggcaacaaaacggttgctccaataatggctatttcatctgcatgctccttcggggataggttcagtatcgtgacgcaggccgatgtgcctgctgcgtggtgtttactctagtccttaacaatagccgtgattagtgccat

SEQ ID NO: 425662 - DNA, 134 bp, Homo Sapiens
ccctgcagtactgtggtgtaggatgtggtaaagggtagcctgggactgagtattctagaaaaattgctcagccttgtgctgtgcacacctggttctctttccagtgttatttatgtagctgaggaccatcgttg

SEQ ID NO: 425663 - DNA, 158 bp, Homo Sapiens
gtcccgacctgggtgcgcggcgcgctggagccctgggcgtgaacggcgtgatcctggactacaacctgctggccaaccgctacatgacgcggcagtggcggcaacacggccagctacaccctgtacggcaccgccggcgtgaacctggggtaccgagc

SEQ ID NO: 425664 - DNA, 226 bp, Homo Sapiens
cgaaaaaccttggtgcccctcgaccagcgtccttgtgggtacaggttcaggacttaaggccaaaggacatgggcgtgagggtgtacgccggagcttgacccgtttgccttgttgaattgcaagcacccattatggcactgcaacatacggtttggcgaacgcttttcggcagtttgccaacgcgatgcgataatcagggtctttgccgcaagatgcatccagttac

SEQ ID NO: 425665 - DNA, 147 bp, Homo Sapiens
ggacacatgcttttcaacgatgatgtcggcaccttgcgcgacgtttcccgcttctttcagcagcttggcggcacgcaccgccagatcgtcggcctcggccacgcccgccaggccctcgccctgccggcgcacctggccgtcttcacg

SEQ ID NO: 425666 - DNA, 113 bp, Homo Sapiens
catgcagttccgcaagccgttgcagcacctgcgccacccgcaatcccggcagtgatgtatcgacctcgatggcaagacactcgcgcgtgtatgtcatcgacgatgttcaagca

SEQ ID NO: 425667 - DNA, 276 bp, Homo Sapiens
tgtagcgactcctagacggacaggagtggcaggatggatccccagtgatgccccagagactcccattctccaggattggacagatcagttccacctgcgcagctgtgcacttcacattctttcaatgaaaacaacttgccctttttactttaaaaagtgacttagaaaaatgttagaccactcccctaagtagaaaactagctcttttactatatagggaagtgaaccagaaaaataaaagcatagataattaaaaataaaaggtcaaaagcccag

SEQ ID NO: 425668 - DNA, 415 bp, Homo Sapiens
ctgggggcagagagtgtagtggggtccctcccagcctccccaacaaatcagagcttgtttgctgcaaagctggaatgaggcccaccctgatggggcctatcttcttgccaccacaatcaagtcttccagaaggcaaacaggtaaggggaggaatgcaatctgccagacaggaagatgcaatggctgatcttggacaaacagctccaggggtggcaggaagttgttttgacatctgtcttctcacgtcaaagagatcctcattccaagaccacaggtgcctctggcctccagtaacccacatgcaggttatataaaagacatgccgcaccgaccatgctacaacacagctggccttgggacccccaaacctaccacctgcctctccctgtaaatccaaaggaaagcatggacactc

SEQ ID NO: 425669 - DNA, 212 bp, Homo Sapiens
cgaatcgcatcaggcagcgccgagctggcgcgccatggcgggcgacttccacacctgcccattgctctgcgcaatcagcaccgccaacccaccttggcggtgcgccaaggccttgcctggcatcggcgcccatcaccatgatggaggcgcccaagccattgacctgtgccaccgaagatgcgatcaggctcacgccgtgcacgcccgtggtg

SEQ ID NO: 425670 - DNA, 399 bp, Homo Sapiens
attacgctcctaacggtaaaaacttggtgccatactcttaaggcatatacagtcatacagacaagaccgaggcatagtctttctgggctatactaacccttttctcatgtcagcagcttttgtcctgaatgtaactcctcggtagcatttccttggaaagatctgaaaaagagccttcacttgggagccaagagctcttgatcccagcaggttactcacttgtcagtgtccatgtagctgactcaccttaggcctagatgttagaatccattttcttaccaacctcacacagttatagtgcaacatgagtcatttgttgcacttctatgaatgagttattgagcatttctatacatgcatttatacatcaatcaagataggctaggttacgctgcggta

SEQ ID NO: 425671 - DNA, 107 bp, Homo Sapiens
ccggcatcagctggccagatggccggcggcgcggtgctgaccgaaaccgtgttcgcctggccgggcatcggccggctgatgttcgatgcgctgctgcagcgcgacta

SEQ ID NO: 425672 - DNA, 116 bp, Homo Sapiens
ctcttcacgtgcgaacgtgatacaccggcaactccatcacgaacggcgacgcttcgccgcgcataagtggtatgcttcagcatcagtccggtcgcaatcgccatcacgatccccag

SEQ ID NO: 425673 - DNA, 449 bp, Homo Sapiens
  misc_feature (65)..(384): n is a, c, g, or t
atcctagacggttcaattcttgcgaagatatcctgaggatggacaacatcaatgttacacaactnnnnnnnnnnnnnnnnnnnnnnnnnnnnnnnnnnnnnnnnnnnnnnnnnnnnnnnnnnnnnnnnnnnnnnnnnnnnnnnnnnnnnnnnnnnnnnnnnnnnnnnnnnnnnnnnnnnnnnnnnnnnnnnnnnnnnnnnnnnnnnnnnnnnnnnnnnnnnnnnnnnnnnnnnnnnnnnnnnnnnnnnnnnnnnnnnnnnnnnnnnnnnnnnnnnnnnnnnnnnnnnnnnnnnnnnnnnnnnnnnnnnnnnnnnnnnnnnnnnnnnnnnnnnnnnnnnnnnnnnnnnnnnnnnnnnnnnnnnnnnnnnnnnnnnnnnnnnnnnnaactcattaagtctcccagcaagtcataaatagtgcaaaattatttcaacttgataaagaacatg

SEQ ID NO: 425674 - DNA, 160 bp, Homo Sapiens
  misc_feature (17)..(17): n is a, c, g, or t
taatatagtcgtccccnttaatcggcacgagctgacacccagaacatctcgctgaccctggatggccagcaaggcggcacgttgttcagcctgcccacgaccaccaccggctatagcaacattgccgggtacagcaatactggccctggtgcagccacta

SEQ ID NO: 425675 - DNA, 130 bp, Homo Sapiens
cagcggaccatgacaataaggatatttgcattaatccctcgtctgacctcgcttctacaatcgccaacagaatcaaacgttgttccactaggtctaggttgtagctcgcattgattaaggcattgtcttt

SEQ ID NO: 425676 - DNA, 430 bp, Homo Sapiens
  misc_feature (361)..(361): n is a, c, g, or t
acgctctagacgggaggtacatgtcagatctctgttgcaggttaaaacgatagaaataaatagacatacccacaactttgaaacctggacagagttaaaggggaccaaagacaggaaggtttcttggttttgtataaatatgtcgattcacacatgcgtttctgaaaatctttatggttctccccccagcttggacactggccactgtaaataatgctagaaggttctggtgccttcatggcaagattacaggggataggaatcacatttatcaaatatgtgaaggactgtcactggaagaaggacattagtgatctgagaaaatccccagggcaggactaaggtcaatgtgttgaagatnaaggggtataggtttcatttaggaggtgctctcgtgtcataatctcacccaaaatggcccagagccccc

SEQ ID NO: 425677 - DNA, 217 bp, Homo Sapiens
gggtcatcggcggtcccatgtgcgttattacgctcataaagtggtaaatcgctgtcatttttgatatctataatttaacttgggagtaaaacctttccactgccattgcttacgccaagcagctataccaacttcatattcactgtctttgcgttgaataccataccaaatattatctgctaaaaaattacgcttagaataacgtatgttgctacta

SEQ ID NO: 425678 - DNA, 171 bp, Homo Sapiens
ggttgggggaagtgaaagtcccagagggaactaggggccccagaagggagtgctttaaaggctgagaaatacggtttgaatgaggagttgggggtcctagaagaaggttgaaggtccaagaagttgagtgttggaaggtgtgagattaggatcccaaggagtgttggaagt

SEQ ID NO: 425679 - DNA, 164 bp, Homo Sapiens
gcacgtgacggcaaatacagaaacatttgagatttgtgtctagtgtattgtgtaccattcccttgagtagatttgttgtaaattgccattgattttagataagaaaaggaaagttttcctcatattaaaaacttggaaatgcatcattggttttgatttttttt

SEQ ID NO: 425680 - DNA, 149 bp, Homo Sapiens
ttactccaggatgcgctccttgctcatgacgtgatcgattgtaggtcagcaccagttcctggcccttgcgcaggtagctgcgggaactggacaggaacaggttcttggccaattgttgcgtgatggtcgagccgccccgcatcttgctg

SEQ ID NO: 425681 - DNA, 393 bp, Homo Sapiens
tgtaaacctgtgtatttgtaatatcccgtttctgcgatagataaaacaaatgcagcaagtgaacaggttttgtagatgacaatgcctttggttactttgggcgaaaccaaagtaactcgaaccgaaggttattcctaatattggattacactaagcaagacaccgcctcgccaataactgagttacggttcaactcataaaatatgcggattcatatctgttaacgtagcttattccacaaagcacatgaaaatcgagtattaacaatacagattatggaatttgactttgctctaaactgagtaaaatctgcttcttatccaatccaccagcgaaaccaactaatgccccagctgatccaatcactcgatgacacggcgcaataatcgaaat

SEQ ID NO: 425682 - DNA, 231 bp, Homo Sapiens
cggtccattcgcggcgcgtcgtacatccgtggtatcatcagaggtgatctgccgggcctgcagcgggctgatcaccgtctcgccgttgagatcgcggcgtgattggccagatagacgaagctgcgcgccagctccacgcagctcatgcgcagcgcgcagtagtggaaataggtttgcaggacggtgatcacgtcgttctcgaagttgccgaacgacttcatcaggtaggcg

SEQ ID NO: 425683 - DNA, 316 bp, Homo Sapiens
gccggtgcctggtcattattccctgaatggtcacgcatgatcgacaaaagaagctgatctcagtacagccattaagcaagttgcacaagaacgtcgcgactttatgtttattatcgctgctgatgctaaagccgcccatcaggatgtaatacgtgtgatggatgttgcaggtcagcttggatttgttaacgttaacatcagcactaaagttccaactagaggtttcaccgagtgaatcaagattttaaggtttatttacgccttttagcttatctaatatcttattggggtattgccttatttgtattacttggtt

SEQ ID NO: 425684 - DNA, 353 bp, Homo Sapiens
tactcctagacggtcccatctaggggcggtggcagatgacacccaaagtgtgttacttatgtccagtctactttgtaatctcgttttggttgctgtcactgtagagaatcctgctttataaagatagaatgttggaaatgggagcaggattttcagtatttttgtggcatcctcaggatatttcgtcttgattttaattcagaatatatggagattggaatttatctcaaacatacttttaaggccactgtcatttgcgatctcaagcagttgatcctcttctagtaccaacaaagttggttcaccaggcttattcacaaatgggtcacaagtccattccttctcagttaggg

SEQ ID NO: 425685 - DNA, 194 bp, Homo Sapiens
  misc_feature (42)..(93): n is a, c, g, or t
ccgtgtagtcacagcttaggagctgagcaagagatcgcttannnnnnnnnnnnnnnnnnnnnnnnnnnnnnnnnnnnnnnnnnnnnnnnnnnnctgctccctcacacccccaccaaaaggaataggaactgttttccaataaatacagttcttatttatgtcttcctatcagtggttaaaagacaattgctata

SEQ ID NO: 425686 - DNA, 528 bp, Homo Sapiens
  misc_feature (371)..(398): n is a, c, g, or t
ttgtcatagctgttcctagagtaacacgatgacggctcttagaggcatgacttgttgtacgcgtgtgtatgtatgtaattgggttgaatatagctataaacaaaagttgatgcacacgtaaattcatgcttgttgtaacgtgtcaaacactacagaggtgtagggaaaatacctagtgccaccctccactccaaaatcccatgtcgccagagataaccatttattcagactgtgagtatctattaagtatctattgctaggctttggagatagcatcatgaacaacctggatgtgctctctgcccttgtgatttggacagatgcttcagttatcttttactgtgtatatattgattatgtttcgtatgtcnnnnnnnnnnnnnnnnnnnnnnnnnnnnatcgactgtcttcttcctcctcccataccattccccacaaaaggagggggtagggatcacgctacacctataggcaacccagttttctcactaaatggctgggcatgtcctttcacgtcatcacatatag

SEQ ID NO: 425687 - DNA, 469 bp, Homo Sapiens
atacttgcataatctattggcatttccatcaactctatagaactgcactgagtcattgctttaagaaagctggctgtggttctggaagtcccatcagtagcatctgaaagggattcaacagcaagtgattgcaaagtgctgtgcccctatccatggaatggtgattttgactggggtgtttccaaaggtgccataatggcccagaattttctaaccgccacacattagagggaaacgaaaccttccccttctgcaaattcctgaatcagatggaacatttcttgtgttccttgggacaacctctgggctaagagaagagattgcttttctgattaaaattcagaaattccacaagctccctattccgcaggccacaggcactttggctccttttgagtgcaactgctccaatgctggtagccacagtctttgccagctgatactttaccagcttggctggtctgcagcc

SEQ ID NO: 425688 - DNA, 179 bp, Homo Sapiens
atcccccgcctatttgttcacgtagcctcttttcacctgtcccttcatatattcatgtcgtgacttggtaaagtctctttgcgcttctttgtgattttggtctgaactttctccctggactgcctctttatcccacatccatgcctggcacccatgtctctgctccaaagcctgttagg

SEQ ID NO: 425689 - DNA, 339 bp, Homo Sapiens
aaaccctgcgcgcccctattacatagcacatgcaccacctggagtctgcagtgtactagacccgtttatccatccaccaacccatcttatccttctgatgcatttcatagtaaaatgcaaacaccagtatgcttccttatcagggttttaactaaagtagtgcacattcgaacgctacagaaatacataaaaggatttttctccaagtcctcctttcctctaccactgtgaaagtgtgtgcatccttccagactttgatctgtgcctacacatgcatttgaatatgtatggtagctagtgctttcaagcagggggatcacacccacgtgttcatccaca

SEQ ID NO: 425690 - DNA, 282 bp, Homo Sapiens
tgcacgtgtcatctcatagctgttcctagagtgtccaccctaacaggcttggagccaaaggaagagtatggttctctatactgaaagaatagagaaaagaataaaggcataccctgcagagcaccaatatccaaaggttggctgaagttgaggagaggcaattaagagaagtaagaggaaaaccaggagagatgtatcatggagtccaaggggtatagagttttaagaaggcaaataatgtttaatgtagtagaagaaatcaaataatataagagtctaaga

SEQ ID NO: 425691 - DNA, 391 bp, Homo Sapiens
gtgtcccccctaacaggctttggagcacatttggtcctaacctcaccaggctgctatatatgacacactgtgactgctgggctccctcttgctccgtccctctttgatgcctgtttgttccttgaatgatgaaatgacccagcaacatactgtccctaacccatggatggctgtcactgacatttgtctcttctcattatcattagtgtctgggaggcaaaacacttgtttagaagctgtatctgccttattattacttactttgaaggagcaggtaaaaagtcattagggagctcactctcagagatccaggaatggtccctgccttttaaggtatgctgtttggaccaggtggctgacagtctcactcatcttctttttctgaccccac

SEQ ID NO: 425692 - DNA, 121 bp, Homo Sapiens
  misc_feature (13)..(13): n is a, c, g, or t
cctaacaggcttnggagctactattctctctagcttttagagtttggtttttcagaatatttccaatcatcttgcacctgctccataaaaacattcccaagtgccaccccatttaaaatgt

SEQ ID NO: 425693 - DNA, 238 bp, Homo Sapiens
tcagtcggccggtagcggtcatctccggatgcgttgccttggcctggatgtgggcggccgtcgcgccgaactggttgtcgttgcccgcgacctgcgccttcatgcggatctcggaatggcgccgcgcccaggtgtgtcgcgcgctgattctccgaatattcaggccctcgaccagtttggtctcgatcagcgtctcgctggcgcgggtcagcaccaattggccggtcggcgagctggt

SEQ ID NO: 425694 - DNA, 349 bp, Homo Sapiens
ccccaaccgctcgctgaccggcacccgcgccaacagttgagcgccgtcagtctcgacttgaggtttaccgagatcggcatccgccagcgtatcgaagaacagcgcgggctgctgccagccggcggcgcgttcggcggcaatctgcaactcgccgttgcggtaaccggccttgacgctctccgccaccccggcggcgatcggcacctgccccatcgcctgcgcgaagtcgtggttaaactgcggatcgttcggcgtcgtcagatccagactgaacgggtagtcggtcagaatgcagacgttgctgcaggtggacagcgtcagggtgcccgccagcgggccggataccggg

SEQ ID NO: 425695 - DNA, 197 bp, Homo Sapiens
agaggatcccgttcgggcggtggtcatatctgcgtcgtggtcagcgtgccaccggccttgtgcgatgtcgggcgtctgggtgtcgtccttccacagcaactgcagcaggcggatgttgctgccgcgcgggtccgaagggcggccccggcatgcaggaaatgctgtatccgaccagctacctgaagtcgaagggactg

SEQ ID NO: 425696 - DNA, 496 bp, Homo Sapiens
gtatagctgattcctagagtatcacgatagtcagatagagatcagagatgcgaacattggctattcagtgtactccttcctgagtagaagagtactgtggaagaaaaagggtttaaatcctgtgagctctcaatggaaacctttctttgccctcatttatccctctgctcttctgacgtgtagtagtttatcctttcacactcccatggcgctacagctccaacagtgacaaaggcaaagtctttatcatgatgtgacaacaccctgtcatgtggcttctgtgacctctttggtttcttcactctgaggggcacagggagggttgtgtccaagaggtctcctgtgatctctcctgtacctgactgcgtctgatgctcagttctctgtctatacagatcagagctgaggcctccatggacctgcccccttgacctattcaggttttgccccatttcctgtacttgggagacctaatcaggtgacgggaaaacattgg

SEQ ID NO: 425697 - DNA, 472 bp, Homo Sapiens
ctgattctagaggatcccgctgtatgtcagatgaccctcattcagcgcctgacggtgatgcaagtgctcaatcacccggttgggtggtcaacagagatgtactctgttccccaacatccgagctcagctgacaggacgtgcacctggtgaaggtaccggcaggcgacagtcatgacagagtgttgtgaatgggaaaccccgcgtggagcctgataccttgcaatcactccgaagaaaccacagagtgcagagaaagagcccatagcagccccaaactgcaccgccggcccacctaccttcgtgcacttcaccagacacgtgcagtattgcacagggctcctacctgagtaggtggcagcctctgctgacgtggtggcagctggtgtggctgttccactcaagttcaaagcctccattctaggccacacatgcaaaaaaagtccccttcataagtgacttacattcaggcagc

SEQ ID NO: 425698 - DNA, 403 bp, Homo Sapiens
tcgctaatttaatgtatcatttgatccattttataactactaacggacaccgtatttctctggtcagtctgcctgatcacaacagtcccgtcgatccattcccatagatccattccgacagcaaccatcctggtgcatcgtgcgttcctattgcccgccttgccatcaggttcgtaatttgaaccacccttcctgccgagaagaacggcctgactgtgggtcagtctggatcctcggcaaggcagcagccagtttgagaggatgtgcgctccagtcctgggagagggaggtactaaccccagagccagcacagaatgtggcaccatggtggctgggctggtgtttgtttccggaggccagaggtggactaggggttctgatcctagagccagggctacatctt

SEQ ID NO: 425699 - DNA, 137 bp, Homo Sapiens
cctcagatgggtcagagtgactttggctgctgctgctgccgcttgccgggagctggaagagggctgcggctgggcctgtgccgactgtcgtcgtggtgctgacctggagcctttggtactgagcgcgtggctcgatg

SEQ ID NO: 425700 - DNA, 278 bp, Homo Sapiens
  misc_feature (76)..(157): n is a, c, g, or t
gggcccgcattttgcacagcatagtttcctgataatgtgctagtaggctccatccgggctgtctggtgcggccggnnnnnnnnnnnnnnnnnnnnnnnnnnnnnnnnnnnnnnnnnnnnnnnnnnnnnnnnnnnnnnnnnnnnnnnnnnnnnnnnnngtgatttcagttgagccacacatggtgggtggcttccatttgggaccaggcctctgcagaggaggccaggtctgggtggccggttcaccaggaagggaggtgaccgtgtcctcaggggaag

SEQ ID NO: 425701 - DNA, 139 bp, Homo Sapiens
ttcatggcatgaagacatcagctacgaggtcatcgcgctttatcgccgccgttccacgcatcagcgtcggttgaagaagggagtggatcatcaccccgtgagtgcgagatcaacaccgagctctaactgtcttgcagtg

SEQ ID NO: 425702 - DNA, 410 bp, Homo Sapiens
  misc_feature (180)..(259): n is a, c, g, or t
agaatcatatacagtcagagtagacgtgcaatgtctctaggatgcgaagaccacattgcggcgactgctgttggaaagtcagtatagcgtggtgccagcatatactgggcgaggtcacaactgacttcgtccctcgaagaacgttggcgggcccattgacttcattgacttcttggtctnnnnnnnnnnnnnnnnnnnnnnnnnnnnnnnnnnnnnnnnnnnnnnnnnnnnnnnnnnnnnnnnnnnnnnnnnnnnnnnnaacttaacctgtccaccaatgaggcctctgggtctggttccaccaggagctccactcagatcccaagacagccagagactggctagccatggtggcgtgagcagaggagaggaacggaaggctttgtacgcacacaccaaaacagagagcc

SEQ ID NO: 425703 - DNA, 150 bp, Homo Sapiens
ctgcaaggttgatctagaggatccctggtttccgggacgcttacagcatgctttttccgcccgagctgtccggttcggtcagcctgaacctgaaagaacaccactgtgcgctgaggcgctcgataccctgcgtgacgtcgatggctatga

SEQ ID NO: 425704 - DNA, 105 bp, Homo Sapiens
atttaccatcatggtcaatctccctactcttccatcaggaacatcaagaaatgtaggtgtcatcctaaaccccagcatcagtcattttagatattcatagtcatc

SEQ ID NO: 425705 - DNA, 161 bp, Homo Sapiens
tgctactcatgaggggactgaagcatgtcatttgatagctatttgtacaaacatggatagcaaaagtacagcaggcgattgattaccatcaccttgttggcattatggaatttgaagagctgaaagacaaaaacaactctctgtcgcaagaagttcaggct

SEQ ID NO: 425706 - DNA, 165 bp, Homo Sapiens
tttttcctgccacacgattcccttaaagtgctgcctctttcagtccgcatcttcgtcggtctggcagtcatcagcagggaaatgcatcgtggaacagggtacgtacagtacgcagcccggtgttgcagttgcggctgtcggtgggtgtggcattggccgtcgctg

SEQ ID NO: 425707 - DNA, 469 bp, Homo Sapiens
tcctatgaggtatcccaatgatggggtcagatgacaccaggccagagtgatcagagggtcagtgcgtttcggtcattagaagcatgtggccacacaccagagcgtggtggagcatgttcactagaggtcggtgggtcatggccccaagagattagtgtcacacaccatagatcaggaggtcgcacacccaagaatagtgacacagtccaaagagatcagtgggtcaaggtcacaagagatcagaaggtcctacagcagaggtcagtaggttaaggacagcagaggtcaggcaccaagaatgtggtgcccattcactagaggttagtggtcacagtcatgagagattggaggtcacacaccagaggctggtggatcacagtcgccagaggtcagtggctcaaggagagcagagacccccagatgcagccacactcgggaagggatgccatgtccacagcacacaccttgc

SEQ ID NO: 425708 - DNA, 194 bp, Homo Sapiens
  misc_feature (70)..(143): n is a, c, g, or t
ccattttatctattgcacatgtcctgtgtattaaataagcgtcttgacttgtaaacacccctccgtctgnnnnnnnnnnnnnnnnnnnnnnnnnnnnnnnnnnnnnnnnnnnnnnnnnnnnnnnnnnnnnnnnnnnnnnnnnncaccttgtcactttcagatagttttttctcatcttgcatttgctattgata

SEQ ID NO: 425709 - DNA, 286 bp, Homo Sapiens
tcttgaggatcccccataccctatactcactttcgtgtatgcagagctgctatgtttttaagtaaacagttgcagcggcctggtttcttgcggctgccaaccgctcagggagcaactcccatcaccgtcagcagtgtaccttctctcgatgtctcggtaccatcttgcctagttccttcagtcagagttctctcaagcgctttggtctactcgacctgaccacctgtgtcggtttcgggtacgattcctgtgtaactgaagcttagagacttttcctggaagcatg

SEQ ID NO: 425710 - DNA, 369 bp, Homo Sapiens
cgcttagaatggcgatcagaatgtcgatcacctcaggtgtaaaccagctcatcgtgccgcctcccgcagatgtctaccttagcacccaccaagatcggcgggatccctggcaagccgagcggcaaaccaacctggccctgggtcagggtttcactcagacgcaccggcagacgcagggtctggcccgcacagctgaactccaccaggctgcccgcgttgacgcctagcgtcgccgcgtcggccgggttgaccatcacgtaggcttccggcatgcgctgctggatcacgtgagagcgctgcgacatttcgtcactgccgaacaggtggtagtacggcgcgacacgccagccgtcgttcggattgaacgcg

SEQ ID NO: 425711 - DNA, 135 bp, Homo Sapiens
tctctacagcaaaatgaccggctcgcagcgcatcggcatgttcggcgcgcagaaagacgacctgccggccatcttgcgcaatgctgctcgccgccgcgttttgaaacccggccacgtcttacgccactggcgctg

SEQ ID NO: 425712 - DNA, 146 bp, Homo Sapiens
tagaggatccccgtcgctgcccgctgaccgggcaatacacccactactcgctggacaagaaaacccacaaaccggattacgtgactgatctccgcgcgcttccgccaccgctctgggccaccggggtgaaaacctatgacggcgcg

SEQ ID NO: 425713 - DNA, 241 bp, Homo Sapiens
acttcagataattcagctaggcgactaataatacataatcctagtctcggaaggttaccacctcgtcctttataacactgggcttgcatcttagactcacatctgaccgatctggtcgtatatgagagctcactaatatgctggttaggcttgaacaggatgtaaagaaatcgcctatcttctattgcctcatagctgggttacctgatgctcgaattcctcatcattgctccttgctgtt

SEQ ID NO: 425714 - DNA, 429 bp, Homo Sapiens
tagccctactgctgaatctgaaataattcctgtagattgttcagaaagatatgagtctatccacattaataggttataacgctctaatatgggtgcttagaaagtgtatcgccattcaaatacttgttatattacttactgggcaataaacttgagtcagccattcttccagggtataaagtctagctccatctattactattgtgtgacattgggcaggtcacctcaactctttaagttcgtcatcttatgaggaaagagatgatgctaatagtgcctttctcatagtgctgtgaaattagatcagatcatgcattagacaatgtatgtaaagtggttaacatagtcctggcctgcagtaggcactctaatacttttgcttgtttttgttattctttagctaataagccaatttggtaccactgacac

SEQ ID NO: 425715 - DNA, 127 bp, Homo Sapiens
agatccgcctcgctgtatgagtaaagatctaggatgtggaaatgacctgggctcatatggtagcatgttgcattcaactttttaatacaccgtctgacagtttaccacagtggttgtaccgttttgc

SEQ ID NO: 425716 - DNA, 309 bp, Homo Sapiens
acttggaagcttagataaaggcagtaattctatagaaagttaaaatgaatgtttgaatagcaaaactatttggtagttttgaaagtaaataaaatgttttgctgtcagatagtgtttatgtggagctgaagacttggatgcccctttgaagagcacagcaccattgcaaggggctgctgcaaggacctctgatcgctttgagggcccttgtgcttagggttgcctccgtcacacgcacctaaccctgcactgggtgctggatgttggagataggaagtaattgggagaaggaggggagcaattaactaa

SEQ ID NO: 425717 - DNA, 408 bp, Homo Sapiens
ggggtctgtacggggtagcataaggagaagtggtactttacttgcgaagcttattctgcatctgaaagacagagttagcgtccgtgaggcagaaggccgggagctgcttgtagtttcgctattgtcatcacaggattgaaagatttggtgatgataaaattaccctgaatttgtacgggccttctggcaagaacgaacaatatccatatacttcctgcaacattctgctggtatttctagagcttgtcaagttgaccaccaggccagtccttgctgccaatggagactggcagtggattagcataggtagtttactttggcaaatttagaccagctgttggatttagccctctcccactggccacaatcagacgcttgcctgcacatgggttgaactttgggtaggga

SEQ ID NO: 425718 - DNA, 151 bp, Homo Sapiens
agtgagtggtgtggcagtagacaaaaggatgctatttcaaacagcactgttagaacagcaggtcagcattaacacttaatccccaagggttgtgggatgaacagtattaaagtacagtctcccctctgtacctgcaggttctacacctgtg

SEQ ID NO: 425719 - DNA, 412 bp, Homo Sapiens
tcctctacccaagattcccctcatattggcctatgggctgcctttatggaggtcacctctgccaaacagtcctcttatagtggacactgtgatgtgccgccaaggttccacctcagggataaacaacttattctcttaaatgttggctgagctgccagaaggcatttggttgttagccctcttgggggattacttggtccaatgtcacatcttgccagggtggctccctcacctcaactcagggcagctctgtggggctttctcacctccagagcttccccttgggattgactgtgaccttggttgcagtttacgttactccctctgcataatcctgcttcctcacccactttccacagttgtcgatcccaagggccccctaacaaacttcctgcacactaatctctgcctc

SEQ ID NO: 425720 - DNA, 278 bp, Homo Sapiens
tgtggaggagctgtcatcggtctgctgggtcaggccctttccaggaacagtgtactggtgtcttatatagtgcttgtcctccacatctctagtctgatggtagtgtcttcctgaattctaggcaactctaccaaattccaattgggtgatactagcatagataccctggctgaatttctctgggatttaccttcacttgctcatgtcagccatggagatatttaaaataacgataatactcactggtagtctggtgcattcatttaatttctaagatt

SEQ ID NO: 425721 - DNA, 418 bp, Homo Sapiens
tgggtgatagcgaggtcagacacatcaaagtgatgcagcctgggatcatcaggatataaaatctaggaactatgactaaaaatgtgttcctttcttaaaaccaacgtgacactacaaatagcatccttgagaaaccaatatgcatgtttaataatttttgttttcccactgcgtacctatcgattagtctttcctgtatgtagctctgaaggaagcctcacttctttcctggcatagggagttccttaaacaagagtcagggactctggatgcccatttcctcttaacatatctattattctgggatagcaaacagaggaaagatttttaatagaagttgtttactaacttcaggaaattgccccttcaggatttgaacaatctttctaatgttagagaaggcttttcaccctcaaag

SEQ ID NO: 425722 - DNA, 459 bp, Homo Sapiens
  misc_feature (75)..(75): n is a, c, g, or t
ggcggaccataggcggtttggtggtagctgagcctgatcttttctatatacccagcacagagccatcactcaggntcaggctcaaacctatcaacctcagagactaaacaataaaatcagtatgcacaattatttactctgagaatcgaaaaaagcaaagtggatcagtcagtggcatgttagccctatagaatgcaatacatgaagccaaatatgccatgcaagcatagaatcagaatgggaagaagaaggtacataaaggcaactaaaaggaaacccatcggttttcttaacacagtacccccattcacagttctgctttccagtttcagctacccatggacatccgaggtccaaacatattaaacggaaaattcctgaaataaacataagtttgaaatggcatgccattctgagtagcataatgaaatctctcaccatttggctctgttccaccca

SEQ ID NO: 425723 - DNA, 358 bp, Homo Sapiens
agccggaccattaggcgcgtctgcgtctgggccagtctcacactggtccttgcttacccctaaatgctattaattccatcactctgagtatggtgtttgctgtccgctgaatgccaagagcttcaagagtgtgtgtaaataaagccacacctttatttttgtattattctgaaccatggctaataaattgtttcaccaagaaatgtctctctaagaacagatgccctccacgctgtgcccctcccacctcttcagctcgtctcctgagtgtgcagaggtggttccggttgggaaagaagcagcggagcatctaaccatgcctgtgtccaggccgattatgcacgcagaacgcgcctaa

SEQ ID NO: 425724 - DNA, 269 bp, Homo Sapiens
aatcagtcgtcccataaagcgcgtttgcgtcaggaaggtgatgaggctgctgggttccacatagacccagccgcccctctctcctcatgctcgcctcccgcccacctctcggggagccaaggcagccccagcaaggagtaaatgagtgagtgggtcctggcgccccaggacagggcatgtcgggacaagtgttcaaatggcaggcggggggtcgggaggagtttgtggctttggcactgacttctgtctacatgggacctcagccccca

SEQ ID NO: 425725 - DNA, 543 bp, Homo Sapiens
cgctcgtacattagcgcgtctgagtcagctctactccatgtgactttctgttcctcgagcccagtgcaaccccactggattcaggatttccacacctaatagaagtcccttcctgaaagtgttaccacatagggtcagggccccccaggccccaggtttagctgagaccaggttggtctcctgatagcgaaccaacagctactgccgtgtcattgaaaagtggcagcagagagtctgcatgtcaatcatccctttgaaatgaaaggccttcctggcagggacatggtgctatctttggccctaaggtgtgtaattgagaatattcaaacagggcactctgttcctttggctgaaccagggtgagtggccctgagtgggaagctgtgggcaagttagtgtggcacaaggaaccattattcacaggctgatatttttctcccagtgagcatgagccgcaggggtgcagccactgcccagcccccaggggaggggttgacactggtacagcagccagggcaagacaaccgattggagttctgtagg

SEQ ID NO: 425726 - DNA, 535 bp, Homo Sapiens
ggtcggtaccattacgcgcgtttgcgtcagcttcaagatgagagccagagactagcacagaggaggggcgccccaccgagcctcgagagcttctggggtgggtacgggcctttgataggggagacagcacttctatagggcaccaaaaaggggctgctggcctgtctcagccttagacttgggaatagtgccacgtattgcctttgagcaagaggaagtgtgtcgtggaggagagactgtgggttttggactagacagagcaggaatctggctctttcgcttcctaactgcaacctggctggagcaagtcaactcactctaattgagcctttgtcctcttgtcctcctcttgggcttcatgacactcctgggcagggccatggtaagaagtaagacgccgtgtgtgtgatgcctgcgataagtacctgttagagctggcagtaggagtccaaacacttcttgactgaactgccccgccttccacggaggcttcaaatcgctcattccttccgtccacactcctgctcgcttaatg

SEQ ID NO: 425727 - DNA, 544 bp, Homo Sapiens
  misc_feature (109)..(150): n is a, c, g, or t
  misc_feature (159)..(417): n is a, c, g, or t
ccgtgaacatgcatgtggaggacaaacagaatcagaaccgaagggcggccaggaagctctgcgtcccgtgagagccaccacactgggcgagaggccctgcccatgttcnnnnnnnnnnnnnnnnnnnnnnnnnnnnnnnnnnnnnnnnnngagacgaannnnnnnnnnnnnnnnnnnnnnnnnnnnnnnnnnnnnnnnnnnnnnnnnnnnnnnnnnnnnnnnnnnnnnnnnnnnnnnnnnnnnnnnnnnnnnnnnnnnnnnnnnnnnnnnnnnnnnnnnnnnnnnnnnnnnnnnnnnnnnnnnnnnnnnnnnnnnnnnnnnnnnnnnnnnnnnnnnnnnnnnnnnnnnnnnnnnnnnnnnnnnnnnnnnnnnnnnnnnnnnnnnnnnnnnnnnnnnnnnnnnnnnnnnnnnnnnnnncatgcacttttcttcttgatcatcaagcctctttctacccccagcctgggtgcttgatgtattctttaatcttacaaaactcactgcattacacctttactctaaaaccttcctagtctatcattcc

SEQ ID NO: 425728 - DNA, 495 bp, Homo Sapiens
gttaaatgatcaggaatatgaccggtagatatttctagcatgtgtccttgtatagcttttgatatcaggttgacactggcctgatagaatgagtgagggagaattccctcctccttaattttgtggaatggtttcaggaggattggtattagttcttctttatatatttggtagaattcagctgtgaatccatctggtcttgggcttttccttgttgagagactttttattgctgattcaagcttgctactcattattgctctgttcaggttttctagttattccccattcaatcttggtagactcgatgtttctaggaatttatccatttcctctgggttttccagtttgtcatatagtctctgatgatcttttgtatttctgtggtatcagttgtaatatctccttttccatttctgattttatttacagagattcatttcttcaaataagatatggaaggagaaatttattctctcttcttggttagtctag

SEQ ID NO: 425729 - DNA, 497 bp, Homo Sapiens
tgctgcgtcagaatagactgaagaggtagggagcagatgtgaagcacacagaccatttttggaggctggtgaaacaatttaagtccaggtcaggatggtttggggggctgggctgggtcctggtgcaagcctgaggagtggtcaaattccaggtctcttccaaaagtagaaacaatgtaacttgctgatgtactgaaggtggatgagagagaggtcaggatattgacaagataggtggccagaacagcaggactgatggagttaggaaataataaaaggtgagtaggctctgagggagatctgtgacgtggtgagtttgagaagcctctcagaaaccccaggtacatgtcgggtaggcagctgtatagaaaacttcagggaagcagtctctgcacagatgaagccagaaggctggatgacgtcatgcgaggtacaagcacagaagacgagaggtccaggattagcagggatggcacgcatgaggaggcagagctggc

SEQ ID NO: 425730 - DNA, 498 bp, Homo Sapiens
ataacgcgtatagatgggatgggtcccccaggagcatgtgaggggaggaaggaattcaggtcggccagccttacccagctcctgcaccccgctctgaggctcaggaaggccacgtggactcccctgtaggcatttgcttctgctgcccttgccccaacccacgcttcaggttctacttccagccccaggccccaacatgggccttctgttccccgcgtaggcccacaccagcctggtctgtctctggtgaccccctgagtggcctccacgtaggtaacagaggtcacctgctgttccaatccagggggtgcaggggccaggctttgcgtcctcagggcccccgccagcttagagctcagacctggctactgaggaaaaattctgaaaatgcttcccaagcgacgaggctagatgctggtgaggccgtgctccaagccccaaccttgccagtcactctctgtgaccctgagtaagtctcttatcctccctgggcctcag

SEQ ID NO: 425731 - DNA, 415 bp, Homo Sapiens
gaaaggtataaccaggcgcttatctagaatgtgcttcaagtgcacttccgcaagacagcctctccacactaggaaacagcctttcagagagaacatttcgaggtcacatctgcccattggttctttgttcatcctcagggctccacagagcaatttcttttccagatacagtgcctcagacatttgaaaacagcactccatgcccctcagcgataacgcaggtatagttacttcaacttttcttcctgagagatggtttccctacctaatgatcaaggggtttggtgactacgtgagtcactcaggaaccagctgcattcacccaagccccgtgagtgttctgcagacggcagggcgcgagggcactgatttcatgtctggggtgggtggtgccggcccgggggatcctggggct

SEQ ID NO: 425732 - DNA, 350 bp, Homo Sapiens
attaggcgcgtctggtgagctcccaaccatggccgaatccttaggcttctctgggtagggtctgggtcttctcctgggatttgctcccttggtttggggagggaggcgcatcattttatggcctcctgagaacaggtgtttgggatgtgtccctttaaacagaattcccacgctcccttcactcgactgctggcatgttaacgccacctcacttgctgtcccctcccctcttctgtcctgcggacacgtgttattcttgccctgacaatttgagaatgagttgtagacttggtgcccctttactcccaaatgcttgaacgtgactttgctgccaacgagaacgcgcctat

SEQ ID NO: 425733 - DNA, 438 bp, Homo Sapiens
gggaattactgtttcccatctgctactccatttactagcaatgaggtttctgtttccaaacagaaacagccttctctccccctagactaatttcataaattccatgagctttccacaaagtgggaaaccagtcattcgacagtagtaacatatttcaaattaggagctacctctcttttcaaagatattttcaatagagaccccgaatactgccaaaagagttgaaatgagacaacagaaaacgccaactctaaggctcagaaatttcctaacagactttattttcagtcaaaatctgtggcttcttttgatggggaaaaaatgtctttccccatgactggtaaacaatcccagatataaaactgtccaaagtaacataaaccgaagtctgcacagctccattaacaagcacggaccatgccagagtggatccacgca

SEQ ID NO: 425734 - DNA, 424 bp, Homo Sapiens
cggtccattaagcgcgtctgcgtggcacgtgaaagaattcggaacagcgggaaaaattaaaccacggaagcacatttcaagtcaacagaaacaagaactttctaagaacgagagcagttcaacaatgaaaagggttgctttactgactgctggactgctcatacaagaacattctacagcacggagctgggctgaacttctataaacattcctcactccccaaatcctttccatccctgaatgtggatagtgagagggtagacatcacgagatacggcatcattcgaatctacccagtgccccagtctcaagtagcaagttttatctaaatgtattcagttcctgggtttaattaatcagtttgaacagaatacttgtactaactgagcaaagttcaagaaggcagacgcagaacgcgcctaat

SEQ ID NO: 425735 - DNA, 464 bp, Homo Sapiens
accataagcgcgttctggtcctggtgtcggaggtgcaccgggtgaagctctctgcgtcgtggtgtcctgatatgcgagcgtgtgaagcgctctgcgctctgtctgtctgacatgtgcacgcgtgttaagctctactgcgtgctggttgtgtgatatgcaccgtgtgaaggctctcgtgggtggtggttgtctgatattgcccgtgtgacgtgctgcgcgtccaggtgtctgatatgcaccgtgtgaatctctactgggtgttgggtgactgatatgtaaccgtgatgaggcgctctgcatcctggatggtcggaaatgctaccgtgtgaaaggtcgcgtctggattcctggtgtcttgaaatgcagcgtgttgaggctctcagcgttctggggtctgaaatagacggtgtgaactgctttgcgttcaggtgtcagatatgccctgtgtaaatcgctctgcttga

SEQ ID NO: 425736 - DNA, 136 bp, Homo Sapiens
  misc_feature (42)..(75): n is a, c, g, or t
gcataggcgcgtacggtggtggtgacacctgtagttccacgnnnnnnnnnnnnnnnnnnnnnnnnnnnnnnnnnncctcagttttcccgtttccttgacgcaggcctagcttctctaaagattttgaaaaggctcc

SEQ ID NO: 425737 - DNA, 461 bp, Homo Sapiens
  misc_feature (54)..(411): n is a, c, g, or t
ggcggaccataggcgcgttcggtcccacccaatctccgtcgaatgtaatctccnnnnnnnnnnnnnnnnnnnnnnnnnnnnnnnnnnnnnnnnnnnnnnnnnnnnnnnnnnnnnnnnnnnnnnnnnnnnnnnnnnnnnnnnnnnnnnnnnnnnnnnnnnnnnnnnnnnnnnnnnnnnnnnnnnnnnnnnnnnnnnnnnnnnnnnnnnnnnnnnnnnnnnnnnnnnnnnnnnnnnnnnnnnnnnnnnnnnnnnnnnnnnnnnnnnnnnnnnnnnnnnnnnnnnnnnnnnnnnnnnnnnnnnnnnnnnnnnnnnnnnnnnnnnnnnnnnnnnnnnnnnnnnnnnnnnnnnnnnnnnnnnnnnnnnnnnnnnnnnnnnnnnnnnnnnnnnnnnnnnnnnnnnnnnnnnnnnnnncattcataaggcccgagtcctgcatctcttagggagcctctccctgtcca

SEQ ID NO: 425738 - DNA, 333 bp, Homo Sapiens
gggcgacagctatttaaccaatcacaatggaagcattgcattcatctggtcatatatctcttgttctttcagctaaccttcttctatagcacaaatccaacaattctgcaacctttctgttacacccatacaattcactgaccctactgttttgtactatcttaatatctgaagataatattttggattatctcgcccttactcagttctactgtatatggagttggccatctgttaaagggaaaagaaagcagtattaaaataggcaaccatttcaccaggatccctgtgaatctcatggccctgggagctagggccatggagtaaatcgca

SEQ ID NO: 425739 - DNA, 346 bp, Homo Sapiens
taaggcatcattaaaagagatagctcagggactatctcttttaattagtcagagaactaatttacccaggaacagacacacctaactcacgtgatggtttcataccttccttctgcaaggatgagatcagtcacaaactctcacatttggccttttagggtggatgcaattatgcaagtttcagaaatgtgaccctatctcacataaccaagagatctctggtctgacaaattcctgggcaggacagcctgtggcatcctccctaggcccactgtggatccatggcctcagcaaatacatgtgctttgtaaaaattgagaaagcagaggccatggagtacatggca

SEQ ID NO: 425740 - DNA, 129 bp, Homo Sapiens
accagcacgagtggaatcccatagaaatgaggatgtggaacatagcagtaaggcccctgacagcaaggcacggactagatggttaaacaaggaccccgtgattactctttgtgtgtgtccaagacacaa

SEQ ID NO: 425741 - DNA, 446 bp, Homo Sapiens
taccaggttctccaggtcgtggtttatgtactaaatacaatatccatcctataatagctatttctaccatggcaagcttatacaagtctaggaagcacaaggtggaaatggaagttgtagttctcatgatcatccctagtgatccactaacacaatataaacaacatccccaaaatctaaggcactactgctctagaagtcttagttccacaggaagaagtgcttccaccagggacacaatgataccatagaacactcagattagaagactgccacttgaccacttagagctcctaatgccactaaatgaatggcatatcaagaaaggggttactatactggctgtgtagactgaatcttgactatcacagggaaccttcaattgttaccatgaaatgaatggctatatctaaaatgcaggagaccctctagggaaacttaaaata

SEQ ID NO: 425742 - DNA, 288 bp, Homo Sapiens
atcgaagactatcagagactaatcgccaaggtcgacagaagcaaaaggacctaatccatctgagagcccagagaaggatgaaaaacaagattacaaggcgtccgtcttcaacaggcctttatcaaagtatccccagttagggaagagaagagagatcaatccttcactcctcccacccgaatttccttcgtttcaagaagctccgattcaagctaaaacagagagatgaatctggcctttgagacgcctatacgcttgctgagcacacagtaggatacagaagggaga

SEQ ID NO: 425743 - DNA, 434 bp, Homo Sapiens
  misc_feature (282)..(377): n is a, c, g, or t
gagggaatatctcgcctcctccattaaagtctaactagtccagtcgaagtaatgatccgacttctcgtgaactccaaccatacatagaaaaaaatttactctttctgtttatatgtatattcattgtttccttaactagctaaagaaagaactccttgaatacagaaacctcactccacacttaggaaatgttttacctctcaagtattttacaaacattaacttcatttaccctaattaagggcacatgccttgcagtgggaggaagccagggaagaatcnnnnnnnnnnnnnnnnnnnnnnnnnnnnnnnnnnnnnnnnnnnnnnnnnnnnnnnnnnnnnnnnnnnnnnnnnnnnnnnnnnnnnnnnnnnnnnnnaatcagataatgcataaaagccccttagcatctacctatgattgataaatggtagtt

SEQ ID NO: 425744 - DNA, 292 bp, Homo Sapiens
  misc_feature (233)..(241): n is a, c, g, or t
ccgatcgactgaccgtggagcaggaagctcccactaccctgtggtgtcaatcagcgtaacaaacctatctgtacctgcgcagtagggaagtattttaaagtaaattgcgggtatccaaacacagcctttcctcacagggttggtgtgaaggccagctatgttgttttgtgtgtggaatcaatcacttggactataaatcgttgaagttactgcttctgcgaaatgtctctgcnnnnnnnnnccacaaagccaccagtgatttctctttaatgggaaaatctggacctcttct

SEQ ID NO: 425745 - DNA, 434 bp, Homo Sapiens
gccatgaacacgaagctactgtaactgttaatagagagttaaacagctacgatgatctattctccagcgggtgcctccaactatacctagagctctaactgcactttctatccttgcagtaatatgacaaaggcccccagatcttaatcataaacttttcattttctataatgcagtctctacaaagtagtgcctaaaacattccagcactctaccctaccttttacccagctagctctaagtcttccttcaggtcccagcttaaacaccacttcctcccggaaacccttcatgactactcagaatatcttatatcatccagtggcactccacacctcaccatactcagtaaatgttattactgccctgttggactgtaaacaccaaagagtaagaacaacttttgttcactactttgttcctactgcctagca

SEQ ID NO: 425746 - DNA, 376 bp, Homo Sapiens
ttgcaggggctcacatgtatccattcaataactaactggtttagatcctggttaagaggattctcctctctctttccccttaactacaccacaatgtcaaataagctctagcttaggcaacaggggatatcagtatattcttagcttcctttcaagaggagaaggctattccagcctttggctttaagcagtaagcatagctaatactcctcttatggaacatttttagtccttgtttacccagaggagggggaactttgagccactattgagtgctcatagactcagagctttgcaggccacagcttatatccccattcacagccttgggtttcttctcatcttcttgtgacttagcctttctacataacaagta

SEQ ID NO: 425747 - DNA, 169 bp, Homo Sapiens
atcgactgaccgggagctataaaaagaaaatctgttaaccttacaatacttccaaacctagacagcagagggagtcttagaaagaaatacccaacacattaaggggtataaatcaagccactttaggaacaatgaaaactgggtttttactcattgtaatcactttgta

SEQ ID NO: 425748 - DNA, 207 bp, Homo Sapiens
aactaaccgttgagactatctctcttcatcatccttaatgtctcagctcattcactacttcttggataagcccttccccgtctccttcctaaggcaaactgggctataattgattctcgctgcaactccagccctttggaatacttatcaaatatgagatcttacatttctttaggtgactattggttaatgtttgcttcctgttct

SEQ ID NO: 425749 - DNA, 304 bp, Homo Sapiens
tacgtcgactgagcggactacagccgcgaggtcactttcttagagcaagcaaattgttttctgtaaggaaactattttatataagcaggagagcattatctgaaaaagggaaaatgattcttctctagtacacagctgaaaactccctactgaggcatgacgtcacactgaacccatttaagggaggtcacgctcctccttccccagcacaggcaatcctgtacccctgagagctgctgtcgcctcagctgcttaaaatgcggagaagctcaaaaggtaagctgtgacctggtctagtatctca

SEQ ID NO: 425750 - DNA, 115 bp, Homo Sapiens
cccaatgatagaatgaaggcaagcctgatactttgtgtatttgacctattaatagaaaaataccgtgtgatgatgagcccttaataaacattaaataagaacaagagttctagct

SEQ ID NO: 425751 - DNA, 331 bp, Homo Sapiens
  misc_feature (188)..(244): n is a, c, g, or t
gaccgcagtgtgagattggaaagaattttatacttaggattatatcctgggacattttcttcattcttcctgaatggggacatatttgggggggaaggttcaagcagcagcagtggaatccattcccaccttcactggggtgaggagcagttggaaaaaagccccagacctgacctcagcctgccttnnnnnnnnnnnnnnnnnnnnnnnnnnnnnnnnnnnnnnnnnnnnnnnnnnnnnnnnnttggttcctctgttatcaactggggaggaagttaacatctatcttgctatccacccacaagctctatggagttgtcacctttatcat

SEQ ID NO: 425752 - DNA, 420 bp, Homo Sapiens
cccttggatctaattaatgagagcattatctttgatctgttacagagatataaggtgaagaagtcagagttgtaattattgaacacggggaattcaccttaatatacagattcttagaccctcttcccctcccccaaagattccaactcaatagatctggtgaaaaccaggaatctgtaaacgcccagctattcagaagcaaacgtaagagatcaaattctgagaaacaatgtgtttctctgagaaagagaggaacgggattcattctgtaatgacaggacaaattcatgtaccattcaagacgtctttcacaactaggattcatatttattatttacgtttacagacttattatacttgtagccctacgcgcaaggctctatcatcatttacaatccaggcacttcctcaaacaaatgt

SEQ ID NO: 425753 - DNA, 330 bp, Homo Sapiens
accacgagtggaattgtgacgtgcacagcctgggtaaatggggttagctatattcaccctgaagggggcacataccctattatttctaacaccactgaactcagaatcgggacccagattcgccggggcagcgcgggacgaggcctctcccgggctccgtcttccctgttaatagactgagagacggaatgagagcttcgaaggtgctgggggaggagcattgggtgtccccaggtggtgagcttgggtgtgtgtgtgtagccgacagtctcccaggctcagtattccctgttaatagactgagagacggaatgagggcgtccccaggtg

SEQ ID NO: 425754 - DNA, 155 bp, Homo Sapiens
cggcagcacactgcaacagagggtgcgctcctgtgggacagggacacgcccacgggtggctgtgctcagttcttgattatcctccacctaccagctgcgtgaccgacattggtgtcatcaaaactcttcatttgggcataagagtggtgtttctc

SEQ ID NO: 425755 - DNA, 316 bp, Homo Sapiens
  misc_feature (212)..(261): n is a, c, g, or t
gcgtgtatctcacacattgttccatgttcaatgtgcctaatacaaaacaagaatctacctacaaggggtttaccatcttgctgaggatgtaagacttgtgcacaaatacccgccatccaaagcagctcaagaggctatgctagtgttaataataataaataatagtagccatgtccctgaggaatgccaacccatctattctactgctgaannnnnnnnnnnnnnnnnnnnnnnnnnnnnnnnnnnnnnnnnnnnnnnnnnttgtaggaacactgactaagataaggaatagagtaacttgctgcaggtaaaggca

SEQ ID NO: 425756 - DNA, 127 bp, Homo Sapiens
atgattcttgaggatcccccggaagcacactgcaacattgaggtgatgcatgatacagactgcatgcgtgactgcgcctgacactgttctgcttcagtgaacaggtatattttagcattaaactgga

SEQ ID NO: 425757 - DNA, 426 bp, Homo Sapiens
cgaagccactgaacacctgaatcttgaagagtctggttaatgtcttgactcctaacatgtgacattattttcaattggtcccacttggcagttagggagaaatttctcctttacatcaagaggaaggtcaaaggaaagggtaatctcaagtgtaagagctaaggctttaataagcaaatagttaagacttaagatccccaaagaaaaagaacattttatattaaggactcagtaagtgggagttttacttctcattcccaaggagctccctatttctcactctggctctgaaaagagccctgcaaagcaacatggtcactgacgcctattgtgagaaaatgtgtgaatggagtcttaccactcctcttcactaaggtctttagtaaaatttcaaagtcaattttaccaacagtaaaagttaccctg

SEQ ID NO: 425758 - DNA, 131 bp, Homo Sapiens
cccctcataatgtggcccaatgtgcactctaaactgacggcacgagaaagcggccgcagggctgtggctctggcacgaggtactttctggtctccctgccaccacttcctaggtacagctgtaacaccttg

SEQ ID NO: 425759 - DNA, 141 bp, Homo Sapiens
atccccctcataatgtgtgcccacagcctcacctctcctccttgtcccttgagggtgggcaaggaaacagacagtgaccccagcccctctggccagtgcaagaggctgcagggcctgacattctcatcatggaaagaagac

SEQ ID NO: 425760 - DNA, 301 bp, Homo Sapiens
tcgcgctctagagatccccctcataatgtgtgcccacgtcggcgctaattcttcagtgagttcagatgacttcctgtgtgtgctcttctgtggaatccctcaggacgtgcagcggtggccttccttgtagtgcactggctgcataactggggctgtgtggttttaattgatacagaggtgggttgagggagaccttcggtagcaaggtaagacaatgccttcctccattcttctgtttccttttgtactgattaagtgttggctccttatagacaagtccaggccaggaaaaggggtgtcc

SEQ ID NO: 425761 - DNA, 422 bp, Homo Sapiens
taatgtgagcccactataccactaatagtataatcccagctctacacaggcgaagaactgcttggtccttctcacctgtgaaaccactgcttacccatctggaatttcctcatcccctaccaaccaaaagtgcatcttcataaagccttccctaaacagatagttccatcatttggcgttctgtaccatacagacaatataaagttggactgtcagttctttcccatcatgtgtttaatttgtctcctcaacaaaacattaataaaaagcgatattattaccatatgattaccttacacaactacattagctcatgctaactagggcaatgattttttatacagtctttagtatatgccaagcatctatctaagagcttgttaactagaaatgcatttaattctcacaacaggcctatgagg

SEQ ID NO: 425762 - DNA, 147 bp, Homo Sapiens
aattccataactctaaaactgttctgaaagtaaagctttaccatgaaaaaaataaagaattcatagagggaaaaacaacatagggcaagccatcaaccctctcaggatgtcagtttttatatgcttgtaaaatttggcattgctcct

SEQ ID NO: 425763 - DNA, 108 bp, Homo Sapiens
agcacactgcagcacgagcgatctatacatgctcattcaaatccatgggggagattaggacaattcaaacccggatgcaaagaaccatcaggagaatgagtgaaggcc

SEQ ID NO: 425764 - DNA, 292 bp, Homo Sapiens
ttgagcgcaccatgtaaccaagagatatgacattcgatttttcaagatccgactgagggataggattgggaagcctataatgtgagattcttagtgataagagaaacctggcagtgcccagacggtcaaataatttaagggtccccgatatatatgatcagccccaaaacccagacatagtgaatgtcaaaagacacctgcagaatagaacttgaaattccctacggatcgcaaatttgtcccaacgttcattttacatttggggagaggaaagaaggagataaggaaaagg

SEQ ID NO: 425765 - DNA, 347 bp, Homo Sapiens
gacgatcgtgtcggaccccggagcacactgcgcattgcaccttattacaaaataatacgtgcttgtaactatataagaacatttcttaactgaaatattcaaagaaatagtctttgataacagcccagcatagaatacaaactacagtacttaaacataaaatcactgaattttgtcatcaatattatgaaaaactaaagcaactgacatttgaagttttcctaagtggaaaggtagtagataaatgactgctaatgtttctgacaaaacaaatacccatacagtgcagaagatttctttatgaaaagaagaatcaatcagtatcctttaaaagtagtaagcctagg

SEQ ID NO: 425766 - DNA, 195 bp, Homo Sapiens
tatagtaagaggggggtattcttttcttgaaataatgatttctagcatttatctagaaaggattttgctgactggattttccttttcctacagtggatttttaaacatcagtgcatgcacataaatacagagtgcatttttcctttaggctttatctatgtaaatgaagtcgattaaatgtgaataatcatgtca

SEQ ID NO: 425767 - DNA, 185 bp, Homo Sapiens
aaggcttacagttttttacctttatgatagaagagctactagaatcttattctgcgctggcacagatgtcaaagtaataactcgcgcacatttatgatgctatttcttgtgatttcctgtggtaatagagttctccaaatatatacatgtgtcagaggaaaaactgtattcaaaagcaagtgggc

SEQ ID NO: 425768 - DNA, 371 bp, Homo Sapiens
  misc_feature (255)..(255): n is a, c, g, or t
tcaaatgaacacgctgagttgtaactgaattaatgatctgcgttatccctaggagaagctgaataaggtttgaggatcttggaagtgcagttatactctcagtaactgaggtgagatccgtaggcaaggaatgacaagatcgagattgattagctacatgaccttaggaaagtgacctaaaggttgttcacattcagagtcctcatctttgaatgtgaacgatatttctggcctctcctatcttatggagttggngtaagcatctgcatgagatgatggacgttaaagtgctttgttagctgttgagactcttactgaaatgaaacccaaggatgggtgccactgaaagaaacaagattgaatgcaaactg

SEQ ID NO: 425769 - DNA, 374 bp, Homo Sapiens
  misc_feature (182)..(311): n is a, c, g, or t
atcacactgaacatgaatataagtaaatcatttatttgggccaagcttggggattataacctgggagcaatgattcaagttgtctggaatgtaaactttagcagcagttacaagtagatttgtaaaggcaaaaaagaggggcagagagtggactggtacaaagttgtttgtcagccacttannnnnnnnnnnnnnnnnnnnnnnnnnnnnnnnnnnnnnnnnnnnnnnnnnnnnnnnnnnnnnnnnnnnnnnnnnnnnnnnnnnnnnnnnnnnnnnnnnnnnnnnnnnnnnnnnnnnnnnnnnnnnnnnnncatattggacgtgttcaggcagatttcccgtttaacatctgcatgtttctcagggacctgaaa

SEQ ID NO: 425770 - DNA, 355 bp, Homo Sapiens
cattctctcgtgctcccttagccagacctttcaaggttatatcatcctttagcgccaagtaccgcccctgacctctttcttcactcatagaaagaggaaccagatttcccctgtgtgactgccatcaatacaaacagcagttttgtttctgttatttcccctttcaacctagtgataaagtttgctgctgctgctctccccaccccgcacaggaagaaagacttccttccttcatctcttgactttgcccaggcctattaataatcttcgctgtgtcatggactccggatgctcaccttttctaacattttttttacacctccaagagttactcctcagcctccttcccttcccc

SEQ ID NO: 425771 - DNA, 116 bp, Homo Sapiens
tagcagaacttgagtccatattgtccactgttcaagaagtctggaaacttgaagagccaaataaaaataagttatcctagcatttgtagctatcctgaaaatacctaataacaaac

SEQ ID NO: 425772 - DNA, 215 bp, Homo Sapiens
tatatctctagtcatcaccaccacaaaatgaaagtgtcttgctttgggatccaaccaagggacagatcagtagccgtgtgggctcacgaggtgaccagagaattaagaacaagcattttgggtgaggagaggcacaagcagcccctacccttctatgatcttgaattcaactgcaaactgaattgccaaacaaggaacatttactcttatctctg

SEQ ID NO: 425773 - DNA, 174 bp, Homo Sapiens
gttacccaaagattgaacttcgctgacaatttcatctaatttaaatcgccacatgtgacaaccaggccagacactgcagtggtgggacttcagcaccttctagaagttgtattggagttgggagaattcaacttgacaggcggcttccatagatgggtgggcacaattatggag

SEQ ID NO: 425774 - DNA, 331 bp, Homo Sapiens
cggcaagggtatcgtgagggaactcatcatgccttcttggtgccagccctgaccctgttagtatcttgctgacacttcacctccctgcatctcattttttaaaaccatggaatgaggagattggaccagatgatcattttccagactgcttagttgaacacaagcatcccatggtatattattaggttttcgttaaaacagagggtttcatgggttaataaattagaacacttcccattttattacttttttgaagacgaatttgcctatttaagttctggaaaattcggatgtaacttctccaaaaacttgaccacagagtacttatttc

SEQ ID NO: 425775 - DNA, 297 bp, Homo Sapiens
  misc_feature (124)..(138): n is a, c, g, or t
  misc_feature (165)..(205): n is a, c, g, or t
cctaataatgagagcccattgacactgagctcgtatgagatggcggtggcatttgaacacatctcttaactgcagtgcaatctttaaaaggaagaatctcagaacagactgaagctcttagtannnnnnnnnnnnnnnggagacggggcctcaactgggcctttnnnnnnnnnnnnnnnnnnnnnnnnnnnnnnnnnnnnnnnnncactgcagcctcaaccacctggactgaagctgtcttcctacctcaacctcctgagtatctgggaccacacatgtgcatcactgtgcctggct

SEQ ID NO: 425776 - DNA, 272 bp, Homo Sapiens
ccatacgccttcacttgccgaatgtttagagactgacctgcctaggcccgtcggtctgccctaggcgcgagtagttgtgaggccatcagcccaaaatcaccagcaaggcaaggcggtgaccaggttcagaaagccttgacctctgtgcttgtggaacagagggaccaggggatggaaagctagctttctgggtagcacagtgtcaggggagccatgcaggatggggctggaggaagaaaaggcagaaagagctgactgaagtttgagttggg

SEQ ID NO: 425777 - DNA, 232 bp, Homo Sapiens
cgtccacacatgccataattagagacctagcgtttcttgccaagaacccaaaagtctctacaggtctcctggcatatccccacccctagatacagaatctgccgcaccaacctgtttttttccaccaacctaaggttctggacctcccggttataatctcatctgtctgcatgcaaacaaagataaatcagaaaacagccccacctgggccactatctgtaatgaaaatcag

SEQ ID NO: 425778 - DNA, 279 bp, Homo Sapiens
attgactccgacccctccataatgtgtgcccacaagatctctgaaagacatagtccgtcttttcaagtcaacgtaagaggcctctgggataaggtcctgccctcccacagcccaaggcatgatccctcaagtcccatgcttagtaaggggcacaagcccttagaaggtcacaagacaatatccaccaaatattgtctacatatttaatcctttgactcagtagtccatcctgaatattattcaacaaaccaaaatctctttccaaagatgctgtttaca

SEQ ID NO: 425779 - DNA, 369 bp, Homo Sapiens
  misc_feature (199)..(268): n is a, c, g, or t
acatgccagtcggacccaacaggcatctatacaacactacaaaccaatcagagccaacaggcatctatacaacactacaaaccaacctctgacccaacaggcatctatacaacactacaaaccaatcagacccaacaggcatctatacaacactacaaaccaacctctgacccaacaggtgtctatacaacactacaannnnnnnnnnnnnnnnnnnnnnnnnnnnnnnnnnnnnnnnnnnnnnnnnnnnnnnnnnnnnnnnnnnnnntctgagacagaaaatacggcatgccaataaaataactctcaatacatataaaagacgagaaatcatacaatctatgttttttagccataatggagtgaaat

SEQ ID NO: 425780 - DNA, 454 bp, Homo Sapiens
actcgacccctcataatgagtgcccaccacctccactcttcatttatcaggagagaatggatttttaaaggtttcctagctggattctctacatactgccatggaaatgtccaaaatttcctaaggcaaaagatggtcatattttttgtgaaaggaaagctgtatatataagtacacatcagcatctcttacccctctctcccacacatgtacactttctataatcatagtatatgcatagaaaaatgactgaaggacttttaaacaatgtggcgcattgagctgactcagaaatgacacacagaaatgaagaacgctggccgatcaaatgtcattactatgaagatactccctatgagctcacagagtcaggacatcaacaatatttaaactctcactgtaaacatgacacagtggtaggcactgtggaaatatatttggtcctattttccct

SEQ ID NO: 425781 - DNA, 437 bp, Homo Sapiens
acccctaataatgagtgcccaaaagaaactccactgtgcccggctggcagtcagtatctttttaagggtgtaatgtgtaagttggacacatgactttcactcctattgtattggcaagaacacagtcacatctagttgcaagggaggctgtgaggtataatttctagttgaagaaccttgctaaattttagccttgctaaaattgaaggtggaatggcttaatgctaaatgggggaaatggagaaagaatactggagcttttagtcatctctgccacctagaataatagagaggtcaaagttcagcagtgtgcacccaaacctccattttcttcatacctgacaccatgttgcagaaactgaaagcttgcaacctgagggctaagactaatccattgcttgagataattctatccatgtttagcagtactttaaaag

SEQ ID NO: 425782 - DNA, 148 bp, Homo Sapiens
  misc_feature (109)..(109): n is a, c, g, or t
accgcagctggctgaggtgcttcttattgcaatgccccatccagtaaattaatatttttgaggatcctggggtttgtcagctactctcattatttataacatggtgcanatggagagtacttctcattccagccagttagattcactc

SEQ ID NO: 425783 - DNA, 399 bp, Homo Sapiens
  misc_feature (92)..(145): n is a, c, g, or t
tcgacccctcataatgagtgcccattaaattcactttaagcctactaacgggttgtacctgatgtttaaaccacagtgcaaagctttgctannnnnnnnnnnnnnnnnnnnnnnnnnnnnnnnnnnnnnnnnnnnnnnnnnnnnncaacaacagtgtttgaacaatttctaaactctatagtactcttatccaatctttgcctacatattgctaatgatggggaactcagtacttgtataggcaagcttaatccatatgttcatgattcatggttagaaaactcttgggctacaatgaattgccattttttgctgtgtagatggctttcagcagatggtttcagagctacttcttggagttacatagatgatacttatagaaaggagtgaaagcattta

SEQ ID NO: 425784 - DNA, 382 bp, Homo Sapiens
accccttatatgaggcccagtgagatgacacttggtagaggagcgggtcagcaccaaggcaggacaagtttagctcttgaaagctgggaggtaaaggagatttcaagaaaagaagacattgagatgagaaagctaaagagcattacatgaaattgcatttagctggggagacagagcaggtgattatctggaaatagcaggagaaagccaagaggaagaaagagaggaaagcaaaagatgattcatgtttgtcaggaaagtgaatgcagtcactctctctgaagaaggaagcatggactatataggagcagataccaggaactgggccatgctgccaaaacctctgctgtgccttgcccactctgtgctgtcgccgctgcag

SEQ ID NO: 425785 - DNA, 164 bp, Homo Sapiens
gctcaagccatcttccgaattcagcctcttgcgtagctaggactacatgcgtgtgacaccatgactggctaatttttattttttagagacaaggtctcattatgttgcccagaatggtctcaaaatcctggattcaagtgaccttctgggcacacattatggag

SEQ ID NO: 425786 - DNA, 148 bp, Homo Sapiens
ggacccctcataatgagtgcccagatcacacagggcctggaagggcaaacacgagaaggagcttcacttttactttagagtgaaagagccactgcagagttttgtgtaaaggggtgattagatctaacttacattacaaaagcatcac

SEQ ID NO: 425787 - DNA, 296 bp, Homo Sapiens
gtgtgagctaccatgcccaggctttatttatcttatgtctggaattttgtatcctttgactaacatctccccattgcctctttcccctggcctgaggtgacagccttctactctctctttctgtgaatttgacttttaaaagctccacacataaatgagattttgcagtgtttgtctttctttgcctgacttatttctcttaacataatgtctttcatgttcattcatgttgactacaagacaggatttccttctcttttgaagctgagtaatgttccattatgtgcatgaatatc

SEQ ID NO: 425788 - DNA, 131 bp, Homo Sapiens
gtgacatgaagctaggctccttccctggactttctgagctgtgcctggggagaccctaggtaaactggctttggactctgaccgcttgtcttgaaaatggtcctgatgatgctggatgcaccaacccggaa

SEQ ID NO: 425789 - DNA, 427 bp, Homo Sapiens
gtaaagaacctttccaggtcctatttgggcttggcccttccaagcagtaacagccccacaggaggatgcgcggatattgcccaggatccacgaggtgaggaggatggggccttccatcaacagtgggccccgaggaggacagcaatggccaagacgcaagggaggaggcagattccagaggtggccccgcccaggcatgcagagaagggaggctctaaaggcatcagagagcaaggggtacctgcggggccttgaaggatgcagggacaggacgagctggaggagctgggcaagatggctgctcagggaggggacagagaaccaaggcacccaacagtccctcctcttcccatctcacctggcaagtgaagaaagggaagggataaaggcagggagggtgaagagaaatgaggggcgagaaggaaag

SEQ ID NO: 425790 - DNA, 376 bp, Homo Sapiens
atcttgacaacagcagctatctggctcccaaactctgtctgcaacatgggatgagcccaggaaaggggtcacagagcccctccctgatcctgccgtggagcccagctggcagcatcccctgccgtggctgggctgggtgccatgttctgtgtgggtgccaaacctggcatggctccttcccaaggaaggtggcccttggggatgctgtgactttcttggctgtggtgaccaataaagggagtgccatctctacgcaggcccatgcagtcccttccaaccctgcacaaagtcagaagcccaaagtgtggtcccagctctggcctgtcaccctcagtggcctcgggcagatcgctcacctttctgagtcctgcctggg

SEQ ID NO: 425791 - DNA, 320 bp, Homo Sapiens
accgtgggacatatgatcagcatattcttcctcttagtgaacccacagatccaacacaggagggacagggagagggcaggctctcaatacttatgtgtgaagtaatgtcctggacaggtcaccgtgatcaaggtggagtaggaaggcctgaacttaggcacaaaaagaaagaagtttcacagtgcagacttcggggaagcatgggcagtgtaatggaagataggggagtgagcgcagcagctacatagagtggcagggaaccccgagagacaccacatgaggtgaaggcctctcagatccatgcctgggatcccatggga

SEQ ID NO: 425792 - DNA, 223 bp, Homo Sapiens
cgtgatgcatagccgtcgtcatctgaaaggccggagtataaggaatcagaatgcataagctgaggtgagtgccagcccctgttcacgtcatgcttatccgaggggcctgccaaagagtgcagatatgtacccaggtgaccaggctccaacgacatcctgcatactcggcggcacctccgcacctggcgagccttgcttccctgctgtcctgccggggtcccat

SEQ ID NO: 425793 - DNA, 349 bp, Homo Sapiens
taggctgatccaggatatgaataaatgaacacctctatgaacattaagtagaaggccagtcctagggcactattgctagatcccagaactcttctcctcttaactgcccactgcctctgagtactcagcagcacccatacacagtgggaacagcctggtcttcctgttcccaaagaatggccttagcctgctgtgtgaaggggaaggtgatcatagagtatccaccaggtgccggcacctagggtgtcttttacatatattatcctttcatccttgcaatcttggaggtaaatactgttattactgcagatatagattaggaaaacaagggccggggtcttgccatgtt

SEQ ID NO: 425794 - DNA, 245 bp, Homo Sapiens
ctggaggttggcagtcgatggtgagcatgaaatcaggtggtcatccagtagggaggaccctctggcctcccaggcccccagcctccttcttcctgtcagccagattcccgtgcaccgcagtcacgcttgctagtttccatggacacgcgtggactcctaggaaaccttttccggagactgggcacgagaggagtgatttgcgtctcatttgaatgctaggccctgccccgaaagtgtgccatctc

SEQ ID NO: 425795 - DNA, 447 bp, Homo Sapiens
aattacaagcaagtgaggtatctctctagttaacatctctcctcttctctgcttattctagaccttcttcaccgttattcaaccttggaacctcttccattctcctccctcttagccgtctcccctgtaccttcgaactctttcaactggattatttccatgagtattaattaaaacgtgctctaattatcttctatcttttaaaacaaaccaacagaaactctccttgggctcgtttgccatctaccagtgccttatctctttcttctcattcacagtcagccttcttgagtttcagtgtccagctactacttcatcaccaattacccatgcaactctgtgaagtcaggcgtatacatcactgtttcattgaaagagctcttgttaaatgaacagtgaccttcatatggctaaagaacatgaaatgtctttggttcaacttacttg

SEQ ID NO: 425796 - DNA, 268 bp, Homo Sapiens
aaccgtctctcccagaaaaggatggagttatcggtctttccctattccgtcccccaccattattgtgtgttgtcttccttacctctgtagattaaattcctctgcagtactagccggtaccttgtaaaagcagtgcacgaatatttctttcctgagttaaactgagaaagtctaatggttataattctctaatttctcatacagaaatccttttagtgtccctgtttttaaattaagagcaacttatcttctgcattgctcatttctt

SEQ ID NO: 425797 - DNA, 268 bp, Homo Sapiens
cactctaaatagttgtgagaagtaggagaggtagtgtaagaaaatgcagatgccccaaatgttacttccggggagattattctgtcccattccctacccaagggcttacttatttaatatcctctgctataaactccccaagtatccccaagctataaactccttgaggctaggtagtgtccatctccactgtagtatcctaatacagaattcagtacatgtctgtcgaatgaataatgagtgatgtaatcttcatagggggagagag

SEQ ID NO: 425798 - DNA, 361 bp, Homo Sapiens
  misc_feature (234)..(234): n is a, c, g, or t
ggtcggacctctctcccagaaaaggcagggcagcagcacagcctgggagtcagtcaggtgctgggtctcgacgtctccacccgctggctcggtagtggggtcctctcctaaccagccccgagaaagatgagcatagctgctgcttggttttgaaggaacacattcctgtgtctatatttgtctggagcccactagtggattttgggaggattccgtttcccaaacacacagttngggctgcaggaactgcagtgattatggcaaatcggcaggtgcggggattgtttatgaattgctgtttttggtcccagcttgagcttttaattcacagagcaaactgttgggtgcagtggaaacagca

SEQ ID NO: 425799 - DNA, 293 bp, Homo Sapiens
ggtgaactcatgtgtcccagattcacagctagtgaatggagaaggtggctttgaactcaggccctctcactccagagcgtgcactcccattgtggcatgacactgccttgctgggccgtttagaccacctgtccccaccttcctcacttggaggaacaaggctcagacaaggcatttgctgacttttacgttggagacgtaaaagtctgtggctgtggctcccggggggaagccctgcctgcttgtatgcctcttcctcactccctcattcccagatacttcttgtctgcctg

SEQ ID NO: 425800 - DNA, 171 bp, Homo Sapiens
actcccgagaaaagggaggggacccaaagagggtagccctgaacatatattttcaattatcttgggcatatgcctgtaaggggaatgctaggccatatagtagctctacgtttaaccatttgaagaactgccaaactttcccaaagtgactgcaccattttactttccaac

SEQ ID NO: 425801 - DNA, 510 bp, Homo Sapiens
caaacgaaattcatactcataagcagtcactctggtatgtatccctcctccaggcccggcgaaacacaagtctacttggtgtctctggatttacctattctggacacaccatgataaacagagtaagacaatatgtggctctttgtatacggcttctttcacttagcctgttctcaagttttatccatgttgtatatgtattaatggttcattcctttttattgccaaataatattccattatatgggtttaccatattttgtttatccattcatcaattgatgaatatttttgttgtttccatttttcaactattatgaataatgttgctatgaacatttgtgagcaagtttttaatatggacatatgttttcaattctctcgggtatatacctaagaatggaatcgcttggtaatagggcaattctatctttaagattttaaggaactaccaaattactataatttccacgatggctgcaccatttcacattcccactagccatgtat

SEQ ID NO: 425802 - DNA, 160 bp, Homo Sapiens
  misc_feature (62)..(99): n is a, c, g, or t
catctttttaagcaaaaagagtgttgaatgctaaatactttgagaataagtagatgagtacnnnnnnnnnnnnnnnnnnnnnnnnnnnnnnnnnnnnnnccagagaggtaaggtaaagggacaggtaggcacagtgcggagaattcttgtcatgttctag

SEQ ID NO: 425803 - DNA, 179 bp, Homo Sapiens
gaaacatcagtcccatagtcctagggacttcccgactgtacaagaaatcactacttcatgccccagtgcagtgttttagaggagaggctgcaaggcttgggaaagtggccccgcattcagagtcagacctcaggggctgtgagttctgactccgcttcgttgtggttgaatcatcttgt

SEQ ID NO: 425804 - DNA, 171 bp, Homo Sapiens
tttaaaaatcctgtaaaacccaccaaccagcaacagcattactgaaaattcaaacaccctctttgtcaacatgctgtgtatgtattatactttttattccagacacatgctctttaataggaagaatgctgggggaacttgggcaggcaaggagccaggcagggtgaggag

SEQ ID NO: 425805 - DNA, 190 bp, Homo Sapiens
tcggacctcactcccagaaaagggctactgacacttctcctctatagtgagccacagtgagggggaggcagtcagcagccatatggagtggggttctgcttccctgatccaaataggttgttttctctgtgtacaaactagacctttatagagcttcaagctgttctttactaaagagtcaagtggacat

SEQ ID NO: 425806 - DNA, 187 bp, Homo Sapiens
tagcctacactcccagaaaaggtgtctactcctgcaggcttacctgtaaccttgtcactcactcttctgattctgcaaacatataaaccacggagccacagccaagagaatctggacttgtccgtttttcctgaaataggatatcttaaataatccgtggctcagcactgcgccctttttttctttt

SEQ ID NO: 425807 - DNA, 198 bp, Homo Sapiens
acgcggtacgctcatccccagaaaaggtattctatgattctttatctccgtagtgatccacgtccccctctgcactccccacatcaaatcccagccaaacgtccatgatggtcacccaacaggtgttctagaggtatcatgaaaaacaatacattaactctttgtaaccaggaagtcagggcttccatctgggaggga

SEQ ID NO: 425808 - DNA, 192 bp, Homo Sapiens
gtcctctatcccagaaaaggctaccatgaagatgaagtgtgtcagacatggaacaggcttaaacaggccctggctcgcagatgagcctccgatgaaagtcggctatttctgatgcctcttaccacagcctgtgaggcagacattctcaggcttctttttagagctgagaccaagggggttcagagagggtga

SEQ ID NO: 425809 - DNA, 190 bp, Homo Sapiens
tcactccccagaaaagggctacacatcctgtcctgatgaaactgaggtagtgaacagctccagaggaggaagctatcctcattgtaaatgagatgaaaggcagagagatcagtgaggcctggagggacctagaaaagctgcatcttcgcaaatgggaagactgagagcttaggggttagcgtggccttcc

SEQ ID NO: 425810 - DNA, 125 bp, Homo Sapiens
aggtgggcagacagcacctatcaagatcttacaacaggagggaaagctaataaggaatcctccaaagggctattctactcctctctaccccctgatgggacagcacctgagtctactacaagccc

SEQ ID NO: 425811 - DNA, 200 bp, Homo Sapiens
ctcggatcctctactcccagaaaagggaaactgacagcttctactccaccaggcgaaaatgggcaaagcaggtggaaagctgtatcaagttactaaagcaaattggatctacgtgggtgcacgtgcccctattttagttcgtttcatgaaaacatctcttctcaaggcaaggagtcatggcctcatctctctggaaagct

SEQ ID NO: 425812 - DNA, 178 bp, Homo Sapiens
tatccccgagaaaaggtacatcctcaagggctaccccaccttcagcatccccttagggatcagctgaggcctatcttgtgatcggacaccacagcccaatttctcccttggcccaattgtgcttcctcctattccacaagtgtgaatcctaaaatctccttaacaaacttcctacatg

SEQ ID NO: 425813 - DNA, 173 bp, Homo Sapiens
caggaacttatgcttcagttgctcggcaaaacttaaagtcatcctggattttctctatcttcaaaacactgtatatccaaatacaccctctgtaatcaccatggtccaagtcaccatcgtgtcctgactgcactattctcataatctcccgactggcttctttgcttctgctc

SEQ ID NO: 425814 - DNA, 184 bp, Homo Sapiens
cggacctcaactccccagaaaaggcatgttgcctcttttctccatgtctttgccacagccatagtctagaccatgctatcctctcccaccaagatgactacagtgacctccaggtccatctttttcttacccttgggtcttcaaagtattctccatttaatagccagaatgttcttgtgaaatg

SEQ ID NO: 425815 - DNA, 476 bp, Homo Sapiens
ctcccagtaaaggcaagattacatcttctgtacttcttattcccaggatccaggatagaattatctcaaattctaaattagttgtgtgtgacttcatgaaatttttttctttgagaagagaaactcctttggttaaaggacacacagctttctgactatactgctgtttggaaggggtgtgttttttaaaatgttaattagaatttatttggctttcgaaaattcataaacataatggaaacagaaatgacacaggaggcttcagaccacatccctttaaggtaactactctgcccacctgctttcccacaggctcagtgtggccagagctgactgcgaggctggctttatgctgctgctgtggtgggccctgggccccataacctgtaccctcctgaagggaggcccacagtgccagtccacaggtcgatgcagccttggttcgctgcctctggcgctgactgcaggggcctggc

SEQ ID NO: 425816 - DNA, 405 bp, Homo Sapiens
caaagaagaatttaagctcaccttttatatagcttttctgatagccacaatttctgcattaaaaatctgagggatgacaaagtccctatgcatactagttaggaatttcttagaacctctcttccatttactatactgtttcccatgttcttttgggtgtttttcatattgatggttggatatcattacaacaattacttttggctgtttttaggtcttcagctgctactgggatacctcttctatattttcaaagtaaccagtgtcatttcataattgtttattatacagcttaagatataagcaccatatacagatttcagtaaaagcaaaatttgaagctgttttcaatttatgaaacacatcgtctatttataagcaatttgatgtgtatagtttcatatc

SEQ ID NO: 425817 - DNA, 269 bp, Homo Sapiens
cggacctctctcccagaaaggcccgggtggacctttgtcccaggacaagttgctttggggcgcttacaggttgaatcacccatagctatgttttgtttggcttgtactgtgttgtttacattattttattagttggcaatagctttaaatcaaaatttacattaaggtccagatttggggctcctcttaaaaaaataaatcagcacatctacaacagtaggattttcacgcccaatggcaaaatctgttaaagctgtgtgacagcttct

SEQ ID NO: 425818 - DNA, 335 bp, Homo Sapiens
tgttggagaggaacggtggtgctgggatcgtgcccaggccatggctttgatcccgtcttgaagcccccgtctagacaatgctggatgcgagaagagctgtgtattctcaagaatcacgtgagcctctcgtcccggctgctgggtccgtggcggtttgtccgcgggcgctggtgttctgcaaatgacgtcgttaccgccgctgggtctgtggcggtttgtccgcatgctctggtgttctggaaatgacgtcgttcccgccgctgggtccgtggcgctgtgtccgcaggcgcaggggcgcaggtgttctggagataatgtcgttcccgctgctgtgt

SEQ ID NO: 425819 - DNA, 125 bp, Homo Sapiens
tctctcctttcgtcaggcacaggtcctctcacaagcatggtacctcactcttcatgttatttggttgggccttttaaaccattactcaagggcagccaaactgggctgcttgctgtcctctgtgg

SEQ ID NO: 425820 - DNA, 422 bp, Homo Sapiens
aatcgcagaatacaaagtctagacgacacggaggccgagtttccgtggttgattcattaacctagttgcactgcatagacatctttatactatgtccctcataacttctatgcaaagcagttcaacatctaactaaatacgtaagtccgctggctaggaagtcactaaaccaaaatcatcaatgttcgcagtactcctgggcgtaaaatacagagctaggaactgtgcacatgtctttcttcaaatcttagtagcaattaattccccggcgttctgcaaaagcattacttttgctcattcaggagaaagaaatccaaagtttaaaactgaatactgtcacagagctgcaaacacaaggtccctgagaaagccaaccagcctatctcaaactggatgggacacaagtctgttcttaatttgac

SEQ ID NO: 425821 - DNA, 406 bp, Homo Sapiens
gagtgttaaggctatagcgcttcagtcaaattaccagtggctctattagtgttcgtgaaatctaggagcaatctatatctgcattgcaaaaaggggtggaatgtttccctctgataacacattagtatgagtccttcctagatgggtgttctgaaattataaggacgtgatagtgtggaggagaagcagttacgatagagaaaccgggtgctttgaaaatcagcagtgatctttgcaatcagctgattaataaatatttatacagtacctatcaagtgctacactctgaaaaaaataagtatgcaatgataaatcacagtacgggcgccaatgtggttctgacctggaagcgagtagaactgagccctgacagccacttacgattgctgctatctttggtttaatc

SEQ ID NO: 425822 - DNA, 101 bp, Homo Sapiens
cttgggcatatgctgcgcctgacaggtatggcccgtcctcagtgtcatcctggtacaagcaggggacacatccagtttgacaaagagactcgtgggatggc

SEQ ID NO: 425823 - DNA, 287 bp, Homo Sapiens
tatcccagtgcttcccctagagatcaacaccttcgctagacaacatcataaacctttattttttttgaagagctaacagtttagggaacattttatcgtttctccagcaagttcactagcttctgatgtaaattgccatccaggttccccagggacagcccaggaactgggggccagtgtctcaccctctaggctcaggtgtgtggcaccctgctgcggggctcctgcccgcctcccctgagacagcacgttcctgcagctcctggtggagggatgcttattctgta

SEQ ID NO: 425824 - DNA, 198 bp, Homo Sapiens
gacaaatatcagaccctcatagcagtgttctggaatcctttgtgagggacaaacattcagacctcagcaggagggttctggaatcctgtggtgagggaccaacattcagaccctcgtagcagtgttctggaatgctatgtgaaagacaaccattcagactctcatagcaatgttctggaatcctatgtcagggacatt

SEQ ID NO: 425825 - DNA, 269 bp, Homo Sapiens
gaactgctgcaaatatcgcctttatatgtgggggtaacgtgtggggagagggaaagtattcctctatgaaccctatgattaggtctcagtcttttagtgagcatgtggcttctggaatgtgaactttacaagtgcttctcagtttttttcttcccccttaggtgggacaagatggccagagtgggctggcgttgggcatttttcccttctcccaggccagttaggctcgtgataaaactccagccatttaggctctgattaaattcctc

SEQ ID NO: 425826 - DNA, 325 bp, Homo Sapiens
tggaccagagagaaggtcatgtgagagtagaggtgtgactccttttccccaggacatgtaggatgggcaataagaatcagtacaaatcgttccacttcccccttcggccttgtttactttgttttatttcaccctgctttcaccctgttttgttcatcctctttacaggataaaagagaaccaactgagagccacagggttgaactggagaacaaaatactggttacaatggaggcctatgccctggaggctaaggtgtgtagccttccagagaagaccttcataaccaatggttacagcatattttcttcccaggcattgggca

SEQ ID NO: 425827 - DNA, 162 bp, Homo Sapiens
gaatctggggttggggttactagcggacgtcgcctttaacccgctcggtgtcagcgaaccagtgatttcgaacacagagttctggtgtgttgggccaggacttctctggtttgaccctttaacgaagggggcgggagctgagggccagtgaccgccagtaac

SEQ ID NO: 425828 - DNA, 398 bp, Homo Sapiens
ctgtctatagaaagcgtgcacgggtccacagttgaggggatggggaggtgaaagcgagggttccgaggctcccgtgattgcggaacggggtgactatctgtcatgggaagcttgtacctgcctgccgctcactggatgcactccccaactgcgctttccaccgcctgtgccagggtctgtgctctttgaccaagatcagccactgcatgcttactcatcctttgtaccacctctccgtcgagagccggggggaaattaagggctgaaagaagcttggctagagatgcggggtgcctagagtcgtaggggaactcttgtgcgatgcggtgctgaatccgaggggatgcataggtggcagctttaacagctgcagccaggaagtaaccatgaatcaaatg

SEQ ID NO: 425829 - DNA, 271 bp, Homo Sapiens
taggatttgtctgttgtgtgtgtgtagctgggctaccctcgttggagtaggtttcgtgccgcttttggcttcttgggggcacacagcggaatttgctctagggatgcggcgagcatcgagcggtgtagtgggctggggccgggcaactttgcagcctaatctcagtgccgctgaccgcaccgttgttcgtgatgtgagctgactgaggcatagacacgggcaggctgcagggagcttccaaactttgaaagcactctccaggaatggatga

SEQ ID NO: 425830 - DNA, 210 bp, Homo Sapiens
tggatatcactgttggggataattaagctactccgtcaaaaggcaaagacgcccagtctggtgagttaaaagccccctacctgaagccatttcagggtcgacctactgtctacctttaggctgtgcagcgctcatttgcactctacttcttctggggggtgggaaatgattctttacccatcctttggttctttttaaaaagcagctctg

SEQ ID NO: 425831 - DNA, 306 bp, Homo Sapiens
ggacctggcctttgtggtggcccagcagccgctgaggccttctcaggactgtacctccacgctccatgtctggttgggcacccctaacaaaacaccatggactgatggcttaaatgacagaaatttaatttctcacaggtctggaggctggaagtccaagaccagggtgtcagcaggtttggtttcttgcgaagcctccttccttggctcgcaaatggttatcttcttgctgtgtccccacatgattgtccctgagtctgtgtgtctgtcctcttcagataaggacaccagtcctattggattagg

SEQ ID NO: 425832 - DNA, 428 bp, Homo Sapiens
catgtgataacaatatgcagcatactgattcacataagatcattattaaatgcatccagccaagaagcacttgaaggccacagtcagctatttcttcccaacaggatacttcccccttcacctccacttccaatccacacaaagccattctccacatatcgcccacacttatgggagagcaaagcatctgtgctgtggcctcaaaacctgacacattccagagcaaataaatacaccagaaaaaggatacctgactctgtagaaaggtataaacatctagaagttatgtgtggaaatcactgaaaatatttccaaataagcaacagttcaaaaagagagagcaagagagcatgagaagacacatggcctcaaatggagggaggcagaagcacactgggtgcaggaaaacagtccacaggagacccagg

SEQ ID NO: 425833 - DNA, 351 bp, Homo Sapiens
gggaacagcattttatctattaattgctttgggcaatatggccattttaacaatattgattcttccaacccatgagcatggaatgtttttccatttgtttgtatcatctctgatttctttgagcaatgctttgtatttctccttgtaggtatctttcacttccctagttagcttatttttaggtattttattctttttgtagtgattgtgaatgggagttggttcttgacttggctgtcagctcgactgtttttggtgtgtaggaatgctagtgatttttgcacattgattttgtatcctgagatttagctggagttatttattagctaaagaaacttttgggccaagacc

SEQ ID NO: 425834 - DNA, 133 bp, Homo Sapiens
tccaggtaccctcatgattctgttcctggcgagaacccacttcctggcttgtgaacgctgccctctcactgtgcactgacatggcattccccaggcgcatgtgcacggagtgaaggagcacgagctctctggt

SEQ ID NO: 425835 - DNA, 135 bp, Homo Sapiens
aaggctaacacagtctcctcatttaactatgaacttgtgattatgatagagaactccagcacctacttctgtaggggcattctgttctagagtgccaaccagatgcctgaggtgaagtggaactggagctcagtg

SEQ ID NO: 425836 - DNA, 294 bp, Homo Sapiens
gtcaccttacctcattctgactgaagatatcaatcatactcagatatatcgccgtcatctgatggggacagaacccatgttcactggaagaagtcgtctcatctactcagacacccagatagtgctctgccttctggctccttcatcctccgagctctaaaaagcccagatccaacaacccatgcaggacaaagcaggaccctccttctgacccgcgccgcgctagaaacaacggcccctcagtgtccagtcaggactctccttctgaccctcgccgtgctagaatcaatggcc

SEQ ID NO: 425837 - DNA, 290 bp, Homo Sapiens
ctgggtctccgtaatgaaatacaagcattcagtgcatactagcattggctgacatattaatattttagggaccaccacagccttataaaaacaggacgtgagaaggtggcaaggcctataccgttcagggatggtcctcaggtgtcaactctgagggttcagaggacttggggctacccaggagcactacagggtaaactgaagcccacttccagaatatcagaacctttgcttccagtgaaaccgtcacgtaaggtggagtttacagggttgtattgtggctgtgtctg

SEQ ID NO: 425838 - DNA, 184 bp, Homo Sapiens
cgtaccagcggtccagagaccccagagatgtgcgatgttaagcatctacctgctctgggacacagtcaattaaatgtgactcgcaccagcctgcatggacagattgtgtgaacagattatcttctcagaagcagctgcagctgtgtgcttccgttatcagccctccgaggtggatctgaattgc

SEQ ID NO: 425839 - DNA, 171 bp, Homo Sapiens
catggacactgatcattcgtgcttatcttttgcctgaaaataacactgctattaaaaaccatgtagtactgtgaggtagaagtgtatcctgaatagcagtttttcatatctcgaattagcttatcaaactctttgtagtttagctcaaaactaataatcatcaatagtctc

SEQ ID NO: 425840 - DNA, 151 bp, Homo Sapiens
cctacagcacatttattctcttaaacagtcactggagaatccttctaaaaagatgctactcaaagcacagtccatgagctgatgatggttcagggactgttactggtctaagaggagatgagataaattaagaataactgtttagggctgg

SEQ ID NO: 425841 - DNA, 223 bp, Homo Sapiens
catctggctcacagtccttgcaccagaggcgtcacgagagtcaggaaaagttctcctctcatgccgaagacgggagggaaaccagagggactggtgagccttgagtcggccacaggtgtgtggaggatcgtgacttagcaagccggggacacgctgttaatggacttcctgctgtgggggtgagggctccgtgctccatctctgatgccctgaacttttcccg

SEQ ID NO: 425842 - DNA, 412 bp, Homo Sapiens
accttttgtcttcctctctctgctcttcctggattttgtaactctcttgaagctactcacatggattgaactgtgatagatactgactcctagttcaaaactttgatatgatgcagtgactattattcagttgcactgagcaggttatatcaggtagagagcaccctcaaaatctcatgatagacaatactataatgaaaagagaagggttctccagaggaaggtatttttatgctagtaaccacagaacttttttgataaggccaagaaatttactgagcttttttgataaggtcaagacatttgccagaatagaggcttgtctcggcacatagtcctggagtcttgatggttttcatttgtagttgttgcagataaggaattatttgttgcttagctgttttttttcttg

SEQ ID NO: 425843 - DNA, 286 bp, Homo Sapiens
ccatgtttttcctcatgggtgcagtcttggggcccattcaattaaggcttcctgccctcccttagacactgacctaaactgagctcatcagaccctctgtcctggaccctgagccaggaacagacagcaacagggacaagcaccccatccccaaagagagagaagcaaacagcaaagagcagtcattccagccctggaccgacgaggccatcgagtagctccagcttcccaggcttgggagctgctgcagttcctgcccattttcaggtcctggttttcagatccc

SEQ ID NO: 425844 - DNA, 341 bp, Homo Sapiens
actatctagcacgcggctggctgagcacttttgcgtttacactattttgggactggtttctgccctgcccattagaccaagcttcttaagggtaagtgctttatcttcttatctctgatgcattccatgtttgagcctatagtttttattatgcccaagagggtactttttaagaagaaagagattaaacaatcctttcctctaccccctagccagagaaacctttctgagacatagatgtgatcatatctgtctctagtttaaaatccttcactgcctcccaggacccttgggatccagtccaaactcctttacgtggctcgcctaatctttcatgatca

SEQ ID NO: 425845 - DNA, 123 bp, Homo Sapiens
gataatgagataggcagaaaatagaagccatcccaatcctcagatggaatgaagatttcttggcagagatagcaaggaaccaggacaggggtcaaggtgggtgggtttccaatgcacagagat

SEQ ID NO: 425846 - DNA, 152 bp, Homo Sapiens
ccgccctgctggctgaaacagttgggatgagatcatgaaagatcattcattcaaatacaaaaaaatctgaacctggtctgtggatactgttgtgaaaaagaaatcgagtaagatttgtttagaattacacaacaggaagatataatctcccg

SEQ ID NO: 425847 - DNA, 188 bp, Homo Sapiens
ctgccaatcagagcaccgaggagctagtggttggggagttggcccgtgttggacgtgtgttatgttcacttacaagcacatttattgggagataaagataatcgatctttatgaatttatcgacccgattgctttgaagctcttttttcgcgttcttcctcttactctcgctctagccccaaggcccc

SEQ ID NO: 425848 - DNA, 394 bp, Homo Sapiens
gttctagaagcaaacaaggaaggcttttgaacttacacatggaagcactaaacagcacaacccgtaagcaaacaacgacgacaacaataaaacgcttaacgtttaattaagtttctaccatgcactaagcctggtgcttcccaccttacctacattatttcatgttattatcctcatgttacagacaaaaagactgatgttctgaggtacttcatgtattacctctaagatcatttagcttatttgatagatgaggaaagttttgtgccagacaggtagagtgattgccccttgatcaggtagctagccagtggcagagaagctgaatttgaacccacactttgtgacacctggtcctctgtcctttgctcccaaatatgctgtttcttgggga

SEQ ID NO: 425849 - DNA, 431 bp, Homo Sapiens
tccattcgagcacgcggatcaacagttttatctgtctactgcgactttcagcccttgtcaaataatgccacaatcacgggttcccatgccacattcatcgtctccgcttctgcaccttgatctcagttaaggctcagtcctgaaaataaactgtttgtgaatgaggaaatcatctccgcatgattggggctgctgaagagcgtgagatatcattccaattgaacagtcttctgaatttttaccctgtgatctgaggagtggtgcatctaatcgatcacctaaatgatgattcaatctcttgttgatgtacccatctatgggccttctatagacattttctccaggcctccagtgttttccctatctcctggaagaacatcagcacttcctcgggagtgaatcaagtaagtcatcagcaccagctctagcac

SEQ ID NO: 425850 - DNA, 292 bp, Homo Sapiens
tgctcaggtctgcatcccagaaaagaagagcctaggcacaacagctacagccccaccctactcttggccttcgaaccctctaggtggtccgaatagctatgcagacccaaggtcagaaagacagacttctctttgattgcacagtttacttttagaaattgctcacaacagtcagacatttcagacccatcctcaagagagactttccacaaagacgctggctgcgccctgtcatctgtgcaatgccagaaatggtggcaccccatagccacggagacctgagcaagccagg

SEQ ID NO: 425851 - DNA, 310 bp, Homo Sapiens
aggtaactatctcatttttctgctacaagtcgcagagttcaaacaaaaccctctgttgtgatttttcctaaactgctcttattgtacttggggaccacagaagacactgaggacttgggactccacagccattgcttccagcgtcatccacagagggttctctgcattggggacctggcagaatgatggcgtctggtagagaggcaggcgggcggctgctcattccctccactcctccacagatgtaagtcaagtgcccccatgtgccagccggggcaccaggcactggaggagacctgagcaagccagg

SEQ ID NO: 425852 - DNA, 261 bp, Homo Sapiens
ggcccctgtgttgctcagggtctctccctccactcactgtctattgcttttacaggatttgccaccaccctccaccctcatccaaacagaggcctccagaccagaagccaggtcttacactgatagttcaggcttcctgtagtactagggataacataaacccagccatgccacagtcaggtcctggttgcactgctctctctattccttggcaccccagaaacacaactttaaatgagccacagacctgagcaatccagg

SEQ ID NO: 425853 - DNA, 378 bp, Homo Sapiens
agtactatctctctctgtctctgtggtatctcttggggcctgtatgcattagcatctgcacggagcccagttttctcctctctgaatgtaactggccacttggtggtggtgtgttagctccccgcctctgtaccctgtatatgctgccttacaggatgtccacctttagcatctaatttatccctagtcaaggagctgtggttgtttgtcacttggagccttggatgctcccctggtagctaggaggagttggaggcagcagcggcagctgtgtgatgcatcccaagtccacggcccgcaggctgggttagcataaggaaactcgctgacttactcagtgagaaggggtctttctgtcttgtctagaactgagccagc

SEQ ID NO: 425854 - DNA, 343 bp, Homo Sapiens
gtccctgtgttgctcaggtctagccccaaccatttttgtaatggggtctaagcttttccaaaactcttcacaggattgatgtgcaaagagggtggagaaccaatgatttggaccaactgacccatttatacagtaacaagcccaagtggaagtagtttgaggccaccaagaaacagggaacagagtcaggactaggagctgggcctcctggcccccaggtaggggtggtgctacctttagactcagaggaaacctctgagctctctctggccttcgccctgtgagggagaatgcagctaagacagctgggcagccaggtagcaggagacctgagcaagccagg

SEQ ID NO: 425855 - DNA, 430 bp, Homo Sapiens
aatatagctggccccctttttgctcaggttcttgctcaggtctctcttccagcccacgggacacgcaccatggtcttccggcattcattcattcatgccactgtttgctaagtgcctatgctgcaccaggtgcagctaccaggtgctggagacacaggaggatgagagcagggctgctgtccacaaggactcacaatgcagtggggagacagcaacctgtccacgcccactaggaagtagaacgtaaatgatgggatgcaaacagggcttctgaggttggaagagaccctgctacaaagaggcagagccaagattcgagtccaggctgtgggctctaagctgtgtgatcatcaccctatgccaccacctcccacttggattttttctgcatttaaatccagtgtcgcagaccagacctgagcaagccagg

SEQ ID NO: 425856 - DNA, 336 bp, Homo Sapiens
tgatgctcaggtctggggactcacttggtgtagccagcgctggctgttgaaaaaggcaatgcgtgatttctattccaagcctttctgtgtaagagaagaaggtactcttgtgtcctggtgtccgctagatgcaggcaaccccctcccatcactaaggcgtgttctggggcactgctaccctcctgagagcaccctatctgagagatccctggggagtttccaacagctgaacctctggtggacaaaggctggccagcttctttttccatgaagtgcaggattattcctgggagggaagttagaagacctgaaagccagagacctgagcaagccagg

SEQ ID NO: 425857 - DNA, 265 bp, Homo Sapiens
ggtctccagtattaccatctgttgtcaaaagtcccaagtagagagcatagcaatgctatacaacaaaagagaacaagtcactgtttcaactgcaggctgtgaactgtatggccttccaagctgttatttggaacgttgttttaaataaggccaacactataaaatctgaatttctctattcttggatttaagttcatgcctcagcatggtcctggtaccgggaagacagtgtctttgaataagttgcagacctgagcaagccagg

SEQ ID NO: 425858 - DNA, 247 bp, Homo Sapiens
  misc_feature (132)..(132): n is a, c, g, or t
gagtgtgtgtgttgttggctgaggaaggggcagtggatgctagcaggcagaattccaggcgtctttttcactgtggaacaggggaggctcacttatcagggtgaccattagaaagtcatcctggcgtcaggnagactagcagtgagctgttgcagcagttcagttgggggtttctggaggcaaaagtggtgattataaccctccccaagcgaagcatatgtaaatctccagacctgagcaagccagg

SEQ ID NO: 425859 - DNA, 235 bp, Homo Sapiens
caggttatttggtagcccgaggttgtgtctagctttgccactggctcacgctgtgaacttaagcagatccccactaatccctaggcctcagtgttcccatgtacacgaggggtgggattcgatggtatccaaaggccttcctggtattgatggtttgacattctaggccatctggtcccagaaggtactgtggggcaggagaccagctcatggtggagacctgagcaagccagga

SEQ ID NO: 425860 - DNA, 175 bp, Homo Sapiens
ttgacaccaagcgggtggtattctgtcattttatagctgttagccccgtaccattgaagaaaaccaggactcagcttcaatcattactttgcggcggtcttaactgtaacaactgggttggagggcatgatggtaaggtgagaggcatttgatgggtagcgatggatgacctgag

SEQ ID NO: 425861 - DNA, 357 bp, Homo Sapiens
  misc_feature (335)..(335): n is a, c, g, or t
ccccttgcttgctcaggtctcatggacatattactgacagataatttctttaagcttcaggttctacctctataaaataggggatgataattatattttatctgtcagtgcacattgtgactgtcaaggctgaattttgtgaaataaggtcaaatgaaacagtgtatgtgtaagtaacttgtaaacagttaagcgttctatacaaattttttaattactataagaatcagtttcctctggtaacctttcatcttgagcagggctcaacatagactttttatactgcaagctgtggttttgtgggtcatgttttaggaaggcagcaatgtatttcngagcagacctaagcaagcccgg

SEQ ID NO: 425862 - DNA, 267 bp, Homo Sapiens
cacaccctggtttcccttcccagagccgacgcatctgggtagccctctttcccgctcctgaacctttacttactgactttgagctctgtgactccgtgcggttctcgcaggacttaagctaagcttaccaattggttcaatccactttagcgtcatatctctgatctgcttagaagtgacatgccacagatgactattgcacacctgggtcctgccccagcaggtccatgggcccctttcccagtgtggccggtggcctcagcttgg

SEQ ID NO: 425863 - DNA, 106 bp, Homo Sapiens
gtcgttgtagagggataggtgctgggagggactcacggggggctgcatggcccccagctgtgggtacagagaggtcaatcgcccacaggactgccccgtgcacact

SEQ ID NO: 425864 - DNA, 223 bp, Homo Sapiens
tagcagctaggggctgtcaaaggcacagccgggccaggccctgggaaggttaggcgctagctacaaggaaagacacaagagtggagaggcaaggactccggggcgagcagaatgtggtgcttctaactcttggtagctcaaccctgggcaagttcgatggaggcaaaacagagataatgatgcaccccacctcttggagtacctcataactgagaaagctccc

SEQ ID NO: 425865 - DNA, 180 bp, Homo Sapiens
gtgggcctatgaagaaattacccgaggcatttcataaggaaaaaacaaaatgtgacctgctagttctgttactctgccacaagttaacacattttgaacttagtgcagagtcccatacatccagtgtgactccccaaatctcaaaaatttaggctaaaacctaattttgtgtccaagcca

SEQ ID NO: 425866 - DNA, 160 bp, Homo Sapiens
  misc_feature (19)..(19): n is a, c, g, or t
tggctagcttgaagtaagncttacagtgcgtgaaagcaggcatacagaggcaggacaaactcaggaccgcatatgaccattgccaagcaatccagatgtctgttacctaggttttgctctaaagtgccttgcactggtttatttcataaccttcactatg

SEQ ID NO: 425867 - DNA, 414 bp, Homo Sapiens
acataatacttcacaaatacatagattagagtaccagcaaggcaacatcagcctttcccctttaggaaaatcttcacaactgtccatgtagccgtccacactgctgtcctcctgagcctctcctccccaaatcatctccagtgcaaggaaagtgatctactttaggtaggttcagaacttaccctggcttaaaagccttgtgcctcaaaggaaccaatatctccagtaactcaatagatcaatctttgatgtgtcaaggagcatgctgaatcacaagtttcactacagtcacagaagtccaatgatacagcctcctaccaggcatttatcactcttccagcccagaaacagttgaccaatcagcagtcatttatgccataatgttgcctagtaacacagttaacatttgaccct

SEQ ID NO: 425868 - DNA, 169 bp, Homo Sapiens
  misc_feature (48)..(64): n is a, c, g, or t
gaggggccttcagacacttaacgttattaactctcctttaaatatctnnnnnnnnnnnnnnnnntaacaccatacgtgtattctatacaattttgacactttcattctgccaaagtgattctttcattactatgattcaagttgtttttatccatcctgtcttacaaat

SEQ ID NO: 425869 - DNA, 320 bp, Homo Sapiens
catctccacggcagggacatactgaatgacagcctccatgaggaagataggacacatgcttgtgatttgtaaaactctaagtagcctaagagtggctgcaacgtcacggcactgtgggaaggagggggaaaggcattagacagtggacagctaggctgaaaaatgaggtaggaagccaagcatggagggcaatgatgtcagactataaaatgtcctttactggacacgtttgggcaaaagacctagtacaggtgaaatgtctatatctaaatgattttaagatgatgcctcttatatgtttaatattatattaagagtat

SEQ ID NO: 425870 - DNA, 301 bp, Homo Sapiens
cgccttcactgaaaaaaagttgatgtgtttctacagcccaccttagctgggtattttcacatctccatcgcatgtaatgttcctaaacaacatgataatttagatacatgaaattatatatccataaatagattaggttggagcaatttgtccaaatcatggagtcagaatataaacttgggtcttcttgactcagagtccaccgctccatttaaacatcatttgtagagttccctggcatcctgctttaataaaccaatctcagtgtaccagacggttccttgaattcattactgtgtgt

SEQ ID NO: 425871 - DNA, 333 bp, Homo Sapiens
cacccaatctgtgcctcttccataggcagcatgtagtcaccaggtatactaggggcctaacattctgagttgacctgccacattggtccaccaagggcacaaccccagctcccctcagctctaagccccctcactttgggggacatcaggagtacctcctaggctccctgctccctcgttcaatccagtcccccaccaaatctgttaagactgatggtccccagatgtgcagaggttaccatggaaaccaagcagccatgttatcccagcaactgggaggcggagctaaccaaagccaggcagtttagaggaggtaggttagaccctctgcaa

SEQ ID NO: 425872 - DNA, 286 bp, Homo Sapiens
cttcttatctatttgtttctgagcattctttgtcagcttaacaatggagtagtgcatcagagtactgatcaatattaccttccccatgtggatgctctgaggaatacgctttagaattttagtgatatagaagcttatttagaagaacatacacagtcttagggagcatactcttggtttattaattaaaaaaactcatatgttaagcagctgtgcaaatgcacttttaaataaccattttaccataggataggactagaataccttaaacattgttttctgcctt

SEQ ID NO: 425873 - DNA, 278 bp, Homo Sapiens
tcacattcaccctaaacatgtgtcatttctttgttttcacgaatattctaaaacctctcttctagctacttggaaatatacattattgttaattctacttatcttactaggcaatagaaaaccagaacatattcctcttatctaactgcagctttgtacctgttgaccaatctgtcactattcctccctcctacctcgggctccccgtcctctggtaaccactgttctactctctaattctatcagaacaacatttagattccatatatttgtaaacg

SEQ ID NO: 425874 - DNA, 469 bp, Homo Sapiens
  misc_feature (265)..(369): n is a, c, g, or t
ctcatgcagtgggcacggtatgagcttacaagcatcaggtaataatagcataggcatggggcatagatgcgaaagggaaggcagttttaatgcccattccaaggcagtaattgacgacaaaagaaagcacatctgcagtttgtctcaaagctatgtctagaaactggggagaaagaagaaaagaaacaaagtttttaaaacgtggtttgaagctaagctgcttggttaccttccaaccttctgcaagattttgctgttttttgtnnnnnnnnnnnnnnnnnnnnnnnnnnnnnnnnnnnnnnnnnnnnnnnnnnnnnnnnnnnnnnnnnnnnnnnnnnnnnnnnnnnnnnnnnnnnnnnnnnnnnnnnngggaaaaaaaccaagcctgcgcgctctgagccccaccccccattccccatggtgtctgagtaggctcccagggcgagcaggatccctcctcacaggcgag

SEQ ID NO: 425875 - DNA, 370 bp, Homo Sapiens
atgcagtgggcacacagttggcactacataaatgctagaatataagaggatgctgttgatgatgtacactccaatgctatgatcctatagcttactcagtcctttcctatattgtgttaattttattattgtgatataatacttataccctaaaattcacccttttaaagtatacaattcagtggtttttagtatactcacaaagttctgcaaccatcactactccataattccagaacattttcatcagccccaaaagaaactctatccctattagcagtcactccccattctcccctccccatagctcctggcacccaccaatctgctttccaactctatggatttgcctgttctggacatttcatat

SEQ ID NO: 425876 - DNA, 379 bp, Homo Sapiens
cagtgggcctgactctgctggtggagatatcaaagtgcaggtgtgtgggcacagtctggtacttgtcgatcattacttagggcacgagaaggctcgggtgattatctgctttccaaactctacccttccctgctgagttcacacactcctcgtagataagagacttattgtttctggattatgagtagttacaattgtatgaaatccctgtaattaaagttgttcctctggagctggcgccatatgtaacatattgccctattctgtagggtctaggtacacatttcagtatctctgaagtcaggacgtgacttcacatttggtggtgtctccgacttggtgaggtagggttgttgtcttggagtagatagaggttttg

SEQ ID NO: 425877 - DNA, 426 bp, Homo Sapiens
  misc_feature (78)..(365): n is a, c, g, or t
gtgggcacaaactaaagctggccacagtcctcaccacacccactgcaccctgggcactaaagaagattacagtttctnnnnnnnnnnnnnnnnnnnnnnnnnnnnnnnnnnnnnnnnnnnnnnnnnnnnnnnnnnnnnnnnnnnnnnnnnnnnnnnnnnnnnnnnnnnnnnnnnnnnnnnnnnnnnnnnnnnnnnnnnnnnnnnnnnnnnnnnnnnnnnnnnnnnnnnnnnnnnnnnnnnnnnnnnnnnnnnnnnnnnnnnnnnnnnnnnnnnnnnnnnnnnnnnnnnnnnnnnnnnnnnnnnnnnnnnnnnnnnnnnnnnnnnnnnnnnnnnnnnnnnnnnnnnnnnnnnnnnnnnnnnnnnnntcaatcaattatacagtttctgtctatcatcacatgtgttcccacttgctttgcgggggat

SEQ ID NO: 425878 - DNA, 258 bp, Homo Sapiens
agaagcatcaggtaccctttggaagctggtagtgctggtcagtttaatctcactctgtgatgtccgatcctcgggccctgggctcacaagccatcgcttcccatcgtggctccattctgtagctgcaaatcacaagactgtagacttgccattacccagaagcaggtcacctctgaaattcagaactcttcctgtcctcccactacacagcactccttgaagcagccctgcccacccctgccccaacctgggaaatct

SEQ ID NO: 425879 - DNA, 435 bp, Homo Sapiens
tcaagtcagtggcacgttcgttcactgtgcaaaagcagagggcttgctgggttttcatctgtgggctagctcttgttccccctacataagtccccggcaactcacttgtaatgggactggagacttcgcaaaaagaatggcctccccaggaggaggatctgacgatctgacactgcagagacctcggcttcctttaggccagagatatatatgattccagcttgcttatgacatttttttaaatcctgctttgactttttgttggtgtgtctttgggattgacctaagaagggagacagagggaacagctctatggattttgtcttctaagatgagcttcctagtagtatgtgctttcaccatcagtttttaggggaagttttcaatcatcagtttgtagttctctatctggctgtgttgctaaccacctggatg

SEQ ID NO: 425880 - DNA, 134 bp, Homo Sapiens
cctccagcagtgggcctgtatagcaacagtatcgtgcatgccttcagataagacaaagaaaaggttgcattccactaaaacagtaacacagtgctatgcaaaaagaacattcagaggagaaaagaaccggtcct

SEQ ID NO: 425881 - DNA, 183 bp, Homo Sapiens
ttgcggcagtctcagcaaggatggacatgaggcatttgtgtgatccacaggtgctgagtagccagcaacttccttcttgaaagtggaacagcgttgaaggtctgtttaaagaaataatcctaatttagttccagaagcatatcccgtaggagcagttgctactaggcccgtgacttgggcctg

SEQ ID NO: 425882 - DNA, 350 bp, Homo Sapiens
attagtggcactctaacgctaagcaagtgggcacttacaggtcccccagcttgcccccacttcactatccctgttaggaggccagaacgatgggggccttccaagtttctaacttgctgacaagcaccgctactaaccaaaatgaaagtctgggtggctctgcctcagaagccgccgcttagaaacccaggggcacacactccactcaagttcagcaggcctaccttccacggtcctgcccaggccgcccgctgtgggttaaagacttgatttacgcacgctctgggggctcagcatggaccaattccagacgtagaacagggccttaaccaggtgcttaagatgcaggg

SEQ ID NO: 425883 - DNA, 385 bp, Homo Sapiens
acgctggataggggatgtaagcagactatgtggcaaatttagataccgttccactaaacagatgtctctgcgacccttccctcctccgatcagccaggaaagtcctctgtacctaacctttcaatggccaaatacttgcaccagccccagatctcccagccactgtccatcattcacaacatctcttatcctcaatcactgggcagacatgtcagggaaagaatctactaagattgtgctacgcatgttcaggaggatgttttctctggagacacacccccagtagagagtcagacaccctttggaggaagaacacagatgaaaatccactgaaacgtggggcagggagatcctattgcatctcatgcctggaaagggaccacag

SEQ ID NO: 425884 - DNA, 280 bp, Homo Sapiens
tacagtcagcgttagcgagtggacacgagacacaggtttggagtgacacaggtgtgtggagtggacacagaacaggcgctaacatggtacgcggacacgggtgttgtagtggacaggaccaaggaaggggcacaaccccgcggaaaagggtgatgctcggggtgaggagcctggtcctgtgggaacgtggcctctgaacgggtgcctgcttgccaggaagacaaggaggtagtgtggaaggcctcctcacccagcccctggagggacctccagaacatca

SEQ ID NO: 425885 - DNA, 152 bp, Homo Sapiens
cgcaagtagtgggcctaggttatgggaacaagtcacaatgcaatcctgctagttacagactactttatcaaaagcagctaaaaaaagatctcattaactcccccaactcatctccacccacatctaaagagccacacagcagcaccaccaaa

SEQ ID NO: 425886 - DNA, 370 bp, Homo Sapiens
tggctctgagcgaactgctaggtggcacccataaagcttgtgatgacaccaggaactacagatccccaaagatgttgtcacagcccttgtttcatggcagctctctaggtctggactccccaaagggttcatagtcgtcttccgtccttttttgccagcagcatggtgagtggggggtaggaaggggtgtttcagcactgtttgtgttacagctcttcgagtcccaccatttggcgggtcccgagttcttgtcccacatccagagagaatgaggtacacagatagttggagggttagcaaggcgaagaggggctttattgagcagtagcacagctctcaggagacccaaagtgggtggctcctttccaca

SEQ ID NO: 425887 - DNA, 118 bp, Homo Sapiens
ggggagtcttgagatctatacaggatcctgacaggagatgaaggacagatgggtcaccaggaaaggtagctggaagatccaatgtcagagctcctccctgtgcccacttgctttagcg

SEQ ID NO: 425888 - DNA, 181 bp, Homo Sapiens
  misc_feature (82)..(130): n is a, c, g, or t
gcagatagacactgtggaggcaggaagactataccttcctggactggggctgggtaagccctagtgtgcattcctggtgagnnnnnnnnnnnnnnnnnnnnnnnnnnnnnnnnnnnnnnnnnnnnnnnnnggaaatggattctccttctttcgcccaggttgaattgcaagggcgcaatct

SEQ ID NO: 425889 - DNA, 309 bp, Homo Sapiens
agctcggaccgcaagcagtgggcactaacaagacttgaattttttgaaagagcactctggtccatactgtggagcgatgggtgtgaggacagtaaggcgagcctgctaaatctaagcctaggctgaagggggcctgtggtggcaatgggtactaagaaaaatctgtattgatggcatgcatttcttgaacttcagatctttatgggctgacccttggtgcttctttaatatcctatcaaacttccatctggccttcttgaccataagaggaaaaagaccaaatcctctggggcccttctggatgggatg

SEQ ID NO: 425890 - DNA, 475 bp, Homo Sapiens
taagcagtggccttgtttttctgtgctgtagcgtggcacccctgtgtgtgtacaccacagagaaggggtcccaatctccacttttatgcccggaagcttcccagcctcaggagttggaaaggagctggaagtgtaactgagtaggaactgagcaccaactcatatatcccccgcaatcccctcctcactatccaggctgggcccaaatgccttcctgtgctgcacagggactctccatacctactactcttagaaaataaggtaagagtaaagggacgactggacagaactgggaatgtggccacagaaaagtccccttgcacttttagactgtaaggtaaaaagcaggggtcagagagtaaccgtcactgagggaaaggaccttaacagagctggatcgatgacatgagtactcaagcagggtcaggaagtataaacgtataggtgtttagaagtaaggaacttcagcgaaaag

SEQ ID NO: 425891 - DNA, 193 bp, Homo Sapiens
cctgcaagcagtaggcactggggattaaaagttagcattccaggaggtattagcatatgggtctggcagccccagttctgctatcaagagatgatgtattttatctatattagcagaaatgagtacattttccccaatagaaagtgcaagacactaaagaaaatttatgatgtaactctatacttgctttgcg

SEQ ID NO: 425892 - DNA, 352 bp, Homo Sapiens
ctttatagctatcagaggttacaattagatttctgatgccaatggcaaggaacaggatacatagcgggtccttctagtgcatctgagaaggttcatcttaaggacttttctggtgatgaccagaagctgggggccagagcagaaaagcacaaggggttccccaggaaagaggatcactcagatagctgtggtaaggagccagggtgtgagagagggtgacccttgggctcaggctgggtgtgttacctgggtccagggagaggcaggtgcccaggaaaagatgggtggtccaggcacaggcctgctgcctataggagcaggtgagggatgcgtgaattctcctggtcccacg

SEQ ID NO: 425893 - DNA, 180 bp, Homo Sapiens
gggctcgagaagccctctggagggaaactaggagaggtcagctggcacttctttagacgggtttcaggagactgtcattcctgcagtggggacccagtcccttcgcccttgaccatcaggcgagactgccagatgagtgttgagcagggctgatggctcttccagcaggagggctttgcg

SEQ ID NO: 425894 - DNA, 228 bp, Homo Sapiens
cacagcagataggcactatgattggcatttagattgattccatgtctttgctattgtgaatagtactgcaatatatatgcatgtgcatgtgtgtgtctttttaagagactaatttatatttctttgggtatataccaagttatgaggttgctgggtcaaatggtaattctgcttttagttctgtagttctgtgaggaattgttacactgcttttttttgactgagtct

SEQ ID NO: 425895 - DNA, 422 bp, Homo Sapiens
ccccgtcatgcagtggccatccagaggaggagggattgagaggaactgactttactgagtgcacagcatttccttcccacattgagcaggtgcaggagctgaatcactgacccaataagcagaaataaccctcgaatgacaggacaccagtgggaggctccacacttctgcacttctgcccagtaggcaaaagcaatggtgcttcctagcagaacatccttacttctgtggctgggcccagcactgccagatggaggaggcagtgacacccttcggacacgcttggcagctcgaggggtgcctggaggccaccatccacgtgcactgatgccacttggctgcgtggggcgccctgacagccgctctcagggcaacctggcaccagctggttgtggctctgattccaccacaccctgacacca

SEQ ID NO: 425896 - DNA, 421 bp, Homo Sapiens
gcagtgggcactataaggggaggctagcgtctgaagtccactttcccaatatcacagtgatcctcagttactgtacattccatgtatgtatgggaatcatagtgtctaccaagtaaggctgccaaaaccttgtcaggaggtggtgagtatactcaaagaacccagtacagagcctgacatagaggcatattagctatgatcagtattgctgttaatatgctcaaaaccttaacgactctaagagaagtagccctgagcaaaattaggacatgcccagtttgttttcagtgcagctataacttgtctttttctttcctcccattctttgcccctgaaccaatactgtcatggatcagtgctcacacagccttaaaatggatctgttctctgtcccagtgtctctgagtgttactttctaaat

SEQ ID NO: 425897 - DNA, 258 bp, Homo Sapiens
atagcagatagcactccacgtaccgtctggtatctgtcggtgaagaagacagtgcagactagctttctttctccccacgtctggtcttactcttaggctctcctgtaggtaaataaacagcatttcaagaatagagcgtaactcattcaggcaatccagttacaaaattgggccagaaattccagcaacagatgcagactagacaagatagtccttgttccgtttgcacgggaatatacttacaggaaaatcacttga

SEQ ID NO: 425898 - DNA, 177 bp, Homo Sapiens
cgcaggtgggcacccacacttttctgccgtcttttcaatctgtacccttgaccctcctcctttttctgctttgtcagactccttaaggcactgcagaaattaaccatttccagggactttcccgcgtcacacatgagttattccatgtggacagtggcagcctctatgggatgccta

SEQ ID NO: 425899 - DNA, 457 bp, Homo Sapiens
gacccgcatagcagtgggcacagaatctcaagggagcatagcagctgctgcacggccttaagctcagaaacctcagaaccagactctgccaccactcatgcacccacctagcgtttcattcttttgctcctcaaatatttactaaggtccagtggttggcaagggccaggcctgcatggcgtgcaggagaggccaggccctgccatcatggaagctgcgtgctggtcgggccagacacgctgagggagggaagggtgtgtggtgcagggcgccaggcagacctgctttaatccaggtggagtggggagggcctctgctgacactcatccaagctggggcccgactgagggtctgtgaatactccaggcagaggcccagaagtgggaccagtctagcttttttggggaactgaaagggcattgtgactagggtgttatgaggggcagacacggtcaca

SEQ ID NO: 425900 - DNA, 393 bp, Homo Sapiens
taccgctagcagtgggcactctcagaggctcagtcatacctggagcaggcgctgaagccatgcaccccactgtgggcccaaggcagcccaggtcctgtctcctgtctgctatggggctcctcttccactcagttgcactgagtaataagagaagccccgtctgtccgccctcctgtcacggagctctgctgcacagtgcctgagccagtgtgtttctgcttctaatgaaggatttatttaggtcactgctgccttctgtgcacagcaatgcagattaaacatgttgagaagtaacttctcctctcccttcactggggcctgcctcaccactgcacacacctggctgctcatcattcgttcaggagccctttatgaaggacccacagccactgc

SEQ ID NO: 425901 - DNA, 173 bp, Homo Sapiens
  misc_feature (100)..(100): n is a, c, g, or t
ggcaagcagtgggcacggcttatttcatcctccacataaccatgtgggaatgctttattcaatgttttacatgaataggggcaaacgaagatcacagggngttgatggcctctttaatgttatacaaccagtcccgcgggggcagggcttaagcccagatgaattccttgtac

SEQ ID NO: 425902 - DNA, 158 bp, Homo Sapiens
tgagtggctggggccacgggcatgcaccaccatgcccaggtaattttttgtagagacaaggtttcacagtgtttcccagtctggtatcgaactcctgagctcaagccatctacctaccccagcctctcaaagtgctaggattacaggcgtgagccctt

SEQ ID NO: 425903 - DNA, 425 bp, Homo Sapiens
aacatatttattactgtcatgacgcttccctgaacttgtgtgtttaatgttaacagacatagaaacaatacatcccagagcacacaaattgacttccacacactgagacagtggctaaatctggaactctagggatcccaaattcacccccaacacacatcctcctgagtgtggatattctgggacctgaataaactgggcttcagatccttccctctccagggtatcaagttctgcctttttgccaaggattacgagatcagcctagagcccacagctagagagcagcttgccaggcagctccccactggcctgtctggacagagagggagagctctttccacttcccatcgctccaaacagtgcagtagcaggagggaaaatcccatctctccagtccctccttgagcagaccatggggtagc

SEQ ID NO: 425904 - DNA, 398 bp, Homo Sapiens
  misc_feature (112)..(258): n is a, c, g, or t
gcccgcaataagtgggcacatagtaggatcccagtgtatattactttcttatcttgatgtcacacctgaagcaggtcagcaagcaaaggaaacgggctgggagtccaagatnnnnnnnnnnnnnnnnnnnnnnnnnnnnnnnnnnnnnnnnnnnnnnnnnnnnnnnnnnnnnnnnnnnnnnnnnnnnnnnnnnnnnnnnnnnnnnnnnnnnnnnnnnnnnnnnnnnnnnnnnnnnnnnnnnnnnnnnnnnnnnnnnnncatcaaatgaaagggctttgtaaatggcagaactccatagaatggtagttcctcctccttatcattgcggttagtgataattgtgtatctttttcatttgacttgggtaaatattagccaattcccagtcatgactcaaa

SEQ ID NO: 425905 - DNA, 357 bp, Homo Sapiens
gccaaatgatagaaacagagggatccaatcacactctccaagaccactggcctggtagggggcacaggacacgacacgtcatagctgtttttgtgttttataaaatgacctggagctgctgactaagggcatcttgaaggatgtaattaccttcctcccttggggccccagaacaaggaagccctacagctgaaaaacagtaattaccaggcagatcgagaagacagcctgggactcgtccctgaggtataaaaggaggactggcggatgtggagccataagacctggggtaaaggagggttctactctcctagctgggagacactgggcagctcatgagcttcctaggacactcag

SEQ ID NO: 425906 - DNA, 121 bp, Homo Sapiens
ctctaaccgtatatctacagatgtgagtgtttgtgactctgcacttgaggctgtaagggcgtcagggtgtgggtctgtgcgtgagtggggctctgacagtcgctgaggaagatgcctgagg

SEQ ID NO: 425907 - DNA, 414 bp, Homo Sapiens
gcatagaagtgggcacagcacataatcagcaccatgtgtttgccattttatggaaactgaagctcaagaaagtcatatgacttggcctatgtcacatgagtagcacatggaagagccaggacttgaacgcaagtctgtccaactccaaagcagccctctcctcacatactcagggcattgagctccttgatggatgagtagaatttttagattgaaggaaggtggacatttcaggttgtccacagagatgggaatgggctgtttagcaactagtagtagttccagggtgagtgccacatccccacagctctaacatccagtctgatggacattcaagtcactggacacaggattccgagcgcctactctgtgccaggtcaggtactaggtattgagaaaggagaaagaaagcac

SEQ ID NO: 425908 - DNA, 415 bp, Homo Sapiens
agcctggaccgcattagtgggcactgcatacctcctatcgcttaggcgtcatagcccttggctcactagcttctctgactaccttgggaaacaggcatagtcacgctgcttgatagataagaatgctgaggctccgaaaaaggaggagacgtgttcgaggtcacgctgcaagtgagcagcagagccaagatctgaaaccaggcaagctgtccttctaagcacaccttctatttctatggaaaggctgcatgggagccaggacccagggtagcagccctcttcagagagaaagttctatgctaacttttagggcctgctattaggtagattctggcctgctcggttaaatttactcttgttgggggtaagtgggaagatgactacaaggaaggaacgcagcaagaatcccagcctc

SEQ ID NO: 425909 - DNA, 402 bp, Homo Sapiens
agcaagtgggcacgtgccgtcccttccccattttagaaatgggcaaacaggtgtgagaggtgtcctgcaagggtttccacctgatggctatgttctgtggtagctcctgcattgggagctactgcagagtgactccaggttccggaagatggaccggcaagcagtctgtcccttctttgatcacacgtatattccctaaagacatgtatgttccattctctccgggcttctaactggttctccctgcccatggtgtgtctccggcttctgtgccttgctctctgtactgatggctcccacagggacctgtaccaacctctctgcagaaacccaggctctcctgctgtacctttctgttcacagttcagtgtatctccagaatggagttattttccttccctt

SEQ ID NO: 425910 - DNA, 179 bp, Homo Sapiens
tggcctgtgtacgtgtgtagagacagggacaggccagagtacagagagagcgagattcctccgtcactgactccctgggtgaccttgcatggccacctagacccctgccctggggatgggtgggagtccactgactccttgggaagtgcgttatcatcgacacagccttatttttaacc

SEQ ID NO: 425911 - DNA, 214 bp, Homo Sapiens
tgggcactcagccactgtctatccagtcccatttatcgagtagttatcccctcactctcctgtgtcatcagtgctctctttatgcttgcggtgtctatcagcacacatttgtgatatattgtctcatctttataaatgaaaacctcatttggcccctcatccctttccagctcctgtctcattgctcttctcccatttatagcaaaagtcttct

SEQ ID NO: 425912 - DNA, 395 bp, Homo Sapiens
agtgggcactggagtcatcggctttgtacagtgaggggtataaataggagactgaaaggtagaagagggtggtcaggggattcacagtcctggcttcttccctacttctggcagtggctgagctcttctgcaggtgtagttcctgtaggctggtccctctgccaagtctccagttcttcactgcactttgcaaccaccactgcctctcctccttttcaggatttgggatggtgaagcattcctgctgttgctattccttggatacttcagcatccctgcatggttcttttcaccccacctgcacctttaatacagttctttcatttgaccttccatagcgaaatccttttgaaagtgttatgctgccttttgcctgaacactgataggcacatcc

SEQ ID NO: 425913 - DNA, 299 bp, Homo Sapiens
tagagactgagaaggaacagaaacggtaggagaactgggagggcagtttgaactaataattaaggagaagagagagtttcaaaatggaggaagagatcaatactgccaaatgcttcagagacatcatgaaaagagaaagactatctatctgtcggatttgtcagtgcttttaggtggtctggataagagcattctgaggaggagagaagcgagagtggagccagactatatagagggacatgaggaagcagagaaggtaactgtagcaagtcttgcatattcctggtaggggtatgggg

SEQ ID NO: 425914 - DNA, 385 bp, Homo Sapiens
gaccgcatgcagtgggcactggaatttttaaatgctcccacagtgattcatgtgcagccaaggtggcgaactctaatacagttaatcctgtcattcttagttgctgtgtcctcctctctgtagtcatcatgtcctctatcctatttggtcctacacttacatgcttatatgctacattagaccgtctcccttctgataactgaaacccccccacagtctcaatttcaagcatcctgttctctaaacatatctcctgtctttctgtaccgctccgtctagtactccagcaacaatcccccaaccttactggggccaacaatctgttaatcctaccacctgacattgtccttcactgccattgtgacttcacgtctctctcactagg

SEQ ID NO: 425915 - DNA, 177 bp, Homo Sapiens
tgcaaactctgagtctttcagtactatctctctgcaatccctagtcaagctgcatgatctcacagttagacttttgcaatggcctcgtaactgattctgttttcctgcactttgcctctctaggcctgtccttcacacagcagccagagtggtatttctaaagcaaaaatcaggtct

SEQ ID NO: 425916 - DNA, 154 bp, Homo Sapiens
tggtagactcccacctaggccagctccccatttccaaacaggagctagcctagggtgccaggagagcccgagaactgggggagtagcaggccgaaggagaatacgagcgaggaagcagatcataggagaaggaggccaggctaagccggaatac

SEQ ID NO: 425917 - DNA, 171 bp, Homo Sapiens
agtacgatcgagcgaggaggaataaaaccacaaaaaataagttagcttaacattatactacaaatagaacagaaatatagtacctaactacaggtgagataacagtaatcacaatacattgatagataagcctgtatagcagataatacacatactagttctagtaccaac

SEQ ID NO: 425918 - DNA, 438 bp, Homo Sapiens
gtacgatcgagcgaggagggggacccaggtacagaaggaggctggcatggtagggtaatcgccatgcctaggatcccacagtccctcagagggaaaactttggcctgatcattttgcttgagtctcagttggaaagggcctcatactccagtctgcacctgtaagtgaatcttgctgatagcatccttaccaagtgacttcatcgcctctgtttgaatatgtccagtgatggagaggttagtacctctcatagcaggcctcctgtgtttggacatctccttattgaggagaaatcttttctcctgttaatgccactccttgtacttgggtctgcccctgcattcacactgagcgagttattcccttctccccaggggcactgtgccacctcaatacccacccacttgtctactcttactccacccacatagtttctcc

SEQ ID NO: 425919 - DNA, 582 bp, Homo Sapiens
agaactaaggaggacgtgtgggaagaagaggaatggatggatggatgagatgagcggtatgtgtgtgtggggtggagtcgggagtcagtgcaggaggagggacatcaagttggggaaggcaggctagagatgcaggcagttctgggagggatgcagtggacagagggtagtggtggaggtagctccgactgatgtctctccactaccttccaagcatgacctctgggacagaggaccatgccaataaactcctctccatccgcagtctctagatactccctttactctctctactcactttccccggaacctggagatgctgccactcagttgctgtcctctccactgcaggctgttaattctcccaactccatgctcctcaggccaggcagtggactcagtgtcttccagctcattgcttctcaacctctggactctttgaggtcaagtccatgctacagcccaccttgtaagttacctagcattctctacactcaccaggatttcacattgcctctctccccgaagccatcatgtctgactctcagtcctatattatttccgtctgattctctgagatct

SEQ ID NO: 425920 - DNA, 369 bp, Homo Sapiens
ctcgttatccctatgcgcgtgacctttatcaagtcgagcgtaatccttgatcatcttctacgtgtgtctcatgaatcgatcacttcagatacctcccacatggagagctcacccattgctgcctatccttcccattgtacaagtgtgcttgttggaagttgcctgtgttgggaaacgaacaggattggacggtgctctctggggtgttctcctatctggcagcctgttgaagtcctcgtgttgctcattgtgcttgagcgatactcgccgccgcttcagctccatcttgaggccacgcaggattctccgctatcgagatctcctcaggctcagggtgcgagctcgcttccgtgactcctcctccaacga

SEQ ID NO: 425921 - DNA, 104 bp, Homo Sapiens
ttgcctctcttctgtcctgggcgagcaaaatctggatggagaggggaccgtagatagcgctggacaaattaccttagctggattccaaggtcctccaggaaaga

SEQ ID NO: 425922 - DNA, 216 bp, Homo Sapiens
tactaggttttcacgcgaggaaccaggacccttggtaatgccttgccttggggatattatgcctggcaggcaccgtgaagcagtttgaagttgaggctcctctcagttgctttgtaaccagtttaaacctacagaagagagaatgctagtgtgtcctgagagatggagggtggtatgtttgtattgagggaagagagagaaagtgagtagtatctg

SEQ ID NO: 425923 - DNA, 124 bp, Homo Sapiens
gagtagctctgtcctggatgtcttttctctgtgctttaataagctatgagtaaactaacagaagagcactcctgcgtattagagaatccgaagacgacaggtgggatagagcccaaagcctatg

SEQ ID NO: 425924 - DNA, 118 bp, Homo Sapiens
gacgaattctgtctggcacagactgctgtcattctctgaatgcagtgctgaagtgctgggctttaggttctgattccctgcccttggaagacccccttcaaggggaagagtccctcag

SEQ ID NO: 425925 - DNA, 327 bp, Homo Sapiens
  misc_feature (181)..(259): n is a, c, g, or t
tctctaccgcaactgcgctcctgtaacctcgtgcacactccccttctagctccatctggcaatgtgtacttttcctcaagtcctgtgtcaaacgatgtgaagactgaggtcttcttctggtcggggcagcattatagcatcatgacaaaaagcccaggtgctgcctgcactggaagtcaannnnnnnnnnnnnnnnnnnnnnnnnnnnnnnnnnnnnnnnnnnnnnnnnnnnnnnnnnnnnnnnnnnnnnnnnnnnnnntactggtgtcacagagttacgtgaggtttaaataagttaccttaaaggacttagtacagtacctggta

SEQ ID NO: 425926 - DNA, 419 bp, Homo Sapiens
ggagttatctgtctggggctcttgccaaataagtgccaaaattagaacgcaaccctatactcattgccattagcaatccagccactctaggccaagaaccaaaagtagtgtctcaggtatatcgtgaggggcagacatcacagggaaagaccccatagggtgatttgttctcaaactaataaaaaactcaacctctcatttgcctggaactactccaactccagaccctaataaacactttagtctgccaaataataaccctaaaaggtaaaaataattgaggtaaaggatttaaggcaaaccttagaaattgagacagggtgcagggatgtaaacgcctgggtcaaatggatcaaattttcggtacaagccttcaacaagagtgactgctatgcgtgtgctacgggaggacctcaggc

SEQ ID NO: 425927 - DNA, 159 bp, Homo Sapiens
ggcccgagtaactctgtctggatagaggtaagccactgtatgcctctggaaaaaataataatgccactgtaacagttaaggtcttggtcaaaatttatttgtgaacatataagcagtatgatagaccacagacattaactgatttctaaatacattttt

SEQ ID NO: 425928 - DNA, 303 bp, Homo Sapiens
cattggatcttgcccacaaggtactattgcaactcgcatgggctaactgcttttcctgtcacccgttactatgcctcagatggcctaatcacacccaatatgtggccctcccacccaaacactgaggcaactatagctaaaaacaaagttcgctgaattttcagttgatgttgaacggtcaaaagctttgggccactatctattaattcctgacttgagaaacacaagtttaaaaaaaggagccataacaccacagaaccaggagacactctgaaaaggtacccactgtccctgaacagaatc

SEQ ID NO: 425929 - DNA, 136 bp, Homo Sapiens
aagggagggggtaagaacagagatagtaggcctagagtctgagagagtagaatatagaaaaatacattaaacaggaaaaagagaatgttgtagaaggtgatagcaggttctgttttaagcatttgagttaagattg

SEQ ID NO: 425930 - DNA, 301 bp, Homo Sapiens
agacagtgttctgtctggcagacatgctggttgctcccgataaccagggccagcagcttcttgcaaagtcagaggcacacttgttggcttgtcgatacccttctcatctgctattttgcaaagcacttaaactgccatcatggtctcagtcttacaatgccatcagggaggaagagagaagatggtgtttcctcctctgggaatgtccttctcctcttacctgcctgaggcactcccacttctcttttggaacccaggactagtggttttctttcttggaagacttctcagtcagaattcc

SEQ ID NO: 425931 - DNA, 279 bp, Homo Sapiens
agatgcagtatctcagaccgaaccaggactgaagtcggaagatctgcggtagggtccctccaggactgaaaacggaagggtctggggtggggtaccccaggactgaatcggaaggtctggggtgtgggtccccccaggactgaatcggaaggtctggacgagggtccccccaggactgaatcagaagatctggggtagggtctccccaggactgaatcgcaaggtactggggtaggggtccccccaggactgaattggcaggtctggactagggtcccc

SEQ ID NO: 425932 - DNA, 419 bp, Homo Sapiens
  misc_feature (208)..(230): n is a, c, g, or t
tactcgcccactttgtctgggactcatacgctgcacttggtggcttctctgctatctcctcatttcttaaggcaaacctctaaaattatcaaaccatcttttgctggaattaaattctatagctttagatccttcctcttttgctttacagttgtcatacagtgactttgctttttctctaattgtattagcatctacaggtatgccnnnnnnnnnnnnnnnnnnnnnnngaaacggattgtcacccttgttcgcacaggctgaattgcagtgccacgattcttgactcattgcaaccttctgcctccgggcctcaggcatttcttctcctcagcctcccaagcagatggaactacgggcgtgcaccaccaaaaccagctaattttggtattctaagtagaggcagatttcaccatatg

SEQ ID NO: 425933 - DNA, 143 bp, Homo Sapiens
taatctgtctggtatgttttaaaatattgatggcaaagtactccccacctacacacccaccttcattggcttgagtggttacatcacatttcaaaccaatgattaccaactctcaacagagagcagatcccatccccaggacg

SEQ ID NO: 425934 - DNA, 177 bp, Homo Sapiens
agacttgtggacagcccacaagaaagcatctctgtgatatgacccagacacttcttcctggcccctcatccatccctgcacacatgcctacatccacccactcatctgtgtgttaagtagtctttcaacaaacattcattgactattccaggacagagactaatcccaggacagagt

SEQ ID NO: 425935 - DNA, 251 bp, Homo Sapiens
tgtctggctaaaattattgagatccctaaagagactcaatgttatgggaatcaacaaaaccatagttcttgagttgctgccaggctcctaaggcattgaatgagcttggttctatgcctcccttgcccttcaagtacccttacagtcatgggactgggtgtgggttttgacaacagaatggaagagacagttacacagtcattcatgactaataagaaagctaaatgtatgtctccacctttagggttttc

SEQ ID NO: 425936 - DNA, 285 bp, Homo Sapiens
ctctgtctggccttatttcccttggcgtgaggcttcagttcttggcacatgggcttctccctagggctagacgtgtgacattaacagctaggcttttctgaaagtgaggagagaaagagggaggctgaaagagagtctcaggtgaaagccacacactcttagaacttgatcttggaggtgacaccttgtcacttttgcacttgatttggaggtgacaccttgtacacttttgctacatgctattaggttgttcaaatcaaatctggcaccatgtggatgaggatt

SEQ ID NO: 425937 - DNA, 211 bp, Homo Sapiens
agatgtgggagaggaaactcaagcgttaaaaatgggtacaggatcccaaaatccttcatcacacctgctagaggcagaggacttcagagtcagcagtgcctaactgttctcccacgtaacaaattcaaatgctctttccacttgccattttgatacaggtaaacagaaaatgtcctagtattctatccccagggagactttccatgaaggg

SEQ ID NO: 425938 - DNA, 320 bp, Homo Sapiens
tgtcctgggtactcccttcgctcaggccctcacggtccctgaccttagagctgctcacgcagtggctcctcaacccaccagcatccccaggtgcgcttgcatctttgcaacccacttgtcacactgtggccagggtggctttcaaagacatcaatgtggccatgctcataccctgccttctgggtcccctgctgaggacagcacagcacatgctgaaccctgggccctcttcatctctctacgtgaacgggaatgggctgagatctccacctactcctgccaggcgtgacctgagggaagctcccatcagccccacaacg

SEQ ID NO: 425939 - DNA, 334 bp, Homo Sapiens
tagctcggccctcattcacatcagagatgtgggttgatggaaacctatgagggagagcctttggtcggctggtgactgggacgcccttccaaagtgagggtcccttagtgggcgggtacaaccgaggagcctgcttcactatgttttcttggaaggcgaggctggaagctgtggcaaggagatgggggagaaagggcagtttcctagaccctggaaatttcccgacagcctcgggggagtccacccaccgaaatctcccctaaataagagcacctcctctcttcctcccaaccttgttggacttagtcggccgccatctggatagcagactgtg

SEQ ID NO: 425940 - DNA, 171 bp, Homo Sapiens
gaataatctgtctgggcttcagccctgctgggtgagagactgtgagcaaccaagccccagctctccctggacatgtcaggtgcctgtgagtagtcttcggcctctctagagcctcagttatgccttctcgaaatgcggagtgatggcaagcagtggctctcacccagggga

SEQ ID NO: 425941 - DNA, 187 bp, Homo Sapiens
ggcccgctaactcttcctggttttgcataataagtaagtgctgttattctgttatccctcagaatatactataggcctttatctcccctcccagagcctttatccaggaccctattgacgctgtctattgctgcatacagtgtcaatccaaggcccaggtccccatatgagcccagggggggtgtgg

SEQ ID NO: 425942 - DNA, 250 bp, Homo Sapiens
ggccgagtatctgtcctggctataatatttcacttattcccagtctctggccctagaataaaaatgtgagccacctttagctctcatgcctgcattgacaaatcccaggtttcacctggatatccttacctccccaccaagcttgttttagtttcagacttgccgatctgcacctcaaaccccaaattctcataaatgatagcttttctgcctgcttttcttttgatgcttttccttgaccccaggacag

SEQ ID NO: 425943 - DNA, 305 bp, Homo Sapiens
cgagtactctgtctggtcactggttcaacccacgtatgtttttggagcagccttgtgctgggcactggcctggctgatgaggatgaagctgaagaccagaggtcagccttgcctttgagagcttggcctaggaagagggatatggaaactcacatccaaaaccctgatgactgaggttcagggtgacgtgacacagggcctgcacttctcagaagaggctcagccacagggcaggatcgcgtctaaatacatactggcttgtgtcctgtgctcagaatccttcatcatctcctctttttgcccag

SEQ ID NO: 425944 - DNA, 126 bp, Homo Sapiens
cctaggctggagatcataggctgacttctccacttccctgtctcaagagcccccattccagactgctgctatcagatgtaagactgaggagctgggaaaacaggcagcctaggactccagcctagg

SEQ ID NO: 425945 - DNA, 126 bp, Homo Sapiens
ttaatgctcagccaactgtcatgtgcttcatcagcagagtctcacaatttttatgcacacagtgttagtgactgtaggctgagaggaaaatagaagtgtagtcgcattcagcctaggtggtaatat

SEQ ID NO: 425946 - DNA, 306 bp, Homo Sapiens
gtgtgagccaccgtgcccagcccatttgtctagcttagaataaattgtctatacgttaaatgtgaaattgctatatttacttgaattaacttcaaagagtgctttcaaaaatgttaatgggtatattgatacatcccacctcatcatgattggactggtttatttaaagagtataaggttctaaatgcctatccaggatagagtgagcaagttcaaacttaacttagtagaggttggccacataagaaactatgttttaatgctttaagatgttctcccagcccccaagtctgcaagaatcaaaca

SEQ ID NO: 425947 - DNA, 100 bp, Homo Sapiens
gccatcccacatttttttatcagtgtccccagcacaggccctgtgttgggcacaaaacaacctaaagagaagaggcagggctgcttccctgaggggctcc

SEQ ID NO: 425948 - DNA, 128 bp, Homo Sapiens
ccttcgatttctcacaagctcgggcataccacgaggcttggagactcaaaacctgaagagcctgcaatcagatttctcccttactattcctgctcattgtcttctgtggactaatactgaacatgaaa

SEQ ID NO: 425949 - DNA, 426 bp, Homo Sapiens
  misc_feature (48)..(72): n is a, c, g, or t
  misc_feature (140)..(140): n is a, c, g, or t
gtaatctcaattccttatgcttctctatgagttcttgataaccaaatnnnnnnnnnnnnnnnnnnnnnnnnnagaagggtaaggagtctggcaacaaggcttccccgttgctgcactgctgttctttccactaatttggnaagttgcagtgtctgttggtagagtggttggactttctggctgctcaaaattgaagtcaagtaagccttccgaaggagatttatcactggtaaatctttcagaaggacctctatatgtggcagccgtacaaagtttgtcattccaagtttctcattttcttgacactaccaattatatctttcttgatggtattggcttgacttatttgatttcttgttccatagcatagtcacatcttccattggacaagtagaatttctgtttctggctggttgaaatttatgt

SEQ ID NO: 425950 - DNA, 480 bp, Homo Sapiens
gccggtaccactgcgaaggggttcttcacaggtagtaaaagaggaggtatatgtacatggcatcccaaattattcatttggtcacaccattcccctgcatgcgtcagggatttcattgggctcctttttccaaccttagcccagcatgctagcaggtatttatcaatatattaaatgctacttaaacttcctaaaatgatcccagaacagtaaaggggaaaaaaagcttctgatttaaagctaaacatacacagctatccattagcaggacaatgtcggcattttacttagacatggccattaataatgaaatgatgtatgatttccactccagcagctcttccttcctggcacaatcaattatacatttaagaaaatacttaggggatagaaagctcctctaattaagcatcactggagggagctggtgagattcttaaaactagaaaagatatctcagagaagtaggagggtggaggg

SEQ ID NO: 425951 - DNA, 417 bp, Homo Sapiens
  misc_feature (61)..(61): n is a, c, g, or t
gagacgagagaataggaacattctaaacaagcccagtcagccagtgagaaagtggaaccanggcaaagtgtcagagagtgaggcctctttaattaatgacactttaagaaatattaactatttcaggaaatcagtcctgaaaagagatttggcctcctgaccatgaggaataaatacagatttattatatttacaaagctgccttttcaagtggttgacttagaggatcagggaatctctgtctctttgtagaaattaacttcaaataataactaactccttttatgtatttaccaggaacattttggtctttgggttggttggttttttatggatgggtgcttaatggaaggcccagtgagacattggtagctaaattggttaggagccacttccaattaaagttcattggtaatg

SEQ ID NO: 425952 - DNA, 472 bp, Homo Sapiens
gcgtcattagaggatcccactgcgaagggcttcttcaaggttaaggaagtattagcccataaatgggaggatattgggggcagggacgctggcctgctggtcactccgatacctcctggcttggtacagcttctcttctctccatccacaaatttttcaaagctacaaaggtctagggtttttctttttcacaacactttgggccttgtacgaagggacagggttgtgtggggaggcaggcaagactgtcacttgaacatcagaaactgtctgaggttttatttaatacgatacctttaggattccatttacagcaccaaatccaatttatggtaaaaccaatttcagtgatctgtgtagtggtcatgaaagagagagaaaggtcctctcaacaactagaaatactgactactttcagctggaggagctttttcttcctctgctcagcctgtgatagaggcaccagtaaatc

SEQ ID NO: 425953 - DNA, 192 bp, Homo Sapiens
atcagctcgtgtacccagtgaattcgactcgggtactggatggatcctcatatgatgtcacagtgctccatgcttaactgagtatttggatggtcagcactggtgctcactgtgtcgacggaacttgtacatgggaggcatgcacctgcagtgggttgaatacactgtctgacacatggctccatgtcttaa

SEQ ID NO: 425954 - DNA, 174 bp, Homo Sapiens
agacgcgagcgagtaagagtaatattagggatcattacagaaacgtgcaacaatgagaaacaatctggtcttacctgcgcctctcctaccatggtaacagctaggagctcgcactatatcaggatttcagtggttttgtagtactagtcacatcccccacctccgtggcgattc

SEQ ID NO: 425955 - DNA, 270 bp, Homo Sapiens
tgtgtgcagagtgtgcagagggtaccgagcttgagtatgcaggctatgccatagctgaaaactgagcgaatgagctgcctaactctacaccaacactgtactccccaaaatattaagggaacgctttgaagttccacaatgatgcagcccagcactcccatccaaattcttctctgcctatattcagcagagacaccaagcatcccacatctggtgggggtggagaggcagaccccaggaaggagtcttatgccatcaagttagggacag

SEQ ID NO: 425956 - DNA, 172 bp, Homo Sapiens
tggtggccgtggctccccgcgtgatgtcttattaacattgtgtccatgcgtttatgattttagcatcaattatttcttacaatgggtactagggatatatcttttaagaaaaggtcagtgagattctttgttcttgagaatccacataactttaaagaatcagaaaactgat

SEQ ID NO: 425957 - DNA, 290 bp, Homo Sapiens
tggttgacgtggcttggtcgtgaggcaggcgctcttccctgggatgggagatagttccttctcagtgttcccaggagcagggttgtcatattttacagcagctgtttcacattcccctacctagttattagacacgaaagggagtaaattaaaatagcaaagtaaaaggaaataaaaggcgtcttttctttctgtaaggagacaacacctaattaagaaatatttgaatcccacaaaaatgcagactctcacgggtgacataaaacttctccttttaagccacggtcaaa

SEQ ID NO: 425958 - DNA, 208 bp, Homo Sapiens
atagataatccattccacaggacttctgctcagctcatagataatccattccacaggccttccgctcagctcataatctgttccacaggccttccgctcagctcatagataatccgttccacaggccttccgcttagctcatagataatctgttccacagggccttctgctcagctcataggtaatcccttccacaagccacggttaa

SEQ ID NO: 425959 - DNA, 129 bp, Homo Sapiens
  misc_feature (111)..(111): n is a, c, g, or t
tctgcgtgatttagaggatccccaccggcacgcttgctgtgtaattgagagctgtatctccttgctagattgctgtgccagtttcctgatggttcctgtttccacactganctgcataccttcccaccc

SEQ ID NO: 425960 - DNA, 406 bp, Homo Sapiens
gcttttaactgtgcacgaactaaccttggaaaggtcaagagacctggctgtggctcattttcctttcttttcttgggtacttgggctcctaatgaaaatgcttctcattcagaggttccgggaagcctccatccatgagcaactcacatgatttacagaagaattgctatgctgtgtatcttcacgtgggtaacacacttgctcctcacagcccatagggttttgttattaaactattgagacccatgtgatggtggagtatcaagattgacaggttaatttcccatttatatagaacattatatgaaaattgatttttttaaggcatgtgggtggaggatcctgggatgtgtggcgtggtgagagagaagattaagcatttagtggtttcagctacatttaaact

SEQ ID NO: 425961 - DNA, 353 bp, Homo Sapiens
ctagttcctagtcattgctctgaattgtagcacttccttcatacttcagtcttgagtggacatgaaacctgaaaattatgtgtttctatgaaaatcacttattgatctgcacaagaccgagaggatattactaagttgatttatgtttatgcaataatgtagatcaaattattttgaaatgttttgagtctagactgaataagtgagttttcctttgaataattggtattgtgtagataaggcctttattcctctcattcaatctagaccaatttgaacctcagttcgtcttgtgtctggtaacgtcaggagccatcaggatccagaataaagaatgaatcttatctctcctc

SEQ ID NO: 425962 - DNA, 250 bp, Homo Sapiens
  misc_feature (69)..(93): n is a, c, g, or t
cttttgagtcacagcatgtcataaaggctttcattgctctgttgcaaactcaccccaggggggatgggnnnnnnnnnnnnnnnnnnnnnnnnnaagttcttttgttcttggaacactttcttcctttttcagactggatcctaatgactccaaccactaaacaactcaatctgttcagagagagaggaactgtttatgtgagttgcttgtgtagtcagaggttgtgagttgtttcttcatccatgctgag

SEQ ID NO: 425963 - DNA, 413 bp, Homo Sapiens
aaagaaaatgaaagaccatgagaagaggccaagaaaggcaatgagaggcccgagcaaggacactgaggaggctgcgcacggggaggttggagcggaacggccttgggctcccacctgcacagtaggatctcacccccggattgaccccggccctggcccttctccacactcttgacacaggaggaggcacgcctccagtgaattctgcctcacggtggctgctgccctcctaagtgcaaggctgggcttgagaatttcaggggagaaactcagtagtgagtgcttctcctcagctgcagcagctggtactcagtggctcctaatttccctgctttctgtgctacttcccaaaggcacacacgaagcggactggacatctgtgccagaggtgactagcttcaggagtgccgatg

SEQ ID NO: 425964 - DNA, 395 bp, Homo Sapiens
gcgtctagggagtcatgccctacaaatcataaattctcatcagatgggcttatttcaccctatatatcacggcttactttccaatctgactctagaataacattatgcgacaaagaaaaaatcaaaatattttaccccaaaacatgtttctttgccttattttgaaatggccctgcaaagtggtcctttgtgggggaaaatttgcatctgtaaagaatctctattaacataactagatcattttcttccaagccctcccaatcttgaagagattaactgagagtctagcaccttttaaaggtgtgaaagggaaacatttgtcacctctaagggcagccactatgaggcttcaaaagaaccttggtctccacagtcttttatcttaatccgaacat

SEQ ID NO: 425965 - DNA, 273 bp, Homo Sapiens
cggcgacgtctagaggaccccgttttttgggtgacatcattcaggcccgtgccttaaatattaatatcatctacacacggatgagtttatatttccagttggactgtcttctaaactctagacatgtatacaacttcttactccatactagttggcatcttcaacataacaggtccaaattcaaacttccgcacactccttcccacctcaaaaccactcttcccacagccaacccacaagccacggtcaacccacaagccacggtcaacccac

SEQ ID NO: 425966 - DNA, 514 bp, Homo Sapiens
gtctgcgtgattctagaggatcccggttgacgtggctaaattgaaattagggaactctgtttagtgatctgggaagacctatggttgattgttcagtctgcctgtactagttgcatgtccctgaagaaaagtgactgctttttcctcatctccaaggttactgtctgctctgtggacaccagaaggtttcggagtagaacagttgaggtgggccagtgagaccaggacacaggtttaagatacttcaccctccatgagccttaacagaagtggacattttcttgagcaggaattatgcattaaatcttgggatgtacatagcacagtgtcttgctcccaggtgctcaatcaatattaatttaccaataagagaaacaatatggtacaaattaactgccaatttctctcaatcaaatactttgggtcctcactgaccccaagaaagccatcagaatgttctcataggaaactcactttgtaaattaaggcactaccagcaagccacggaacccac

SEQ ID NO: 425967 - DNA, 137 bp, Homo Sapiens
  misc_feature (77)..(77): n is a, c, g, or t
tagtgtgaactacctacccagcctttagtggtaattcttggaattccattataaaaattcctttataaaatattatngaccagaccttaaaatccaacttctaccaccaattttcgattaagtagtatcgggtaggg

SEQ ID NO: 425968 - DNA, 450 bp, Homo Sapiens
tgacgtggctggtactccagcacacagattgaattgctgaaccattccaggtcttatgatgaattactgttgcattcaagcacctcagcagtggcacagcaggatcctgctcccttcttagcacctctgccttcacattggtcacaaatcatattctttggcagagccagttttcttttttcaccatgggatagatctcctaaggctactgagagctgatgtaggagtttttacctctcctttctcttagtatccttccttctcccccaaaaaaacttagcagagatgtccatgggggaatgagaactgccaccagccccaccctctttaatggcctgtcctcctttgtcatagaattccctattctctgcatcagagagaacttctcaagatggagaaatccatttaacttctctccttcatttagattcttaccagggtattacttca

SEQ ID NO: 425969 - DNA, 402 bp, Homo Sapiens
tggttgaaaatagtagtttcaaatgaaaccattttttcctgggtatttagttaaaggcttctgtgcattgggagtgttctgggtagtggaggtgacatggatttagccagctaataaggtagctggtccagcatctgctcctgatctttgaccttcatagcatcagcgttagcgttcagtggaatggcgggctcgctttggagaatgccttgccgtgtgtgatccttggtgtcaggctgacctcatctggataaggaacaggactgggtagaagggatcactggcagttctgtgagcacttaggtggaagcagagcccactcaacggggactcctgaaaggttgggcattgccctttagtcctgcctttcccaggtcacttgctcaagccagggtcaaccca

SEQ ID NO: 425970 - DNA, 196 bp, Homo Sapiens
tgattagaggatcccgggttgacgtggcttctaacctcttgtccagagcaacggcagtggggacgtctgcaacttcctgtgtggcctgtggacggcctgtggttgcagcccaggcgccagcagccatcatgtgctccagactcccaggccgaccgggaggggtgcatactgcatgctcctgcctggacccctcccc

SEQ ID NO: 425971 - DNA, 565 bp, Homo Sapiens
ttgacgtggcttggttattggtatgatgggccttccaggaagggctaaactaggatatggcccagaggataaggaggaggggcatacatggtatccattgcccaaaataactctaggtaacctgaggaattggagtcaggggttcagctggggtcacgtgcccggttctggctaggggatggaggtgaacaagagaggttgccagccgtggttctcgtgggcaattggagggaggaggacgggctagaagagttatttttaatattatttagagcatcaaaagaggatttcccagtaggaaaaaaagggatttgatgtagggaacactgatactttcagggctcagggagacacacagggtatgggaggaggaggccagaagtggtgataaaaccttcttatatggacagtccttctggattgaactacaagcattcatatttgggtaactctagacagatggctgcctatttttaagcctcagttttccttcttctgactaaatgtgaggactcacccgatgtacagccctgtactaagccacgggtcaaccgggtaccgagct

SEQ ID NO: 425972 - DNA, 141 bp, Homo Sapiens
acttctagaggatcccggttgacggtgcttcgagtcacgagctctgagtgtctggcagtaactcccacaggaagctctaatgattcccagggatgctaaaggagcagccacacctaaaactcaccacactgctatgaaagg

SEQ ID NO: 425973 - DNA, 234 bp, Homo Sapiens
ctataaacttgccggggtagtgggggttaatcagagaggaattatgagccaacatccccagcaggaggtgcatttaatgaaatcatgtgtgatttattttctgggggaggttggggcgagaagaatctgggacccacacctcctggcttccagtgagtggctgccttgtgcaaaaaaggagaatagtagacaaacaggaacccaggcccctgctcccatgccacagcccctgcc

SEQ ID NO: 425974 - DNA, 588 bp, Homo Sapiens
gtgacgtggctgtgggttgacgtggctgtgggtggacgtggttcaggggatgaaatgattatccagtggaagttgtagagaggcagatttccacccgcctcaaatgtagggaagaactgataggacctcaagataatatgacctgttatatgaggtagtaagtgggaggtacacatttatggcatgagttcaagcagaggctggataaagtacagagtatttgtttctaacattccttcagctctaagattctattgatcttagttaacagagacacatacatgttgatgagacatgatgaaatcagctagacaccacctcatcaaacagtgttaacatggctggcatgcattaaatatcttcagaaaagctgaggttgtaatttttctgaaagtgattttactatgcaacatcagcccatggtgagactccgtacagtaaaatgtaaatctaaagaccttgaggacatccaacagaaactaaagaactgtgacccaaattaggattgtgattgaatatcctttatgcaccaagcaatagtgcatggtatcattccatgtttgcaactccaaagagtccgggtaaaat

SEQ ID NO: 425975 - DNA, 565 bp, Homo Sapiens
cccctctaccccggagctcggtggtctcagcgtgaccgcagcaggggctttgcctggacggcctttctaactcgtgctgaaagcaggacccagtattccgtcacgttctgtcccagcaagaacgtgtctcacttcaagaaaatgagggtgcccactctgccctgccctgcggtgccccaagtcactctcaccaaccctgaagccctgggagggccacacgccttttgacagatgcagacttaatacagctgactaaagtgtggctttatttctctatgacaagcagaggaaatctgaaatgaggtattgcactgtttataactccatggccacctccagtgaggacgtggggccagtggtgaatggcacactaggttcctctcacccaggaccacatcagacactaggacacatcagacaccaggtcccgtatcttctcggtgtctggcaacgatcaaaagactcaatttacatgggaaagaaatgaatgacttcgcttttaaactatttttccccttggggttcactttacccaactttgggagaaataaacgttaagttgggg

SEQ ID NO: 425976 - DNA, 558 bp, Homo Sapiens
  misc_feature (160)..(209): n is a, c, g, or t
attcaggatagcaggagcttctcagtcatcagttctcagctctaaagtccctttctcagatggcataaacagccacccgtcactcacaatactttatgaattcactaaagcttatcactatcttaagttagcttgtttatttgtatctaagttaacatcnnnnnnnnnnnnnnnnnnnnnnnnnnnnnnnnnnnnnnnnnnnnnnnnnnagttgcaacctaaaataatgtcagacacataatagagctcggtaaagacctgttgaatgaataccacccacatagctggaagttgcttgggaaagtggcagaaagatcaagctgactacagaaatcagaaccagcataaaagccagttagcagcttgaacagagggctgaggtacttttttccaactatgtgtcttccttacttctctggcacatgaagcctttacctattctgagcacacaacagggcaaggaggtatacacaacagcctctagggtgcaatggggcaccttcacagttagctgacaagaattcctcatggcacccaataggcgaagagggactccat

SEQ ID NO: 425977 - DNA, 122 bp, Homo Sapiens
ggcagactctggtgcagatgatacatctggcctggcctccctgaggtcttggacaggaatggggagggtggtgagagatattaatgcaaataatgctccaaccaattaattaagactgtgga

SEQ ID NO: 425978 - DNA, 283 bp, Homo Sapiens
aagcgcttacccgtgcttgtggttacctgtggctctgacactttgaggacactggtgagatggcctgggccagcaacggccactaggagactgatgggcactgaagccttccaaagcgactgagctggaaccaggggcagggaatcatttagtccccgggcactgcagagaagcggagttctctcattcacatccctgcaatgtcaacagtgagcaacagtgggcaggccctaggcgatttgggaagagcgggtgtcagaaagcctggggtttggccagccaa

SEQ ID NO: 425979 - DNA, 389 bp, Homo Sapiens
  misc_feature (139)..(204): n is a, c, g, or t
  misc_feature (309)..(348): n is a, c, g, or t
cagttgtaatctgtctcactgactctctcccttgccttgctggcatgtgtgctctgatggcgcaagctgctgagttaggcccatgtggcatgggactgaaggcagccttatgtcaacagctagcaaggaactgaggccnnnnnnnnnnnnnnnnnnnnnnnnnnnnnnnnnnnnnnnnnnnnnnnnnnnnnnnnnnnnnnnnnntctgtagctgagctgggggtgactacagctcaccctgcagctggtgagccaactcaaagcagagcacccaggtaagccggggccttggaccccctaagcaagggnnnnnnnnnnnnnnnnnnnnnnnnnnnnnnnnnnnnnnnnctgataccggacattttcaaggaagcccacggtcaacccaa

SEQ ID NO: 425980 - DNA, 156 bp, Homo Sapiens
gtaccaaatgaaagatacacctaaaagtgagaggacgtattgtgtagaggaagggctggctgggcacctatcatctatgccccccagcctggaggggtgtttaaggtttgaaacgtgccacactcatggaatactgcacttgcagccggttcaccg

SEQ ID NO: 425981 - DNA, 259 bp, Homo Sapiens
cgcggaacctgtccaataccccatctcaataactgggctcatataggcaggccaggttcttctcttcccataggccaacacactataatattggctttccttccttcctttccaaagcctaccagattagatagctggagtcccatccagctcactgagacagatggaaaacggaaagtaaggcaacccaaactgttcatggtggaaaaagagagggggcagagcaacccaacgtcccagcacccagatcctcttttcc

SEQ ID NO: 425982 - DNA, 239 bp, Homo Sapiens
gttgtggttgacgtggcttgtgggttgacgtggcttggagacttgtcttaggaacctggccagtcctttcagaccgactggaatggggccttgccttgtcttgagagattcaccattcctactccccatcctatgccacaccaggaactggggttgctgtggcacatgtcctgccctcctggtgcctattaggctgcctttgaccaccttctctgaagctaaatgctcacctgagccgc

SEQ ID NO: 425983 - DNA, 249 bp, Homo Sapiens
tgcgtggctctggacacctatcctcttgcggaggaaagtccacctctcttgcaaacagaaagaaaaggctcagccctcctttctgatccctgagctattgtgaagtaaaatgtaaactgcttttaagtcatccaaagacagcatgcggaaggtaaagcttttagaaatcaataagatgcatatgatatgaatataacttgcagtaatagatgctatttttaactgacaactgtgtgccaggtcactatg

SEQ ID NO: 425984 - DNA, 371 bp, Homo Sapiens
agttgacctgggttgagtgttccatagcgtgtggttgttggagcttttcttaggagtaagaagtattgttagtaggaaacaggcctctattggccctggggctggcactctgccccagtatgtcagtctcattttagtggtgaccaaactggggctcagagaaatcaactccctcaccccgaacccccagactgtgagtggtgggctggggtttgaatgtggggcttgaagacccaccgtttcctctggtcccccatgctctgctgcccgagagtgaacagtgatccaggatccaggcccctgatgggaccagacagggtgtgtggaaatggggaggcacagtcccaagcccccaggactctcaggcaggt

SEQ ID NO: 425985 - DNA, 312 bp, Homo Sapiens
ggttttcttaacctaatacagacaggaaatctggttaggttgatcattctacatagcacagcgcctggcacatgttttacaataaatctcagctcttatactcttatatgatactatatttatgagcacatattcacagcattactgactacagtcaatcatgtaaaactagctactctcagaaggtgaagagctcaaaactccaagcactgggccatgaaccagaataaatctgcttttaagtctgtgaagtataatgtaatgggccttaaatgagttcttttattttatgcatgggaacactgaggctta

SEQ ID NO: 425986 - DNA, 212 bp, Homo Sapiens
accagatatccacagcccgtcactgcactccatgaagaaagaaaacagtgaggatctagggaagatagagggcgacagagaacgaaaagtgctcagtaaatacagctgccggtccctgcaggacctgcaaggcactctgctccacagcctgtgcccgcctacccacctcagctggctaaaacccccgaccatgggcctcctttcagggcaca

SEQ ID NO: 425987 - DNA, 120 bp, Homo Sapiens
gaattagaatctagaagggacacttgtaaaaacaggatgctttcaggctgcaatactctgatgacaatacccaaaatactatctccacaggcatgctgatggattctgcaaacagggaga

SEQ ID NO: 425988 - DNA, 366 bp, Homo Sapiens
  misc_feature (228)..(284): n is a, c, g, or t
actggggatatatctggtgagttgttattccaggaggagcaaagagtcatcacaaaggttctgaggtgcgaatgaagcaggctgacaccatgttcccactgcgagcagacatactgctcagatacaactttaacagctaacgagcagtaagtatagtatgaaattaaatggcatttatataattttcagggatgtattgtaaaattatgctgacatgttaaagtgacnnnnnnnnnnnnnnnnnnnnnnnnnnnnnnnnnnnnnnnnnnnnnnnnnnnnnnnnntgcgcaactgtgaatatgccatatgaggaaaataataccaatcataaatccaaatcaattccgtgacatgcactccgggtac

SEQ ID NO: 425989 - DNA, 267 bp, Homo Sapiens
catttctttattttgtgtgcttgagaacccattaagaagtttccattagccctcttttgtgacagtaaatgtactgctctttgaacattcttttgtgcctcagattgtgaatgccaacttgacgctttgatcttaaacctctatatggagaagagtatcattctgtaatatgagacttgttgcttttctgcccttccagatggaagaagataaggggtcagacagctcagcatatgaatttgctgatagccagcacagaggggagga

SEQ ID NO: 425990 - DNA, 164 bp, Homo Sapiens
agattaaaaagcttagagaagtgaacatgttaggatggatttattacatgagagaagaagaccgaccagttgactatgttcattggaggggcccagagtatagttcacttaccaaaacaataaggaatgtgatagtgaagggacaccagcattattgaaaagct

SEQ ID NO: 425991 - DNA, 381 bp, Homo Sapiens
ggttttttgcattggaactcagtgagtcccttcacgaccacatgcaacacagggcagaattcagctggtgcccacagaaggagcatttagatgagccctagccagagaggaatcgctcatcccagtggtcagaacctgagttctggctagtcccaccactgcaagctaaagagctctagggtcttcaataaactagttcttgaggcctagactgcaattactgggcaagtcctggtgctgggctgtgctcagagtcagaggacttgggatgcacatgatccagtgggacaccagcttggttagccaagggagtgcttgtactgccccttctgcaatcccaggcagcacagctcacagctccaggaaatgagggaagagtga

SEQ ID NO: 425992 - DNA, 272 bp, Homo Sapiens
gttacttcagactgggtaatcagagagcagactgctgagaaaatgacaaatgagcagaaatccaaaggacaggaagacaggcagcagaaaaccagagaaaaaaggttttcagacagagtcatagcacaaagttgtataataactatgttcaaaaaaatgaagaaggcccatctggctaaaatgtagtgaaaataagcacagtttaagatgaagttgatttggtaggcagcgactcagtattttttttaatctaatttaattattcttcctta

SEQ ID NO: 425993 - DNA, 556 bp, Homo Sapiens
cgtcatagctgactcttgagggtaaaataaagccaaagcgaacgacttacaatctttataggtgtttcttgagtagaaaattgggtttcaaggggcttacttatgtggagaggggacagaaaagaggaaattaaggtaacaacacaactattcagtaagcaaattaagtgtttccatgagagaatgagaagcgaaaatgagtgtttatgcacttgttaaccattaaacatgagagcaagattccccaaaagcaagactgtctgcacagaaggctcagtaacatcaaaaagctgggagtcctcactggacaatctagccaggtatctctctttgagatttacgaactagcagggagctgggcaccttggcagtgagagcgaagtcctgttctgcgggcacagggggaggagaccaggggtccagcaggaagccagcagcacatgcagggccccgcaagcctctgaccactcctctatgctcccttcccctcagttcagaggcacagcaataggaattcccagaacagctcccgctgagtaacagcagccagaatttc

SEQ ID NO: 425994 - DNA, 192 bp, Homo Sapiens
ccaaagttcaacctttcaggctgcagacgtaaggacccaggatggctgacatcacttcacatttattgggggcccactgcataccaactacacactgggatcccagcagagaacagagtagacaagaaatttcactccatggagccaatattctggacatggtggagatgagggagtggcaaagactctata

SEQ ID NO: 425995 - DNA, 203 bp, Homo Sapiens
ggctcttgagggtcaactaacgccaaagcccccgacatgtgatgataactgacggatgctcgggctaaagatccgaagactctaagaatatgatcattccctttggatatcaaaatatcaaaagggctgtcaggtggagaagtgagtaaacttgtatcaggaatagcgggcagagttgcaaggaaacagatctctgttctgtt

SEQ ID NO: 425996 - DNA, 439 bp, Homo Sapiens
ttcctctcctcccacctctcagactaggtcaccctagacccagactgtcatatgtcaaacaaaagtttgccaccccactgaccggccttaccactttgggcaagactgaatgttagactcctggttaggatgacctggagctgacctggtcaccagttctgatctgatcctgacttcccttccttacacctcagctcatgtcggggtcacactcatgtctctgttatgaatccaggtggcttatggctgtttatagaactgtgttctataaaacctggaagtttctcaaagattcactcattttattcaacaaataccgaatgcctgactaatatgagtgctataggttctgcaagaaagtgtaaaaatagcaaaatgaagtccctgtcctgtcctcatgaatgacactctagtaggggtggaggtgggaggagaggaa

SEQ ID NO: 425997 - DNA, 255 bp, Homo Sapiens
ttcctctcctcccacctcaaatcatccaaggataaaaacaactggaaaggaatggccaggaaactattgaaacatttactataggatcttgacctacactcttaactcattgaaaacaggacttggccaacaatggttctatttacgtccaccttttagaaatgtacctgttcaaactagaaatccctgagcattccagttgcattcagttaaaggaggtaatttgttagctatgttgttagtgaccagaactat

SEQ ID NO: 425998 - DNA, 176 bp, Homo Sapiens
tatgttgatttcttactatgtataaaatagaggaaattatccagcaaatacaaagatataagacaaacaagcttagagtctaacaatatggataaaacatattcaaagtactaaaaacaaagcaatatgtaacaagtgtcctaagagaggtatatctgaagaattaaagagtctca

SEQ ID NO: 425999 - DNA, 192 bp, Homo Sapiens
  misc_feature (110)..(143): n is a, c, g, or t
ctgccactcctcccacctcggaaaggcggctaaattcaagacaaccagagccatcttcttatggacggggaccgtaacttttcaattgacacagaattcacattcggcannnnnnnnnnnnnnnnnnnnnnnnnnnnnnnnnngaacatgggtatctattctgctcaaacaaatctgtaagcgcttctattt

SEQ ID NO: 426000 - DNA, 313 bp, Homo Sapiens
atttcctctctcccacctccaactacaggcaagaagctgccatacattccccaaagctttagtgcactctgccacaggcctagatgccggcaacctcctggaccttgaactccctaaattaatggcctctgtgtgagtatgtgtaagcagcccctctctgtcccagtccatcctaaaatcactcccttggagccaccactgcccctctcatcttctagaatttctagaaagataaagagctagataagcatctaggtacctttcttctgctgttagctctgaagacaagtgaatatatcctagctaggatgta

SEQ ID NO: 426001 - DNA, 169 bp, Homo Sapiens
  misc_feature (126)..(126): n is a, c, g, or t
cttttcctctcctcccacctctagtctccaaatgtcgtggcccaaggactcaggcctcaatcttcactttttctctatctactgaagtgatctcaccctgttgcatggtcaaatgccacatgcatnccaacaatgtccaaatttctatctcagaactccgatctcaaat

SEQ ID NO: 426002 - DNA, 151 bp, Homo Sapiens
tcatgtagcgatcatagagtacccaggctcagatgctggatggtaggtagaggtggcggagcctggggaagttctgatattcttactgaaatcagaagcaaagttatcaggtgagtagggcagggaggtgtcagaggtgggaggagaggaa

SEQ ID NO: 426003 - DNA, 122 bp, Homo Sapiens
ttgttctttgaagaatcaacaggacccgattatcaaagagagacctgtttaaatatgtacaatcattttcggtattattcaggaaggaaaggagagtatgtgttgaggtgggaggagaggaa

SEQ ID NO: 426004 - DNA, 104 bp, Homo Sapiens
caggtttactccaattccaagagatatcgagaccttcctctgggtcataagaggctttctctggttcatcaatgctatgggttcattatcaagaaccagagggc

SEQ ID NO: 426005 - DNA, 587 bp, Homo Sapiens
  misc_feature (60)..(126): n is a, c, g, or t
tcatagctgactcctgagggtaaaatgactctcatcgaacctgcactaccggttgagagnnnnnnnnnnnnnnnnnnnnnnnnnnnnnnnnnnnnnnnnnnnnnnnnnnnnnnnnnnnnnnnnnnnagagctcaggtgattctttcacctcagcctcccaagtagctaggactacaggcacacgccaccatgctcggctaattttctgtatttttttgtagaggcaggattttgctatgttgcccaggctggttttaaactcctgggctcaagcaatccacccaccttggctcccaaagtgctaggactacaggcgtgagcccccttgcccggcatcaacaggtagtcctaacagctgggctggttcagccacaaactactgctagtccttacagcacacagtgctggtataagacagttaagaacaccactctattatttattcctgcattctacataatttccatttgcaggatgatacacacaaaacacttttcaactgcacaggctcacatctatccattttacttgatatgtacaacttgatatctcctacatgacatctacatgaagtttgtactttgatc

SEQ ID NO: 426006 - DNA, 419 bp, Homo Sapiens
  misc_feature (258)..(352): n is a, c, g, or t
acttcctctcctcccacctcgggtctggggatgctgaagctgttgggggtctgtgaccagttttgtaaatgaagaaaggtacttcagggattcaggttgaagccaacagacctttcccagatgccaagggcattgttctggccaacacccctgggcctgcctttgaggcatcttcagtagtatcagagatgctgacttggcattccagggaggtggaacctctggtcctggtgattttccttagggccttagattaannnnnnnnnnnnnnnnnnnnnnnnnnnnnnnnnnnnnnnnnnnnnnnnnnnnnnnnnnnnnnnnnnnnnnnnnnnnnnnnnnnnnnnnnnnnnnncacctgcacatctatgcattgtaaaggggactccctcaattgtcaaagtttatttcaatgctagaag

SEQ ID NO: 426007 - DNA, 485 bp, Homo Sapiens
acttcctctcctcccaccttacaatgtacacggactcttccaactgcacatgtggagtctctggcagcttttcaattttggttgacacagatggaaattaaccaaactgaaattatcacccacttatctgaactgaggctataaccgcagtttttcttttcttcactgttatgtgtctaaaaccaatgtacagctaaattttagtacagcattaaaaatccctctctctgcattcacaggtgggtgacactttaagcccattagctctgtagaactgctctatcgtagaggtgctagaatctgatgaacatttgagacatttgctagcataaaattctcagctcaaacaatgtaaggtatcgagattcattataatgcagcaattgcatgattcattttatgtgcggctcaatttcttaggtctaggctgtttacatgatcaaaacgagggacatatttttcttcttttatgaagctactcatac

SEQ ID NO: 426008 - DNA, 193 bp, Homo Sapiens
cacatggctgactctagaggatacacttcctctcctcccaccttacaagaaactaataaccagggaatgccagaggcaacagctgagattaggttgaggatttaaggcagccctcaggtaacaaggtgacagcctcagtacaaaagcactgagttctgacacccacatgcagttcactcatccagtgtggatt

SEQ ID NO: 426009 - DNA, 161 bp, Homo Sapiens
ttcctctcctcccacctctaacaaaaatagtattaatttatctttaaaattctttagttgaaaaagcttctattggcttataattattacccagaatcattcctagggcttaaacggtgttttcttcttaaagcctcgtgaaagcaatttcttagttctct

SEQ ID NO: 426010 - DNA, 412 bp, Homo Sapiens
cagagctgactctagaggatacacttcctctcctcccacctcatcaggtgcagattggggtgctgaggaaaggagacgctttgggtcccgacagccttgcagcatctccaccttctgcagcaaacgcgagctcttcccatcagctgcaaacacaggcccagaggtcctgctgggaggaacgcaggcgcattgctctcagctatgcttttctggcctaacctaagcaaaattaaatggacagattttgcggtagtaataagatcaacaggaagtctgaacagacaggacccagggccgtcctggccatctgggtagcaggagcttgccaacagcctctcgggcctgccacgggagtgagagagtgcgctggatctgcttctcatatccttacatcatttcgctcaagattcac

SEQ ID NO: 426011 - DNA, 309 bp, Homo Sapiens
gtcatagctgactctagaggatacactgcctctcctcccacctccatgcttcgccacagtggcacatgccttccctagctcacctcgaggccaccgcacatgcagtggcttcctgctggaatgcccttcacttccacccctcctcacctggccaactcctcattcaagactcaggtcagctgtcaactcctccaggagattttcttgggtgcccccaactaccccagggagatcaggtgtccccttttctgggatcctatagtacccctattacagcggttcccatctaaaggcaggtgtaatgggtag

SEQ ID NO: 426012 - DNA, 226 bp, Homo Sapiens
cacccagcctgaatttgaacttctaaagaggtataatttggtgcaagataggtggaggttagaccaaagggagcattttctagtggtccgggtaggtaggtgccagaatagaaaaaaggaggccagaacattttagaggtttgagttcgaggctagaggcagctcagcttcctgaataagcctaggtagaggagcagttggcctgcgtgaggtgggaggagaggaa

SEQ ID NO: 426013 - DNA, 385 bp, Homo Sapiens
ttcctctcctcccacctcctgggtttcggcaccagattaaaggttcttgtatctgtttgaaccccgggagcgcgccaacaaacaacacaaggtggtgtggagcaacatgctgttttattgggcgcctgggtgcagacggtatgagacctaaaatggcgtcagcaccaaatgagtgctgagcaggggttttacagtgtcctgtaaacaggaagtgttccagtctgacgggactgctacgcagtaaccggatggcctctcgcgatcctcaggggtacatgtcttccggccagggtaagtgtcttccggccggctctcttcctgcttctgctgtcttgctgaggcgcgctgctggcgcaagtgggcttgtgcctccggactgggcctg

SEQ ID NO: 426014 - DNA, 524 bp, Homo Sapiens
ggtcagagctggatctagaggatacacttcctctcctcccaccttgatagaatcagtttcaacagaaataatgagagatcttacgtgggctgccatgatttcttcacgttgctctaaaagcggaaggcggctttcctggttggcacccgaagaggcagaacactgaggactcagagcccaaagagaaccaccgcctgccttaggaggggagtgcagcctggtttgccatataatgacgagaaaagcaaatcagctgggaggaaagaaggcaattcttcttatctgggataggagggagagaaataggaaaacttcccaggtggtgagttaagaaaaaaggggagaggagtattggcaaagagtgaatgattctttttttaaacatttcattaagctgatagataataacagacaaaaataaaatgtttgttgtgaatttctggagttgggagagatcctctaaaaggcaaatcttttaatttattgatctttcagtaaaattagtctaattaaaacatttactt

SEQ ID NO: 426015 - DNA, 245 bp, Homo Sapiens
gcgggaacctggggcaagtagaagatacaacatgagaagggggaggcctccagggaggccatctagacaactgaaagagagacggcaaagtggactggtggccgcaggagtgctggagggttctggagagaaggaggctgattccagatgtttaagatgtggggtcagcaggaccctgggtgaccagtgaaatgtggagaaggtggcagccaggtcaattagagacagaggtgggaggagaggaa

SEQ ID NO: 426016 - DNA, 157 bp, Homo Sapiens
cgactctagagatccccttatttagtaatatatttgtgatcaaaagggagtttgaatttatgacccacaatatgaatcttacagattcagatattaagctatgtgagaagaaaacaagatttgaggtggtaggagctgaagaggtgggaggagagga

SEQ ID NO: 426017 - DNA, 348 bp, Homo Sapiens
  misc_feature (228)..(251): n is a, c, g, or t
ttcctctcctcccacctcccagttgtgacaatcaaaaatgtctccaaacattgccaaatgttccccgaggagtaaaattgcctctagttgagaactactaatctaatataaaatgcttaaatagtggttaaccttatatcttggtatttaagtgacaggatctcaaagggggagtgtaactcagctagtagaaattaaacataatccaggatggataaagtagactgnnnnnnnnnnnnnnnnnnnnnnnnggagagttagtaggcttgtttcaagccttatgagggacagttcccctttgtgggggggaagaaacctttacctttggctttaattggaagccaaaaa

SEQ ID NO: 426018 - DNA, 498 bp, Homo Sapiens
tgcctctcctcccacctcaaagtaccaggaatcccacactggtaaaattcctgagaatactgcatattgttagatatgcaggctcctagagtagaccagagttgcctaaatgaatcatcctcaatcttgttgcatactaaaaaaagagataccaggagaaagattttctcttcaatgcttgtaacataaaacctgtcttcctcctgagaagtccgcaagaatgaaaacgggtataaggcaatttacatttcaatgaaaagcactgcttagagtgaattgttatttccaaccggcactctcaatttgaggcacacatttgaaataccatggtgagctgccaacagaactctcttcacatactgtgtcgagggctaagaaatttccttgcagccagattaacaaagtaaagtgaatgtgagtggtgaagtccgcagtgtgcatatgtgtggtgtggacgtggagtgtatgtgtctgacaggggaggtgggaggagaggaa

SEQ ID NO: 426019 - DNA, 522 bp, Homo Sapiens
  misc_feature (480)..(480): n is a, c, g, or t
tcctctcctccacctgaacctctcaaattgttgtgcttgcaggcataagccactgatcatgacccagtaaactgttctgaatgatgaccacaaccatctctgggaggttaagggcatctgttcaaatctcttttgctattacaggaaggcctgtggagaagtttgagaagctggggtgttgatcttcctaagtgtagactatgtgagcaggagcagagaaaacagagggtgggtttttccctatgattggcagcaaccatagaccaaagagatttaggattcaaaggtgcttgtgtaaggcactacaggggttctttactccatgggataaagtgattctcataatccctctgatatagatgttatattatccccattccctctgatgtagatgttatattatccccgttttagagatacggaagctgaacttcagagtggtgagcaatttccctaagttacacagttgatcatcagcanagaaaactgagtttggttggaaagactaaaggctcacaagac

SEQ ID NO: 426020 - DNA, 226 bp, Homo Sapiens
ttcctctcctcccacctcacccaacaacagcagaagatatatttttaaactatgcaggaaacatttaccaggatagaccatgttctaggacataaaacaagtctgagtaaatttaaaaggatctaagacataccaagtatgttctctgaacacaatgttgagttaaattataaacatagagcagaaggcggtatctgggaaaaccttaatttttggaaattaagta

SEQ ID NO: 426021 - DNA, 255 bp, Homo Sapiens
  misc_feature (58)..(153): n is a, c, g, or t
ttcctctcctcccacctcagggtgtttatggggcaagatggagcatggggtaccggcnnnnnnnnnnnnnnnnnnnnnnnnnnnnnnnnnnnnnnnnnnnnnnnnnnnnnnnnnnnnnnnnnnnnnnnnnnnnnnnnnnnnnnnnnnnnnnnnggtagaaacaatcacagtccctgcttcacagggaacttgtcaccattaagtcattattagcacttcaaaggcattaacaacagtccctggcacttaggaagt

SEQ ID NO: 426022 - DNA, 225 bp, Homo Sapiens
acatagaattttgtttgtacgtgagtttgattcaggtaggtttgtatcttggagtagacttgagattgctattagaggattaagtattattggaacatggctatttatgttaaattgtcatcttctttctctttgtcttcgtatgtagcggtatggtatttgcctctctagctaaagagggttctggagaaagagatcattaaagcagaggtgggaggagaggaa

SEQ ID NO: 426023 - DNA, 129 bp, Homo Sapiens
ttcctctcctcccacctcggaagtggaggggagaaaaattccccacaaggattgtttacaaataactgattttgttttgaagttgcttttgacttactacacttcatcccctaccctgcttctaagggg

SEQ ID NO: 426024 - DNA, 146 bp, Homo Sapiens
aaacttcctctcctcgcacctgtattttcttgcaatgtttaaatacaggatataaattcaaacattaagagttaatacgtggaaaatactataggtgttttagaaaacaaagataagacaattcctaacctagagcaatttaaaat

SEQ ID NO: 426025 - DNA, 104 bp, Homo Sapiens
gtggaacacatagaaagcgcagttcaccttggttcatctacctgccggaggctatgtcagctactcaggctatcatctgatgggtaggaccatcacacctggtt

SEQ ID NO: 426026 - DNA, 390 bp, Homo Sapiens
ggaccacgctgactcttctcagcttggctgcatgtgacacatattatcttaagattcttatttcagcctaatgcaagaagatggtgcatattgcagcgagccctctccttttccctgatcatatctgtgtaggcttggaggaaaatcctatgcacactttagtgaaaggaaaatgggagggtcttctgtcaagttttcagtggccgtggaaacgaaaacatgtattacaattaagaaaaactaaggaagtggaacagtttctgccagataatcctgtttgggggttaggaaggctgatggcatgtgttttctggactaacattttgcagcctatggaaatgtatgtgtgctatttattcttatgaattgtgcaatgactcacaagcctca

SEQ ID NO: 426027 - DNA, 269 bp, Homo Sapiens
cttccttttggggatttccagtctcaaagcccagtttcaggatcaggtgcaggtgtcacccaccctcaggcccagtcatggtgttgcacatccagtagcaggaagagaccaggtacccctgcgtagggctttggtcagtagggtgtgtgcaatgctgttcagagacaaggaggctagtggggatagggggcaagcgaggaacaggggatggagagaaatgaagagcttgccttctgacatgccggttctgacacgttgtaaggcatcca

SEQ ID NO: 426028 - DNA, 222 bp, Homo Sapiens
ttagccacttggccaggcaggagttaatactttctagaaatataagtcactgaattagcagaacctctcagatttaggctggtattttccggtcaaaggtttgccttgagtttcaggctagaaactcataaggaattgttcaactgatcttgagaggcctactctaggtcctcaagaaagtcctcagttggggccttctaccgaagggaatactgcagaaag

SEQ ID NO: 426029 - DNA, 431 bp, Homo Sapiens
ggtccacacgctgactcttctgttgccctgttttggacggtgttgaccggcgctcagcacgccacccggggcccgggtaaaggggcctgctccctctgtagtcaggcacgacatctatccactgtttgcctgtccgtctctgttccctgattctctctgcttagtatgcactcatcgcttttgtgtgtgagtcccttgtataatttagcagctgcagttccaggagatgacatttctcagtcacatccaaacctcattgcactagcggactttctgtggctcctgcagcacggagagtgaaaatctgctattcgttattgtcatcggaattccacagtcctccaacccgattctgggagcaaattttaatgaattcagcagaaacttgtgtagcagtgataaaatgtaattgcctacaatttcacacccac

SEQ ID NO: 426030 - DNA, 336 bp, Homo Sapiens
  misc_feature (257)..(265): n is a, c, g, or t
agccaagcaacagctcctgtaccaggcacaagccttttggggggcagtgccccatccctaggattccctagctgctgtgtagaccttagcctatcctgccgccaccccgagcactgatgggacacagcaggtggcaacgggatgcccgggctcctactctccttgctcagtctgccccccgataggcctttgacttgtgcttcccctggcaaagctaccttgagtccttagaaatcccccctgagaagtacagaagnnnnnnnnnacagggatttgctctgaaattactcagctcagaaatagctactaagtgggcctgaatagggagtgtgggac

SEQ ID NO: 426031 - DNA, 377 bp, Homo Sapiens
tacattaccatctccccattgcacagaaaggacggctgtggctcaaagaggaagtgcctttccatttgagttctgccgctagctcagggcagacctaggacttgccctctgaccttacccctgctgtgtgactccccagctgcacctctctccatccacgggtcaggcctcagttgaaccctggtggggtggtgggagctcactggcttcacaaggccctgctgtggtagctcttcccacctcattctctcagtgctggtttgcccagagctgtggttccttcttcctggcccctggtctcatctccactctatcatatccagcatctgcctgggccacctgcttttacttctttaagccagggccgttttcttggc

SEQ ID NO: 426032 - DNA, 281 bp, Homo Sapiens
ctagatcactctcaagaggaccttacttttgactctagaataactcctagaagcaagcactgtttcggggcctatgtgggctgtgcggtttgtagggagcacgcttccaattgtgagaatagatttccgggaagatggagatttgttaatgcattaagtactttatctgaaagaaccctgaagtgaaaagttcttgaggccagtttgagcttgtcattttcccaggacgcctgcttttgctcaaagccccttgatgcggctggtcctcagggctatggaag

SEQ ID NO: 426033 - DNA, 360 bp, Homo Sapiens
aaggactggctaccgtaagggcatcctcagagggatagctgggaaggcgcaggatgatgtatccttactgtgaaattgaatgggttagggagttcctcccagcccttaggaagagcatccccaagcctgcccgccctttcttgggttcagcgtgtaataatgaaattaaaggatggcagagccctcctctcttctaatcttcttcgtagttaagccccaggattaattagcgtgtcagcccaggtcatttatatccaagagccctgccccatttgattctcggcccatggactggggtgttgtgcctgcgccaaacgtgactgtcatagctgtgccctgtggggcagaggatgggaggac

SEQ ID NO: 426034 - DNA, 310 bp, Homo Sapiens
agagagtggagtctttgaacaatagctagcacacacagtaaatgttccagtgtgttggtattagtatgattacagtaactttgcagcacactctctcctttgtcctcttctcctctggagaggtccacaggctgtgcagcatcctacagagaacattccctgggccatatgagcagggaacccagcagatgggaaccctagaggactgactgacggttttgtcagaagcgagtctcacctgggaaagttatagctccttgtgtctgtgccaggcactttgccctcagtaggggctggaggaacacagggc

SEQ ID NO: 426035 - DNA, 211 bp, Homo Sapiens
ttcctttcccttaactagttttctccctggcgccctccgtccattctcacctttcctcctcacctctagtcctgcattagaagcagccggttctccttcccagagccctccctgggagattgtgaaccgactaggccatgcctcttcacctgtggagagtggctctgaagcagggtactctctcttaccctgggccctgcactccagtgca

SEQ ID NO: 426036 - DNA, 493 bp, Homo Sapiens
gtaagcgcccatatcttcactggaagctgatgccctaattttcttctgagtacctgtgatcacagcccatcctcccggcagccactgccagctgaagggcgaagtctgcggagaccttggagaggctggcggctgcgtgctcagggcgtctcgggccgactaggcaagcatggtggagtcacaccagggttttcttctcagaagtggaatctcaaagtgcatcttggccagagcatgtgtgtcgcccacagtttcaagtgtttatgactcacatggtggagaagcctgtgccgcgtgctctgcctggctacgcggtgctggctgcatggcttcgggcctgtgtgcacgcagggcggcctggccaagccctctggtgagacggggctgccggagtgggccaggaaaggagagcccggcttcttagggccctgcttctcgccagccccttcagccgctcgttcattcagctgtcgcctgctgatcgctgccccga

SEQ ID NO: 426037 - DNA, 208 bp, Homo Sapiens
tctaaacaaaggtatgttttgagacttaagtgagatcacatgtacaaaagccctgtcacacgcctggcatggggtgaatgctataaacactgggcatccactagctcaggaaatgatctgcctctctgagatgttgttttctcatctaaaagggagagcataacaacagcgcctaccgctctagaattcaagtattcagcaagtttat

SEQ ID NO: 426038 - DNA, 286 bp, Homo Sapiens
agacccacagcgtactaactaggtagttgctgctggttcctcagggcccaagggcactttagtcagcaggtaaagaatgccaccaggactggatccttctcttcaaggcaggagtttcccttctggcccagggtgtgtctacatatgtcatccagaagctagggcctgatgactccgcccagtgccctatcctccagtggttgagctggtatccaagatgtaagataaaagtcctctttactcttacctctcctcttctcaagcggaaggagggggtcttttttga

SEQ ID NO: 426039 - DNA, 441 bp, Homo Sapiens
gactcttccctagctttatagtgaaacatttcatttagaaatctggacatcttacttcagtttactgtaatccacattcactgagtaaacttgtattgctcattggtaacccagttatattccaggtccctgggtcatactttctggcccaactaacatctggattgaaatgccagatgcaagacatacagtgctgctctggtacctctagctccattatatacaaagagggggatcaaactcagttccttggcctgaccaaggacctggtggagcatgtcttcagcaagggcatctgatttaaaaggagagaactagcttagctgccaggcccttgactaagtagtatctcagaataaagtaattgaaaattaatgagtatctacttagggtctctaaatatatttaattttctatggagggaactttttaaattgaaaa

SEQ ID NO: 426040 - DNA, 385 bp, Homo Sapiens
tatagagctgctcaggggagtgggctgctcttagtccccgcctcgcatggggtgcctcctctccctgcgatgggggccgaagagcgagaggtgaacgaggggctggctctcagtccctgcctcacggggggtacctcccccactgcgatggctgtcctaagacacgggggggaagaggagctggctctcagtacctgcctcgcgtgggagtgccaagcgcctgcgatgggggtcctaagcagccacggggggaagaggggcaggctctccgtccctgcctcgcggggggtgcctctccccgctgtgatgggggtccttaatagccagggggcgcagaaggggctggctctcagtccccgcctcgtgtggagtgctccccccccgg

SEQ ID NO: 426041 - DNA, 139 bp, Homo Sapiens
taccattacgctgacctcttccgtcattcaatcactctttcggaatattctcttcctttctatcagtttccccagaagcagtagaaggttactgtttttctccctttgtctagtcttctatctgttctatagttgctat

SEQ ID NO: 426042 - DNA, 205 bp, Homo Sapiens
cctcacactaaacctgacaagtcaagctccagctttaagtccctctttcagaatgttcttctgctactccttgtgtgtctaaatactaaccactcttcacctctggctaaaatatctacccctccaagtagcctttctggatagcccttttcattcaacatcctttgatctcccctctgtatcaggcaatgttgctcagggttgt

SEQ ID NO: 426043 - DNA, 348 bp, Homo Sapiens
  misc_feature (120)..(120): n is a, c, g, or t
ctgctcaatgggttcaggctctggtgaggagtagacaaggacagcaactaaaagacaatgcagagcacagagcaggggcctcactgagtcctggggtgagagggtcttccaagaagagantaggccaacaggaggccccaggcaggaggaggagttccataggtaagggagctcaacaggaagaagaacatgaggactcgaggacagcaaacgcaaacacctgagggtgaggagacaaaaaacacaagtgcttggggatgagggaacagtgaacacaaatgcctggggatgaggggacagtgaacacaaatgcccggggatgaggggacagtgaacacaaacgcccag

SEQ ID NO: 426044 - DNA, 168 bp, Homo Sapiens
  misc_feature (64)..(64): n is a, c, g, or t
cactatactcccttcctccgcccacacacaccccgtgaaggccacatcagtgcccagttcacanatatgtgcattgtatgtgttggccatcttcacaccgaaagccagaggccaggtagcaagtaggagtcaggagtccacccaggtatgccaggcacactcgctgag

SEQ ID NO: 426045 - DNA, 164 bp, Homo Sapiens
  misc_feature (147)..(147): n is a, c, g, or t
cttcctatctcccgtcaaactgattcatcatgatctccagtcccttatcactactttctctctagttttgggctccctcaacctcacttcctacctgatggggcctaaacaatcatattagatcaacctacactcttgcacataccncttttcttggatgacaa

SEQ ID NO: 426046 - DNA, 475 bp, Homo Sapiens
accctgaccacgaggaatcctttgagggtctgcagtatggaaagaaattctctgaggcgctaaataaaatcctgctctgaggtgcaaggaggacttttttgaaattaatagctggacaaagtttatgcagaccccataaggaataacagaaaggaattggaatcattttaataactgagtccgttgattataaaacttcacggtggtggtgttgtctttcatcaagaagcacgaagtgctcacaggctttaattacatcttcatccctacggccccttctgaagtcggtagatgcacgttaatagtacctttcgttttaggcatggacacattccggtaccagaagctttagcaattctccccaaggcaagcagagtacagagctggatcggggcgcaatgactctccaggccagcatcccatgctacctccagttgtatatcctgactccgcagctgaaaccaaggacttcatt

SEQ ID NO: 426047 - DNA, 188 bp, Homo Sapiens
acctactcggatgtcctcaggcctcgtgggggggctcccttgtcctggtctcatgcagaggaaggacgtggtgtgttcagagtcagctatagtgttggcacataagtgactgcccacccagtggaagctgctacctttgcctctttggaccatcgatcctctgttcaggacctcactatcctggaaac

SEQ ID NO: 426048 - DNA, 184 bp, Homo Sapiens
atagctggtccacaacgctgactccccaagtatgcatgtgctttccaactcggggcggcttctgagtattgaaagaaaccccaggaaatcatcatcatattcaccttgaagagccatgagattctcaccagtaaggttgcctgggctcctcccagccccacccgcagtgccagggttctcccct

SEQ ID NO: 426049 - DNA, 404 bp, Homo Sapiens
  misc_feature (268)..(268): n is a, c, g, or t
gcaagagaggcctctctacctatatcacaggcaagtgtgactctgcccataagacgctcccattcgtagcaatgaggtctacaatcaatttcccctcataacctatattcagcctttcgaagcctcagtatctggccatgtctttctagtctcatgcttctcttaataatacataatgaaaagtacagagtaccatgtaactcagaggctaattgttactagctttcacctcttgaagactatgattttgtcttattcaatcaatgtntattcggctctgggcttcttcttaccctagggattcatacccaatcaagaactaggcatgtttgttacaactccaagaaagattgaccaagctgcagtgttccctggcatgggccaagctcaaagctcctcaaaag

SEQ ID NO: 426050 - DNA, 365 bp, Homo Sapiens
ataatcgctgactcttccatcagattaggaaacagaggcacagagcaggtttagtaacttgcccaaggtcactacagctagaagaggcaggtttgggatttgaacacaggcattctgagtcttaacccctgttgcttaacccacccaccttggtgggcagaagtctcagtttccttggggtgcctgggccccccaaagctttctgtctgcgtcagatgtaactcccaggagctcctcttgtttccatgagcacgccttccgggccgaggactgtgttgtgttcatctttgtttccacagtgcctggatcactggcatctagcaggggctcccaattccaggctctctgtatgaggtgctggaggc

SEQ ID NO: 426051 - DNA, 187 bp, Homo Sapiens
cacaacgctgactcttccattgttagttgtcatgtgtaaaatgggagggctttgtggtttcttacgatctaagtgtagagcaagctgttacttctccctgtataggcaatagaactcacttttgtttagcatttgccaaaagtattggatttctttggaatctttactttgctactttcagcgttgt

SEQ ID NO: 426052 - DNA, 173 bp, Homo Sapiens
  misc_feature (15)..(15): n is a, c, g, or t
gctcttccattaccncctcactaccttatcaaatgagtcatccaagtcctcagaattctgccttcattaggaagaaggactcttcccgttgcccccggaattgcccttctgccagccgtgttcctgcatggctggactaatgaacagcatagctctcacctggagtcacgttg

SEQ ID NO: 426053 - DNA, 178 bp, Homo Sapiens
tcgaccacacgctgactcttcccatccctattagatattctttaaagacaaaatgattcagcaatgttttctgattattggtataatgcgctcaatatagaatatctgtaacatacaaaatcgtaatcagaaaaatactggttgtaatgttgccgcctacaactcctaatgttataat

SEQ ID NO: 426054 - DNA, 347 bp, Homo Sapiens
ctctgtaactgccagttatgacatgacccattttcaagaggaaaccccggggctcagagagacaaaggagctctgcccaggtcacagggccaaggagtggggcaccctgctctgactgccccaaagccctcatcctccgcaccccactgcctctgcgtcccacagagtctaggctcatttcggctcggtggccagcctgaggcccttgggaggggaaggggtgtcaggacgcccaggtgcagatgacctgggaggattctgactcagccccacaactggagcaggagagcaccacaccctcctaggcctcctggagcctcgccaaggccttccttagggtatgacat

SEQ ID NO: 426055 - DNA, 495 bp, Homo Sapiens
tggaccacaacgctgactcttcctaacgatcaatgagaccctgttgtctaccttttcaaaataaaaacgttctaacacagagtaaattgctcacttgcatggagtcacatcaacaccatgaaacctcagttccaagccggattgtaggtttctagccacttgttcagctggcattccacaacctagttatataatgaccagatccctctctcctaattacatgaccaggtactgtcacagatcactgaccagggttagggacccagggacccagggtgagagaaaggaaggtaaaaccatgagggcagagttgaaagaaaactacagctttctgaaacactgtgaaaccaaaaagactaagattagcctttcccatgcaaggaggcagttgagaaaggaggagtattatagagttaattcctaggacaagatgtctaagtagaggatgttgggcagaacccgacgtatccaccaagatgactctgttaagtcctc

SEQ ID NO: 426056 - DNA, 191 bp, Homo Sapiens
tacctcgccgggctgaggtgatttgaagctcctgtcttggagtttaacttagttatacaaacactgagttaatcctatgcaggagacacaaagatattaatatatggtctctgtgcttgaagagacgctaattttctgtggttgaagagatgctgtgaattgtgtgatagtggcagctctcaaaaggacaa

SEQ ID NO: 426057 - DNA, 291 bp, Homo Sapiens
cctcaactcagcagattaccaacccgttagcatgaatagaaagtgcaccattcaataaaaatatcaccttgttctaaatcagggctaatctctgtcaagctgaattggggaaatctgtaaatctgagagtaaggataccttcctgctaaaaacacagaatgcatgttttaaaaaatcagtttacatatgtgacgcaaacaaaatggaaatattaaggaaataccaggaacagagggaatttcaaataagagtaggaaacaaacagactgacactctaattgcctatggaga

SEQ ID NO: 426058 - DNA, 187 bp, Homo Sapiens
agttgaatttgagagctacattactaattaacatcaccaaaaaagcaacagcatttcatcattttatttagaaattctctttatgacaaaggataatccagcaattaagggctctctatacagattctaaactaaacgccttaaaggatctttgttctcctctattctacttcactgtggtccatat

SEQ ID NO: 426059 - DNA, 197 bp, Homo Sapiens
cctctcccttggttactacgctgttggaaggggtattgaaatctccagctataaatatggatttgtctatcagttattttgagcatgtttctagatgtgcaggttgtataatgagagcctataattgaggcatatattttgcctgatttatgtagttgctacttacgattcagttgctgtagccaaggaagaggtgt

SEQ ID NO: 426060 - DNA, 345 bp, Homo Sapiens
gggccctacgctgacctctccctttcattattattctcattgtcttttctcactcagctggacacatgaaacatattagtgaaggaccttgttaagccatgccaaagggcaggctcttgaggctggagaactacagggcaaggggagatcaaagacaatgagaataataatgaaaggaacaggtcatgcggccagtaagcaggtgctgaaggttccagcctcgtccctctgatatcagagcatgtgctttattcagttcactctattgccagccagggaaaacttcttagggcagggtcaccgtgcagtgaggctttggaggtcacaaaggtgggttagttgtag

SEQ ID NO: 426061 - DNA, 347 bp, Homo Sapiens
tataaaactactttctttattcaacagcccattatcctgactctcctcctgctttattaattccgaatttccaccaaggggatgagtcctcacctctcaatttactttctccactatcacttacatgctgaccttgcttagatctaaccccaatcccagttccctggcctaggctcagttctgtatttgctgctaactttactacacaagagtaaaacacaatatgccattcaccttaatttcaacatgtccaaagccattaccacccaccatacttgtaatatactataattgggcccccttcctaactccctaattcaaacctcaaattcttaaggctcaagtga

SEQ ID NO: 426062 - DNA, 376 bp, Homo Sapiens
gcccggtgacagctcctgacatcttaaatggaatatttatgtggccagatagtttcctacctcaccctctctgtttttcctcaacttcctggaaaagtgtgggaagttcttgccacttactttaggtccatatacaacattgcagtttatcacaagcttcaaggagatttggagctttcgagtctctccttccatgtcactttctattccctgcctgggattccctccagtaggatgacataacatgagagattggcattgactggggtgagtgttgaattaaagacacacaggtagacacatctgggagaccaagagaccttagctcaggagacacaaagaatgaaaaagaactcttgttgactcaagaaggagg

SEQ ID NO: 426063 - DNA, 126 bp, Homo Sapiens
ggctactgacaggagctgaacttggtagtcacgaccagctgaagggatgaaaccaaacaccgaatagtgtcagggtgtttacccaaaccagaggacttctttcttcatttaaatttgtcttgagga

SEQ ID NO: 426064 - DNA, 245 bp, Homo Sapiens
gtgaattctggtacaggtataggatctgagtctgtcactgtctgaggaagtaggatctgaccctggtgtgggtatctgggatctgtccatgtctgaagaggtaggatctggcccattaggactatgaggctctgggtctgtcagtatcttaggaggtaggatccgggtgcaggtacaaggatctggatctgtcagtgtcttaggaggtaagatgtggccctggtatgaggatctgagtctgtcca

SEQ ID NO: 426065 - DNA, 185 bp, Homo Sapiens
aggaaacgatgccccagaacaacctaagaagaaaatcatctgagaatgaattcgagatagtttctcagtaaattaatggatcgaagaggttcactcggcaaggggcctggcagtggaaacagaccttcgccaaggcaggtattaatacgtcattctgaaattttggaacaccgataacagaaggg

SEQ ID NO: 426066 - DNA, 379 bp, Homo Sapiens
agcgaaagatgcccagacttcaacataatagcaatccctcccaaggacaaagccaaaaatagatcctgagctaaatgggaatacctagcactaatgatccatccttataagccctttccagggatatgcattttaaatgggttgcagaagtatgttacctgaacaggttaacataggatattcatcacatgaaccaattatcaacaggtagagagcagggcccaacaaaaataggtcataccagtggcaactttggacagaaaacagggaaactactaaaaaaacgtactggaatagatgagtattgaaggctagagtgacaagatataaactaaattcacttcctttacaaatgcataggtcagtagatggaaccact

SEQ ID NO: 426067 - DNA, 284 bp, Homo Sapiens
  misc_feature (172)..(218): n is a, c, g, or t
aaagatgccagaccgagtcctgcccctcacagttcaattcacaacaaaacagtattttgcagaatgacacaaaactgatatgatactggaattcaaatagccttatcctgaattttcagattgcaaaatcctgtataagtttgtcaagaatgagcgcctctctgtctcttcnnnnnnnnnnnnnnnnnnnnnnnnnnnnnnnnnnnnnnnnnnnnnnnactctggtgtgagtctggatgcaggggtgtgagtctgtgtgtttcctggcttctcattttctgctg

SEQ ID NO: 426068 - DNA, 129 bp, Homo Sapiens
aggaaagatgcccagactatagtaaataggggttaacagagatggaacattcaggtaccaggcttgtgagctagagaggtgacacactgcttacttaatggtgtcttatgtaacctacctcccccacta

SEQ ID NO: 426069 - DNA, 166 bp, Homo Sapiens
ttcaaagttgcacctgtgcgtatatctttaacttatcaacatctaagtttcagatttctggagtagaaattgacttgtataagccggacaattgtatatacatagttgttttgactgcatagagtaaaattccgatgtctcgattttctacctctatcagtctgga

SEQ ID NO: 426070 - DNA, 383 bp, Homo Sapiens
aggaaagatgcccagacaaagagaatttatgtctgaaatacagaatggattactatagagattacaatacaagaggtaacttcaaaggagagtagatttcataacaaaaatgcaagaacctgcatatccaaatgagaccactgcttccctttaccagggttcctctggaggcttggcacttactccaaagatgctgctgtctcaaaacatttatgtaactccttgtaggaatgcagttacacagcaagtgacacattccttttaaatagctcatcctttagcaggtaaatttggtttttgctaacagtcgtatcctttgggaccaaatctggagcaacaatttgtattgggaagcataagttttaatcaaaggctacaacagc

SEQ ID NO: 426071 - DNA, 348 bp, Homo Sapiens
aggaaaagatgcccagacctctgtgtggggagtcttctatgccacaccctcctagatgacatcatctggccctaagttttcagtatgagtcaatgtgttggtgatgcccagattcccacctccagccctgatttcttccaagtgctctagagtcatatacttatttgcctgcttgatgtcccttcttggatgtcaaacagtcatctcaaaattcaactcttgatcctctcccctgctccaaacttcgccatctcagtaaatgcgttatattcctcctggttgcataggcttcaaagctaggagtcatacttgaatagaccctctttcttgcctccgcgtttgagctat

SEQ ID NO: 426072 - DNA, 254 bp, Homo Sapiens
tataatgaaacatgagtaggaattagagaagtggaaaggagaagggatagtcttgttcggggaggtacaaccatatccagagatctttatcttctgaactttggcatgactaccttgagtggttgttgtacaaatgtttccggtgctgatgggagagaaggagatggcacatacactcacaaaaatgagtagatggcacagaaatggtacaggttctatatttaaccatgcagtatattggggccccatactgt

SEQ ID NO: 426073 - DNA, 268 bp, Homo Sapiens
tatgcaacaacttagctggtcttttgctcccactacagtctacgtccacacagcagctggagcactacttgcaatggcagtcacatcatttcactcctgtctaccaattctagaaggcccaacatgatctgtcccttttccactgctctgacatcatcttttatcatcctccccctcactcagggcagtcacacatatcttctgtgcctcaaatacaacaagctaatttctgtcttagggtaacatacttaatgtacttcctagtctc

SEQ ID NO: 426074 - DNA, 419 bp, Homo Sapiens
aggaaacgaatgagctcaagcaaagaggtccctgcaggacagtaggttcaggaacaattggcatgattggggaaaaagctggcttgatagagtaagtgtagggagtgggaggttctagacatacggtaatgtgagtgcaggcacatcccggctctggtcaccccagcttgcccagctctcacatcccgctcagcctttgctgcttttgtgtcctccagcttgagactcgagccaataccactaattgttttctctactggccaaatggtgggaatgaggggtcataaaggaagcaaacagcacattccatgcatccagcaattttactgttggcaatttgatacagaaaaataaaatgaggacagagctgcagggtcagtaaagggaagtacatttccaagtgattttcccttttactg

SEQ ID NO: 426075 - DNA, 461 bp, Homo Sapiens
gtgtagatggaggcaggcatcgggtgacgtgggggccagaaaactgacataatttcttgttagcgtttaggatgctggtgaataaagcacggcgtggtgtgttgcccctatcaagtggggtctgtggtgggagagttgtgtctaaggcccctgctgggggacagacctgcgggcagggctttgtcctcttggctcaggcagagatgggcctgcctgttggagggctctgtctctgagccgttgccaagtggacctgacctcccaggtccctcctggaattggctttggtttgggctggctgctggcccaggaacggagtaccggagcagaagggagagctgcctcttctgcgttgaaagtgttgagctcagaacgtttctagcaaagggcataaccaccgcccttttggttctgatgtgtctgaccccctgccagtggccagggctccctgcctccacctt

SEQ ID NO: 426076 - DNA, 257 bp, Homo Sapiens
gtgctggggttggcattgcccgtcaacgaccggactttgtcatgctcagttcctggtatgactacgagatttggctacagcgtgtgggtggtggtgctcctggtccacttggcctcctaggagtcagagccctggagcaccagcccgagcaagagcagaagaggaagagcagagacccgtcactgctggggagtccctgtcagactcagtcccccatgagtctgaatttctcctcctcacagtttgcatgtctagcc

SEQ ID NO: 426077 - DNA, 181 bp, Homo Sapiens
cccgggttgatcctaaagctgagatccccagtgtgtcctcataatagctggagtgcctaataacccacaggaaatggtagtacttcccttgaccatcacgtgttactagcttatacacatattctcacggctccaaattagtaacttctaaggagtcgcccttgtggagtcgccctttcgt

SEQ ID NO: 426078 - DNA, 209 bp, Homo Sapiens
gagcgcgatgctgtgtttgcactccattcagagaattacatgggacacactcttttgtcgattcagcaaatagtaaaatttattattgcattcattatataagttttattagataatgaaaaaagaagaaaatgctccagtgtgatttataactctacacatggagtcgccctctgtcgtcgtgggatccctctatgagtcgcacctgc

SEQ ID NO: 426079 - DNA, 346 bp, Homo Sapiens
gcccagatgtgtccttttgacttcaccgtgacctcatggggaagagaggacagaaggagacgaccctattaagtttggggccttgaccaaggtcgcacagccagggatacagcagggccctctgatccccaggtggtcttttcaaccagagtacatggccccacttccagctgaatgtgccgtaaaggcatcagatgtcccaaaagtttctctccaacagtccaaggtcatcatcacctcaggctttagcaaatcccagagcagggatcacggggaaggatggtgcattttcaggtacacctcctcttcccagttcaaaggaccctgccgcacaggccacatgtca

SEQ ID NO: 426080 - DNA, 163 bp, Homo Sapiens
gctcggcccgacgtacagggcgactccttcttaaaacaaaaaagtttgtcatttctagattacagatttccaaattaaggtgttaggtacacacatttagaatttttatgttatcttgatggattaaccactttatcattaagaaatgagccgactgagtcca

SEQ ID NO: 426081 - DNA, 177 bp, Homo Sapiens
ccgattatagggcgactccatgggaaaaaatgactcagacaagaaaaataaaggcagatctatgaaacggtgagtaaggaatagtaatgtcctctggagctccaagttcacctccaagtgttctcgatattgtcttcattatagtatccccttcaaaccacactgggccgggaatct

SEQ ID NO: 426082 - DNA, 413 bp, Homo Sapiens
agtaaggcgactcctctcagcgcccaaggcagtcacccagtgcttgcctggcctgttcaagtcctactcctgtccttcactaatgcttgcttaattcgtggatatacctactctacgaatctttatgagaagatactgtagggtgacccacagtcctgatttgcctaggagtgagctgaggggtttcctgagatgcgagactgagactgtcccaggaaaattgggatggctgacgaccctcatgtactgcatgcctggtccctgggctgggtgccaaggacacatttatctaccaaacatagtcactgacctcaagaaacttccagtcggagagtggctgccactcaatgagaaaccactgtcaaaggcacctgttcagcccctcacacacatgatccatcaccaccctatga

SEQ ID NO: 426083 - DNA, 223 bp, Homo Sapiens
ggtcggtcccgttcgagtgctgcttcaaagcttcagtgattctgtggcattgctgctagatcaagccttctgaatgtggccttttgctgaggagttcccttctgataaggattgttttgatcagggctaggggtggtatgagatccagagcttagggtgaactctcatccccttgacctctgcccctgtttgagtttatactgacttggtagggactccctat

SEQ ID NO: 426084 - DNA, 366 bp, Homo Sapiens
  misc_feature (303)..(324): n is a, c, g, or t
aagggcactctatacatggaacagcagataactttgtgattcttctgctcagcgaagtgtgggtgtaggggagttcaagcttgcccatcagctggtagaggctgacctgcccttaacagctgcagagaataaaagtatcagcttgttcagctcctggcatgcagggtacaagcagttgagctgcatggaattggatctcatagttgagtttcttggcaccctagataccttgttctctcctcgattacgggtgtagactttgtcttggtggctgttctgggcctcctaatttagttgagattnnnnnnnnnnnnnnnnnnnnnnggagatggagtcgcccttgtggtcgacgacaaggcgactcct

SEQ ID NO: 426085 - DNA, 201 bp, Homo Sapiens
ctgggcctgtgctgggcttgtgtttctgggaaatgagtctattggctgatgctctcccaactctggcttctgtgctcctaaggagggttctggggccctgcctggaggtgggctggcaccacatatctttccgtcccatgccaggttcctcctgagtcaggcttagcacggcttccccaggccactctgagctcctcatgg

SEQ ID NO: 426086 - DNA, 177 bp, Homo Sapiens
attagcataaagatttgcttttcagcagggtcccacgtcacagtcttccagcatgaggggtacacagtggtagtagaggcttgtcacttatttgcagaatgataaaactgaaacccataaagggtaagggatttgccgaaggtcacacggctaatgacagagctggtggcaccagaa

SEQ ID NO: 426087 - DNA, 255 bp, Homo Sapiens
atcggcccgacttaagggcgactcctgaactttctatggtggatgtattttgtcttttacgttttaagactcacacagatgtttgcaaaaacaccgttagctgaaagtggaaagtttggtgatgggtattttgcttctaggaagcaaaaacatcagagtgacacatcatggatcaggattctgaagaggaatctctcccagacatttatggagagttaagaggagtacctttgtgagcacgtgattcctgccttc

SEQ ID NO: 426088 - DNA, 194 bp, Homo Sapiens
  misc_feature (69)..(139): n is a, c, g, or t
tctcacaccagcataaggcacctgcctaaaaaacctgctcctaaagcatgttcttataggttagtgttnnnnnnnnnnnnnnnnnnnnnnnnnnnnnnnnnnnnnnnnnnnnnnnnnnnnnnnnnnnnnnnnnnnnnnnacatttcaacgagattccaggggatgtgcatgaacatcaggagtcgccctgtcgt

SEQ ID NO: 426089 - DNA, 379 bp, Homo Sapiens
ttactccgtgggttggcaggagactcacacctagcgtcagggattagcaggaactgcatctggtctttttgataaggaaggctgtttcactgggcgccctttgccaagggaggactgggagagaaacttggggtgaggcactcctgatttcacctgatgtcaaagcagcacctcatattagagcttaattttaggcctcacactgcacggtgggtacccagtgggtcctgctgactgcccttcatctcctgattgggtgcactccttcctgtgatctgaagctcaacacacagcctcatccctgccagcttgggacaggggccattccaaaattcaaggccaccagagcttttcgtccttttctcttgctgctgatttg

SEQ ID NO: 426090 - DNA, 205 bp, Homo Sapiens
ttctctcccataaaataacacactcctcttacagccgaaggcaaaggaatgtcgttcagtgtacctcacttgcatctgatactccatctgagatcatataccttccacctcaaggacatccttttgtaagtggaaactctgcttatgtcggaaaatgtatttagtagctttttaacaaagtgtcacctcaaggaagctggtcgag

SEQ ID NO: 426091 - DNA, 154 bp, Homo Sapiens
cctacagactgggtcctgcggagtggggcgttcactgatgacttccaggccctacgcggtcagaggctgagaccagtctccaaggaactggacccttttggacagtagagctgtgccagctgctgctggagtggcctggatgggggtgctgcgt

SEQ ID NO: 426092 - DNA, 207 bp, Homo Sapiens
ctctacttctgtgttctaatactataatctttctttcttgttctttctagtaatcacctcgttcagcctccatagactatatgcttctgtagttgttgcttattagtagtatttctctatagttccttcagctagattatatgaaaatatcaatctcctagtagttttagatctaagtttcttatctccactatcatccagtattgt

SEQ ID NO: 426093 - DNA, 335 bp, Homo Sapiens
  misc_feature (54)..(169): n is a, c, g, or t
tactcgaccggtcacagcttctgagtactgaactatggcgttgcacatgctcannnnnnnnnnnnnnnnnnnnnnnnnnnnnnnnnnnnnnnnnnnnnnnnnnnnnnnnnnnnnnnnnnnnnnnnnnnnnnnnnnnnnnnnnnnnnnnnnnnnnnnnnnnnnnnnnnnntaagccatcacgcgcagcctgtttgagatctttattcatttttgttttgttaactttgttgtgtaatatcagaagagctatactttggtagtaatactttgtgtgtttttgtgtgccagaagttgtcttttttagccctttatattgggctttttttagaccgtca

SEQ ID NO: 426094 - DNA, 101 bp, Homo Sapiens
aacctcggaccggtcacagctacctgagggtactgaggcacagagggtcataataggatcttgaattcagttaccattgaggcctgatctagctttgccac

SEQ ID NO: 426095 - DNA, 352 bp, Homo Sapiens
caccgtctcacaggacctacatcgcccacgttgggtgaacgcggatcagagcgatacactgcggaggactttgaattaacacaatcaacacgtgtcaagctgagtaaaagcttggcggtgtgccaggttgccttcattgtacgaagagataatggaagtattgacggttggtttccggggcgccagtggggagagaaaggaatatttctttgctccggcactggatcttatccctacttacagcacgctgctgtcagctggtgccaagctttgaggcctccgctactacattgatacacagttcgcgtcagttctttctttccagcctcccctggccatttatattcagctc

SEQ ID NO: 426096 - DNA, 168 bp, Homo Sapiens
tactgataaattgtctgagtcatcagaattactattattttcatttccgaacagaattactccatcaagttttctgatatcttcctaatgtttctcagtaaaactttagcagagtaataaaaattcaccttagaatgatcaaaattgcgttgagtcccatataaataa

SEQ ID NO: 426097 - DNA, 187 bp, Homo Sapiens
cagctcggtatctagcttccctccaaccagaccaggcttttagaagtcgagtgtggtacacacggcctcagtaggccaacccgcttgagccttctagccacggaagctgggagaggggaaggcacgaggtcctgcagtggagcctggcccagcttttcccttcgctctcttcccgctgtcccgtccc

SEQ ID NO: 426098 - DNA, 299 bp, Homo Sapiens
acagggagagtgcagaggctgccctgaggctcgggtataggtagcctactgaaggctggtggttgttagaccctagcacgcagcccgagagtacggtgcctactactacagaagtgctactatgcctgccggcctagatgggtgatagaggctactatctatactggcacctataggcatggaaatagagcatacacagaagctcacaaggcccagggttagaaggccttactgtatttcaaagcaacagtaagtggccaccccatattggctataaatatgtgctatttcatgtattg

SEQ ID NO: 426099 - DNA, 434 bp, Homo Sapiens
caccttcttgacatttaaaagaagagaggcatctttcatctccctgcctagtgaaaaagggaagagaaaagcctgacacgttgtctagcttccaaaacttgttgataggtatatatgtggggtgtctggtgttttaaaatacgtttgcaaattctttcatccttctcccatcaaaaggtagagtctcattcttctccccatgaagggaatgcaacagaaggggcactgagcaacctcaggagcctgctgactactccagagtcagggtcaaaagggctcccttctggatgaagtctgggggagattccgggtgggcctcctggggactttccacaaagatccaaccgcattcccaagccggagtctcagccacctgctcccaggatggcctctccagaaggagactgactgagaataccatccattataaccag

SEQ ID NO: 426100 - DNA, 286 bp, Homo Sapiens
acagctcctgttcatggcagtgggggtgggacgtgagtgatggctgcatttctcttcccgtgtagtgtctgagtttgtgcaggtgccaggcagagtgtgatggggtggcatacatgttttgtgtagactttgtgactaaggaattgtgaatgtgcatgggtccacaagtaggagctatggggtcccagagactttttccttctctctgaggctccaggatggtgggcccctgggctcagtaccttgtggttcccaaatttgtgtgtctgggcaggatgggcacggg

SEQ ID NO: 426101 - DNA, 170 bp, Homo Sapiens
ctatccgtagagaagggagaaaacaattttctcccattttttttcactctcctcacttttctgcctcaaaatagacacttctccctcttagagattttagattaaacctttcagttctatttttcccccttctcactagcttgtccccacaggatgatagcaatttatat

SEQ ID NO: 426102 - DNA, 327 bp, Homo Sapiens
ttgttgtctatcaccagatcatcctgctatccaagatccccgacgtatcctgacaaaggcacaatcggagccgcatacttcatgaagtctctgatctccccaaatggatgtaagctttctctctgtgcatcccatggtgcttggttccggcttctcatgccgtatcctgctttgtagaaccatcatcagagagtgttaaaagagcttcaacgaataccttctttcagggcaccaggcctcactgttgtacatatggtttcacttaatcctccaatactcctagagttttatgttcttgtcattctgcctccctgtcagtggacagta

SEQ ID NO: 426103 - DNA, 127 bp, Homo Sapiens
cccgtgctaccagctacctgaatcacattggagcggacaggaagacacaccgagaggtcaagaacacaaccaagctgtgctgcaggaggtcgtcaactccaaaagctatttattggtttcacaagga

SEQ ID NO: 426104 - DNA, 401 bp, Homo Sapiens
aacagaatacctgtagttgacatttatttcagcacatctactttatagttcattgaggtagcacacaggcacgaaggagtcagccagcttctaaaagctccctccccattttgattggcgttctctgggggcccagtggaacattccactttttcaaggtttcctcttgatcctcttggctggaataaatagggaatactcaccaggaggcttaatcccgcctcttacttgactaggcagggagcctggttgggtcagacatgacaacagagacctgccaacccaaccttaagataacggggttatggcaaaagccaaacgctctgaacttttttccgcctatttttctgggcgtggggcaagatagatttcccttctaaggacctgctttaggtggatag

SEQ ID NO: 426105 - DNA, 121 bp, Homo Sapiens
ctacaacaattttctagtttaccatcaggcaatcaaagcaccccactgtgccaagcgttctcagtgacaagggtatctgtgctgtcaggctgctcagccatgctccctgcactctgcgcca

SEQ ID NO: 426106 - DNA, 270 bp, Homo Sapiens
cacactactgagacctctcttgcacctctggctccacttagcagcgatctgatcacgtgcaccactgattggggtgcacacgtcctgccttccgccgatctggatagtcactggctgggtacatatcaagtagtccttatcatacaaggtccttcttaatctagccctttgttactttagcagcttcttctgctccctccacgatgggcacatcgctcctgtcacacttgtctgctgctgccccatgaacatgtctaacctgctccctca

SEQ ID NO: 426107 - DNA, 132 bp, Homo Sapiens
cttgaagagcataacctcttctcatcagctattctacaagagcaaaatggactaacactgtgacttactctcaaatggtgcactcaacacacacgtagaagatgagtaagaccgctattcgggagacggagg

SEQ ID NO: 426108 - DNA, 300 bp, Homo Sapiens
agtgcaatcttctcctttttccgctgcaactccattggtttgtaacatcttgttggcttgcccatgagcaatgccaagttggttctgaaaaggcctgccataggagccatgacgaagtcacatgcaggacaaagtacagaggaagatggctggcactgcctttaaacagagatgccttccctgaactttcctttgaaatataaagatataaacagaacctgatgtggatactaaaagacacatcctcagtgatctggagataggctctgtcttcagggaagcaggtgaggcgaagagatt

SEQ ID NO: 426109 - DNA, 185 bp, Homo Sapiens
gattcaagagatatcatgggtaatctaaaaagatgaaaagagcaaccacgtctatcccacagctactgctagatgtcataggaaacggtagctggcccagctttggagccaggcagaaatgtcaaacacattgaagaaattgagaagcaaagaaattgccattcacacattgaattgctttcatt

SEQ ID NO: 426110 - DNA, 151 bp, Homo Sapiens
ctgtgatagaccctgtggcatcttcctaaatgtcaacggatgtcttagcttctagggtaactacgacgctgaacttgaatgcccgcattcaggtaaacgagaaggaacaatggaaggagggtgaaggggtccaattaggtttggaaggttc

SEQ ID NO: 426111 - DNA, 335 bp, Homo Sapiens
actgcgccgccaccagcaacctgtatgtcacgtgcagtcatgcacatgcgctagaagccttacctacgctcttccctgtaccttccacaatctacctcaatgcctggaatgactggggctgtcggcaccaccccctcacgtgtaggagttcctatggtagggtcattccagatgggggctgtgggagtgacccctcacactcatagaagttcgggaagcaaagttagaccttcagccccccactgacagcatcccagctacagagagtgcagccgccctccttaccttgaaaccctccctcccttttcgcttctgaaaacctgagtcctggcccc

SEQ ID NO: 426112 - DNA, 450 bp, Homo Sapiens
caccagctacctgtatagtgggagacttctcaaagtgcagactgaagaaggctcaggaaggtggtgttcaggagcctgtgacatgaggggcttctttctaacctatatcaatgctgctaaagttttacacttgagtgtaaaatactcccagggtacaggacttgaccatagtggagagaactggagattaatgctggacttgaagctggctgctcttcctatgaactgacaggttgtctccactgcagcatgaatgccttctagttctgcctgccacaccttggcataggcaggcaagttcatagaataatggaacacagacaaagctagatgtggaatatacatcagaagacaaattatctcaccaacaaaagaagaattcagaatcttagtattttgtggccttcaaggaatcatgaaaactgggttttctcaaagtttaaaggaaag

SEQ ID NO: 426113 - DNA, 150 bp, Homo Sapiens
caacgcagcacaagttgctggatcatatagtaagagtatgtttagttttgtaagaaaccaccaaactatcttccaaagtgactataccatttgcattcccaccagcaatgaataagtgcaggtacacatccttgccagcatttgtttttg

SEQ ID NO: 426114 - DNA, 204 bp, Homo Sapiens
ttgagctgtaaatgaaacgagcctacctaccccatagaattgtgagattcacattagattagatgttgatacttaaaaataaaacatacaaggcagtgctgagaaagtaggcacaaggttaacatatggctggggaaattttggataaccgttttgaagtctgtccatctatctatttggggtgtcatctatctgtatcaagga

SEQ ID NO: 426115 - DNA, 394 bp, Homo Sapiens
agggctcatggtcttgcctgtctccgcctctggaaatgaactaagtattacaaatatccctccaaaaggaaaaagaaacagcaggaggccaactaaaggggcaagctaaaaagaaaaattttgcactattccattggagaaaacagatggaaatcatacaagattccaaaatgtggtttccctcaaggtcacattattgctaaaataattatgataaagaaaaaaagcatatctcactcatccttctatccccaggatagtgccagggacacatcaagtgctgaatgaatgctgccccatcgatgcctgtgagactcactcctcacgtcctgactacttcaacaaatattctttcagtgggcctcttcttactcatctctttaggcttgaattt

SEQ ID NO: 426116 - DNA, 299 bp, Homo Sapiens
cctgcggccactgttcctgaagtggcctctttctgcgcaatcaattgcttcaggatgtgccctatttgatctgacctgtctaccttgtcaagaattttaactctctccttcacttatgtttcttcagttactatggcttttttggtgtctcgtttagttggttggcttagctggttggcaggtttctcaaacatgtcaaattctttccaaccttaagagtttctgcatgtgctaatcactctgcatctttgcctggttacctcctagtcaccctttaggtctcaacttcaaagcctctc

SEQ ID NO: 426117 - DNA, 215 bp, Homo Sapiens
tttattacgagctgaatggattaccacaatttaccttcaccgagttcaggagaggctgtttttcagatgtaggactccaaccctttattggtaatttcctaacccaaaaagcagtttgatgccaaaactaactgagtaggaaaaccagagccgagtaggaatggggttctttgtggtcttggttcatctcacttagtgtgaatggctacatatct

SEQ ID NO: 426118 - DNA, 156 bp, Homo Sapiens
ctccaggagatgaccaggtgacacccaccacagtaaccagccacagaggccattgggtaggtcggctctcctgtccctcctggctgcatcctgatggccccacagcatcctggggagtcccgaccttcaggaacacacaatgagcttgaagctcag

SEQ ID NO: 426119 - DNA, 197 bp, Homo Sapiens
  misc_feature (98)..(98): n is a, c, g, or t
gctggcagagtgcatgggggtggtgagaccatgggccaccaggaccctgggcataggtgcctggcctctccttggctggaccaaggtgcacatatctngctgaccctcaggtgcaagagtacaggcctcccgggctttttgcctgggagcagaaacatgctgcgcgtctaggtaaggccagcctgggctcatttcca

SEQ ID NO: 426120 - DNA, 203 bp, Homo Sapiens
atgtgggagtccgaagtcgcccaggacaaacattgccagccagatgccagtcacaggagctgaaaactcactatcttcatcctgtgcaacttctactgaccatgccatacccagctggccctgcccatcaacagactctaacttacagacatagggccagctgctcttgctcatgaaaggggcatgaatccgaggattgctca

SEQ ID NO: 426121 - DNA, 214 bp, Homo Sapiens
agccttcactgaagcacaggctttctccctgaactttccttccaagggactctccgtgccctggtcctgcacctccctccccctcgctgcattccccagtcaggaacactagtctagcaccagctcagccatcctctctactgcagttcctgccttcccccagaggacgctatttcccctcaaaaaacccacaactgaacactgcctctgggtc

SEQ ID NO: 426122 - DNA, 195 bp, Homo Sapiens
taaataaataccttcaatgcctttccttatactttgaataaatttcaaacttcctttctcatgctaaaatgcgctgagcaatctacacctacccacctctcaagttcctcctctttgttcaagctttccccatgcccactggactccagccccaaccgttagctactggagtaggaacaactacatagtcttgcc

SEQ ID NO: 426123 - DNA, 101 bp, Homo Sapiens
gtgttatttcacctggagaactaaagagatgcggaagtcttggaaaaggcagcgatattggcttgaaggattctgcagcagtgccctgatttgacccttgc

SEQ ID NO: 426124 - DNA, 381 bp, Homo Sapiens
agtgcttgaaatatgaagagggaggtgagaggctttcgatgaggatgcttctacacatgaccttgaggatgaaaacgcatcaggtggtcccgggaaccactgcgttgttaacataaagtctgggagcaaagaccagcggctggaatggatgtgcctgggagccagctgaaacagatgcagccgaagccacagtaaagaagaaagagataggggcctgcttggagccaacccctacctttgaggggcctgacagggccacctcacagctgcctgggcttgttgttgcctcctcactacagaaaccatggaagtctctagagtcaatgtttccaggctggggctgccagatcactcctgtaggtggttgaaccagttgagttc

SEQ ID NO: 426125 - DNA, 368 bp, Homo Sapiens
tccagtccatttttctcataatacagtttgtacttcacacatcagacagaatccccatttacatttcctagagagccccctagcccacattatactacagcatgttcattcgaaccacaaagatttttggagcagctacaggatctactttaggttctgggtatacaaagacaaataaaacattgtcttacactcaagtaatatggctaagtgagggagaaatgtctaactagttaaaagacaacaggcattttgggagaaagcatggctgtgctttgtgaagtcagcctcaaattgcagatcccttgttatttatctaccattcaccaattttcctgaaccaattggtcacaagcacaagtatttag

SEQ ID NO: 426126 - DNA, 220 bp, Homo Sapiens
cctatctcttcccccgaccctgtataatacctagcttgggctggctgaaagcctaagtatcctgtatctagggtccgtgaggtaacggcagttctgatgtccaggtactagtaggtaggtaggggatagtagtagtattataggtataacagatagacatagtatagcgagagacaagagcggaagaatacctagagaaataccatatagagatagtacc

SEQ ID NO: 426127 - DNA, 354 bp, Homo Sapiens
  misc_feature (186)..(212): n is a, c, g, or t
tatttctatacgaacgactattccataggttgatatgaggataaccccctaggttttatgccaccttaacgtagcctagactgtcttggagggacagcaatacatacaactaatactactaggacaaagtaggctctattacctaaggccaagttggactacacatatatatagccacctaccagnnnnnnnnnnnnnnnnnnnnnnnnnnnactacacagagtaagatatacacctacgaaagccctataaaagtagagaagggatagacagctacctactactagagccctagcgggaccactactacctgctaaatagggatagtacagtcctactttacataaatagggc

SEQ ID NO: 426128 - DNA, 343 bp, Homo Sapiens
tccctatccttcaagccaggcaaaattggggttccaggcaacaaaaaccatcaatctagactgtacatgagttcccaccgtagatctctacaaccacatgacagcaaataatctcagcagtaaacgtttggtgtgacacaacaggcattaagtgaacaatatttatgatctccaatatttttcacattatagcccacataaaaaatgctaatatctgtactgcacactgggatagaagagcaggttgctcgcagtggagggacccagctcccaaagggctgcagggaccaacaccacagcacgcaagtagccagtgattcctagagcccacctaggacctgcg

SEQ ID NO: 426129 - DNA, 317 bp, Homo Sapiens
  misc_feature (75)..(140): n is a, c, g, or t
ccttgccttcttttacactggatacgctatatgctatgtaatcccagatggccagacgctctgatcccttgtagnnnnnnnnnnnnnnnnnnnnnnnnnnnnnnnnnnnnnnnnnnnnnnnnnnnnnnnnnnnnnnnnnngctaacctagtccaacaagttcatttttcaaaagatgacattgacgttgcatccccaaagccacgcaacaagtaagtgcaaaagggagggcagtgaccgggccttctgccctcggcacgccaggcccttctgcgtcattatctcatctggtcctcactgccagcctccgggatgctg

SEQ ID NO: 426130 - DNA, 185 bp, Homo Sapiens
aattaataaagaatctccaggctgatatggattcttccccaggatactgtaataactctaccattaatttgaggaaccgcagttgggaaacttcgagaactgataaggtgagagaagctcttacaggggcaaaaagatgataccttttcctcatccaccgcaagggttgtggtcagtactactgt

SEQ ID NO: 426131 - DNA, 239 bp, Homo Sapiens
ggaagatgccagacggaacaggtcagaaggctccaggggagacctcttcagggagataaattgctgaacacctgaagtccctacatgtcttaagaagagatttatgactaaagaattgagagttttattagcaacacgtatatgaaaacaaagaaaatgaaatatcaagcttggtttcacttcaaagaaaacacaaagctgtgtcacaaaggaaaagtacgtacaatttaacagtaagg

SEQ ID NO: 426132 - DNA, 382 bp, Homo Sapiens
aaatgcctcctgatctcagccaccctactatccaggtacttatcacgaacagaaaccacgctacctctgaaacccctgaccatcatttcttatccttctagctcgcctgtactctagccatgaactaccagcacattcccatatcataacagcagctctagccctaactatcactcctactacttgtgcagctcacacacgtatagccccatacattataatacttttccttataaaataactacaatattactatgtacccttatctacataaatatacctagcaaaaggtatacctatctcccaaacaaaagccatttcctacactggtagcttagggtcccaccccctctacactttcctggagactttgtatctatcg

SEQ ID NO: 426133 - DNA, 377 bp, Homo Sapiens
gtagtttttcactaagtatactctttaaaatcaacccagtaagagacagaacatttaaatgcagatagctatcaggtagacatacagtagaccgggcccctatacttgagtaagttagaaagtagcagaactatacatgcatataatacaagaggcatagtggcaatattgctcctgagttcccatagtgggaatcatgggaaatatgccttgctgtaagaaaaacctataattttgcattcccagatatctaatttagactatccactctaaacatttaattatcagcagctgtaacctctaaaaatgtgtagagtgatgtatggcttaaacagaaataaaaactagctttcaccagagcataaagaaaaacaaaa

SEQ ID NO: 426134 - DNA, 169 bp, Homo Sapiens
aaacatattcaaatccataacatggggatagatacacggagccgaagatacagcatcagtaaagacaagatgaggtcctgatctgggaaccttttgccaagggaagatagccgctggaaatgagactactaatgccccaagaagtgactgatcctataatggaaaaggg

SEQ ID NO: 426135 - DNA, 248 bp, Homo Sapiens
cggatgactcttgaggctgtctatttgatggaacgtactggaacagttcatagccagcccagcaaaccttgtgtggagacagagcttgctttttctctttccttttcctgtttgcagtgagaatgaggcctttctctccccggccctttgctctccccacagttgtctcacgaggtcacttcctgctgacaggctcctttcagtgcaaggtttggatggaaacaatactccgttttctgggaggactg

SEQ ID NO: 426136 - DNA, 305 bp, Homo Sapiens
catcaacttttctaagactctggtttcctcatctaaggatatagcataataatgaaacagactgtgtcgtgttacggtgaaattgaactaagataatgtagtcagcccagtctggtacgtggccagaacttaacgcaagcgagctctcaccatcaaaggagtgcagcttactctagagatagccttgactaggtgattcccagcccttgaggagatgattcttatatacccctagggattagagagtaggtttatatatccataccctaccttaaagacattaccgtacatattgttagcctacc

SEQ ID NO: 426137 - DNA, 433 bp, Homo Sapiens
tccacatcacgaaccattttcttcactttgaatgctatccccgcacggaagtaattagcaagtatacagaagccgaatactaggcgtgcatagaaaaacagtctccttgacgcctccctgttgccattccttccaaaggggaaccactgctggtggctttgggtttttccttccagggttattctatccttggcacctaccagagactttgccacctctgcctggaaggttctcgtcctggacagccacgtgattcactcaccccctcatcctcatgcagccagagtttccctgacctgaccgtttatgaattgtcgtacctccccaccaccgactccctctattttcctcccctgcctcattgttcttcagagcacctatcaccacctgcttctaaagtcctgattcccctccctccatgctggaacaaaag

SEQ ID NO: 426138 - DNA, 182 bp, Homo Sapiens
agcatgggccccagatcagcatctataactccgtttgcccctccctacctccaacacactcgccctatttatggttacatttaccttggccttacttcagatgtgcacccaagcagccaaatgaaaatagccacagtaacttttctcaatttaaatccacagccacaaactttaagcagacg

SEQ ID NO: 426139 - DNA, 210 bp, Homo Sapiens
caggacacgatgcccagactagaaaaagcttcagtaaaaggtggagaatgtacttatatatatccttaagttcaggttcctgaccctttgtggttccatttgttataataatagtgtgtcaaaaggtgtttcccttgagaacgcaatttattcatgtcagcttctcatgctattttctgaagcctctgtagtatctgatcaattgtattt

SEQ ID NO: 426140 - DNA, 413 bp, Homo Sapiens
gtgccagctgggtcgccctatgtgcagagtcaaccactgaggcccagaagaggcaaggatgcgtctgggccccagcaaggcccaggtggaggtgagactggggcccgggtctttcattctctccatggtgccctcttggctgactgagccacggcccgtttctacctccttccctggagcagagggcgtgcaggggaccctcgtggggagccagtgctcccctgcactccatatccaatcctccctccagacacttggctcagctatcaccctcttctcctttatcctggcccctcccctccaccaaacacagtggttgctcctgtcccaaaggatatgctgcccttaacttgaagaaaggggggaagttaaacatcaacacaacccaaacaacccacatgctgcgtctcctc

SEQ ID NO: 426141 - DNA, 118 bp, Homo Sapiens
agacctgttagcaccactgtctatactccctctctgtagcccctggaaaccatgaatctactttctgtctcttatgaatttgcctagtttgtacacttcatataaatgtaattgagca

SEQ ID NO: 426142 - DNA, 180 bp, Homo Sapiens
ttatggcattgatactcggatgtctccaggcaccccaaacgcactggaaacggaacatgatgttacccaccccacaaggtagaccctcttctagtgtcacccctcaaacaacaggccaccaaattgttcaagccaaaaatctccctcagtccccaaatccgatcctttaatctctctctc

SEQ ID NO: 426143 - DNA, 198 bp, Homo Sapiens
  misc_feature (156)..(156): n is a, c, g, or t
gcaggaccagtgcacccaagttgacaatatgttactaagagtctacatcctaatctaaaattagggtttgctgagtatttaggctttgtttgaggagtttcttttcagagtttgccaaaattaagtgtggccccaatattcagaagctgatctgtntattttgtcttagccactatttaaacttaaattagttgtcaa

SEQ ID NO: 426144 - DNA, 311 bp, Homo Sapiens
cttgctggacactagtgctcaggcatcctaatgctgagagtaggaggcacgccatggtgggcagggtgggatgattctcaaacacaaggcagagtgttcaagtgagccatgctgaggtccttccactggagaggttggggtgacgcttgctggctatagcctgggtaagcaggtagggaagatgtttttctcgttatgccccagtttgacagggcttactccccaaccccagctgcaaaagcccttgcccatgtccctaagctaagtctctacatggcacatagtgtcctgccgggagatcgctctagaag

SEQ ID NO: 426145 - DNA, 378 bp, Homo Sapiens
ccttggcggaactagtgccatgggcttactttccttggccacaatgcgacgcttctgggctcgctgtggtatgcttggctccatgttcccacttacatatcccatcactgccccaaacccaaatgcttgagattggattcaacatctttcttcccaaacaggcctttattttagttgaagcttccccaggagagccccaagcttacaactctggagaggcctttgatttccttactctgtagatccaatcgggcctcaagccctgtcactcttcctctacaggatccacaaaatctttccttcttcttcactttatcgccaccttcaccatctaacccaaaatgttaggattgctgcgaagagctctcctcctgccag

SEQ ID NO: 426146 - DNA, 399 bp, Homo Sapiens
gacactaggtgccccacgcagaggcctgaggcaggcacctcaaagaaaggtgatggcttcaccagctgagctcctggatctgaatagctttgtcagccggagaactgcacaaagggtttgatgttttctaggataaggggaaggatgactgctttcacaccggggtaatactagacactgtgctgcctgccattacatttcctgtgattcatttcgcaaaccagccaagagttggattttatttgcccatttttataaatgaaacatgcagaggttctctgactccctcagctatacagcttataaccagcaccatcaagattcaagattcagactctgctccagggtgcatttcaggaatagctgaggaggagcacctggtgacaccctccctgccca

SEQ ID NO: 426147 - DNA, 356 bp, Homo Sapiens
caggaactactgctataacagataagcccggggcaacccaggtcatgctgtccgctctccctggcagtccctcgaggggctccagtctggaggtgagacttccatgggcatagagtcccagtcccgggtgagacctgctttgatgggggctatagaggtgcagcgaggaggccctgctgcaggccatgactcccccaggccacaccggacaagcaggtggatgaaggaaaatggggaaggtgatcagggcaggagcaagcttgtgcaaagacccaacgatgcaagatcctggcacgcttcaggaatacagggagtttgcgggagagtctccttcctccttagaagtggctcagaga

SEQ ID NO: 426148 - DNA, 261 bp, Homo Sapiens
ggcggacactagtgctggcggacaatattcgctgtatcacagctttaaatgagttgtgttctgttctcccggatggagacaccctgatgaattgtgggaagtgccctgttctcatcaataatatgttaaaaatattctagcatgcccctttcctgcttcccatttacactctgtgtatctggcatttgtacatgctgcaaacattaacaatggtgattgttaccccagtggctcagggttggtctccctctattgcctacg

SEQ ID NO: 426149 - DNA, 387 bp, Homo Sapiens
  misc_feature (27)..(27): n is a, c, g, or t
tgagtccgcctcgctgcctgcttctgngccaggcctttgattcctgaaatgctcagagcaaaccaagagaaaaaaagtgtttctcaggtgagcctgtccaagaagtttttttccttaaagaataatttcttttcctgctgttcttcctccccacacttcaccaaaaagggcgaagacagacagaacccagaccctcccatagttttccttcagtgtccccttgggaatgatgtcaccttggtctggttgcccccacccatgggcgaggttgtgggtgataactccatgggccacgcagagcatgagggcagcctgcatgaagccggaactcccatccaccgtctcgtccccagcctgtgccttggttctgatgccttcccctcgtgc

SEQ ID NO: 426150 - DNA, 378 bp, Homo Sapiens
ttggcaggaactagtgccctgacatttttcttttatttccaggatggaaacccacactgctgttgtgaagacacctgatgaaactccagcaacttctacatctggcctgctgcttagtcctgggacctgaggtcaaaatcttagaaaagagccatgtgagatgcattccctggcctcatctctgttcttggatgctgtcagcaacactccttgagtttttacccacataataacactttcctcagcatggatgtggaggtgggggtgaggaatgttctatttttccttcgatggttacgccctcaccctaccaactcagtaaaaggggagtggtcagggagcgtactgagaatgtgtcctagcatcttttcttcccta

SEQ ID NO: 426151 - DNA, 441 bp, Homo Sapiens
  misc_feature (43)..(150): n is a, c, g, or t
ctgagatggacactagtgcactttctctgtgctcattcacaannnnnnnnnnnnnnnnnnnnnnnnnnnnnnnnnnnnnnnnnnnnnnnnnnnnnnnnnnnnnnnnnnnnnnnnnnnnnnnnnnnnnnnnnnnnnnnnnnnnnnnnnnnnggtgaagcgctttgtggatgtcattgcacacgaccctaatggcaggcagagagggtagataaccccatgtagagataaggagatcatcactgaaggacgttgtgtcacttgagtcacttgtctgacagtggacaagcttgtgtcagggcagtggttaggagctcaaggcctaataataataaacgcagatacacagatgggattaagataaaaggatttggggcggccgagggagttgccactttgtgtgtccatttcagagtgcctcagaccccagcccagctcagccac

SEQ ID NO: 426152 - DNA, 325 bp, Homo Sapiens
tgtgatggacactagtgctcaggcttccctttaagtcggagccctggagcataagaaagctgatcccacgagactcggttgagggaggggggttcccagagagtttctagctctggtccagtgccttgtttctcctttaggacattcctcctgaccctggtaaggctaagtccagaaaggctggggaaggggatagcagcacctgcctccttggaatctttagggagaaaacaggaccatttacagcctcctggtccccttctcaactaccacaccctgtacagctctggtacccgtgacccgacttgcaatagtgtcctgacaa

SEQ ID NO: 426153 - DNA, 310 bp, Homo Sapiens
  misc_feature (99)..(172): n is a, c, g, or t
  misc_feature (229)..(265): n is a, c, g, or t
atgagttctgtagttcacttattacagtattctaccaaggtatattgttttggttttgataaatattttttggtgacattagatacgaacataaaggannnnnnnnnnnnnnnnnnnnnnnnnnnnnnnnnnnnnnnnnnnnnnnnnnnnnnnnnnnnnnnnnnnnnnnnnnaactacacacacatccatgcaccgagcaggccaaacaaaatatgtctgtgggtctgnnnnnnnnnnnnnnnnnnnnnnnnnnnnnnnnnnnnnacaagcctttgttgcgcgcctacttggcacaaggcactgtttcag

SEQ ID NO: 426154 - DNA, 365 bp, Homo Sapiens
acactagtgcatgctctgaaatatagtttcataggataacaagaagcaggatttgtcgcagaatggcgacagtgagaactcagaagggtctggaagctctagtttcagaacacatcagcctggatgagagaagatgaaatccagaattcagaggctaggttgcagctatgtcataataggctatgttgtgggagtggtgactagcagatttatagagaatgcaaaaaggggagagttcagtcaaggttacaagcaatggaggccattggaagagggaaatggaacactgtggtatgtgaagatgttccatttgaggataagaaatgcctctgaatctgggatggcattttgtgaaagcagagaga

SEQ ID NO: 426155 - DNA, 127 bp, Homo Sapiens
ggcctgacgattgaagagctgaatatcccctctattttgagtaggaatagatattgaatactccgccatacaattggaaacgcatcatctagtactagcaggcattatgattacccggtttgatatc

SEQ ID NO: 426156 - DNA, 202 bp, Homo Sapiens
ctgagaccacaggtacacaaaccccacaacagctatgagtagaagcttttcagaatgaatatctggccatgtcacaagccccccaacaacaatcccatgctttctgggctcttagcacccttcaatactataacatggtatttacgaacctaactaacggcctgccaattcatttttctttcagcctgtgggttatgattga

SEQ ID NO: 426157 - DNA, 165 bp, Homo Sapiens
gagggtctcgaggcagctgcacggtggcaggcagcatctttcagccccttagcaagggaagaggtggaggctcacagggcatgtttagaattagatagttgccagccgctgtccaaagggagcccctcctcccactgcacaggcacagggtccggctgacaggca

SEQ ID NO: 426158 - DNA, 317 bp, Homo Sapiens
aaggagtgcagataaaataggagtcattaagattaccatggggaaattcaaattgttataagctacttctgttccctggaaaagcagagccaggagagcatacagcatagctcctatgtagtgccgtatatggaaatggggaaaagtaaaattaaatgaacaggaggatttggaagcacaaataaataaggcaaagcaagcttattggctaaatacgggtaactaataaaacgtcctacctgtgaaataactattcagggaaagaaatttaaaggattacgtactacttctgtggatcttagctggcacattcccct

SEQ ID NO: 426159 - DNA, 388 bp, Homo Sapiens
tctttatcaatttgctcctaaagctcagaggagttattagtcaccttcggaagcttacttctgtcaattcgtcaatctcattctcgatccagttttgtgcccttgctggagaagagttatgatcatttggaggagaggaggcattctggtttatggaattttcagcatttatgtgctggtttttcctcaccttcgtggatttatctacctttgatctttgaggctgatgacccttggatgggatttttgtgtgtgggccttttgtttatgttgttgctttctgttagtgtttcttctaaaagtcaggcccctcttctgcaagttgctgcattttgctggtggtctactccagaccctcttcacctgggtatttccagtggtggctacg

SEQ ID NO: 426160 - DNA, 261 bp, Homo Sapiens
gacctggttaggacactagtgctattcacaggctgaagaactgggcagttcttacttgggtctgtcctaggatgtggaggaagttcaggactaacgctaggcagagagtaaaactcggtttacccagcctaggggcctctggatgggaacactccattccaagatctcagcagagcagggcttcctggcttgaggctggaagcctttgggaagaggcccagctgggacattccctgggcacctgtcttccgctgaagggag

SEQ ID NO: 426161 - DNA, 274 bp, Homo Sapiens
ctctgtgcatatcctaggtccatccatctcccccggtctcactcaaatcagtcacttatctgatgctgtccccccagctccacggtggtgcacactgctaacccccaactgtgcaagggggctttctccatcgcgccccaagcccctctgtccatgccccgagccattacctccagagaactcatgcacccgaccctctctgcggcagcccttgaacaatggcccaggagagttgccttcctatctggggggatggctcagatacatatgctct

SEQ ID NO: 426162 - DNA, 106 bp, Homo Sapiens
atgctggctatggcccagatcctgtcctctccctctctgaggccctcactgcggccctcactgcatcatgcttaggccctggtgcaaacctttgagttctcatcca

SEQ ID NO: 426163 - DNA, 116 bp, Homo Sapiens
attacggacactagtgtcttggcaagtgcttgtgagatcgttttggtgaaattggaattataccattgggatctttccttatgaatggatgatggtaaaattgaagcatgtcactg

SEQ ID NO: 426164 - DNA, 278 bp, Homo Sapiens
cgtgtcatagtagtaggtgcttaaactgtttggtatcatcacagccttactattcttatctcttaggtgagagactttgcctgtttcatcactcataaaattaggagtaagaataaactacctcataagatagctctgaggattaagctcaacttgggtcttatctggatataaagcctggccagcatctcttaactttagagagccctaaatcaggaccaggaaatagctcattcatttatgccttatcatctccactggactagttgtcctggcca

SEQ ID NO: 426165 - DNA, 293 bp, Homo Sapiens
tatcaactaacaaagtagttatatggaaagcctcctggccacttcattcagatcagagccactttagctgctcagggacaagctgacaactctcccttccatgaagggtaccatgaggacaaccaaaaagcaggctcaggctgtacattgttggccatgccaggctctaccaaatctctgcggagtctagtctacaaagcagctgagcagcaggagaggtccacgcccaactcatgagtcaagagggcacacactccaggcctgggacaaagggccgagtggtctcaggcagc

SEQ ID NO: 426166 - DNA, 329 bp, Homo Sapiens
ggagcactagtgtcatcacacatacacacagcacccaatcctagcacccactgtgtacagcgccctgtagctagattatactccagtgggactcactgtgacatggacttattacgttgcagtgcatcacgttctaattactttggaggagtgggaagcagcaaagctcttaagagccaggctattcacacccacaccctctatcttcatgacacccagcagctctgttgaaggctgctactcttggggtgaaactcccagcagggctcgtaggaaattactctcggaagagctcagggagcactggctgcactaagtgtcctgcccaa

SEQ ID NO: 426167 - DNA, 344 bp, Homo Sapiens
acctcggaccttgtaaggacactagtgcagtttagggagggtcagaatcttgtagcttccagctacatgactcctgaaccataatttctaatcttgaggctaatttgttagtcctacaaaggaaatctagtccccagagaagaagggggtttgtacttgggaaagggctgttatcatctttgttttaaactataaactaaactaagtttctcccaaagttagttgagcctacacccaggaatgaacaaggacagctgggaggttagaagcaagatggagttggttaggtcagatctctttccccacctcagttacaattttgcaaaggcggtttcagaatcaga

SEQ ID NO: 426168 - DNA, 437 bp, Homo Sapiens
  misc_feature (174)..(189): n is a, c, g, or t
aaagatggccatggcttattaaccaaagtcaggcactgggcactggggaaccatgggaggcacggccaccatttcctgtgctatcatctgagccccacctggcacacctgtggggcgtttcacggcaatacctgttcactgaacaagtgaaccagtgagaatgctggctcttgnnnnnnnnnnnnnnnnggagacagagtctcactctcgcccaggctggagttgtgtggtgcaatctcggggacctcactgcaacctctgccacccaggtttcaagcaatttctctgtgcctcagcctctccttggagttccctggaatttcgggcgcctgccaccgcacccggcttaattttggttttttcagtagagattggttcatatttttggccaggctgttctgaacctcgtacctcgttgttaccttgcctttggcctc

SEQ ID NO: 426169 - DNA, 347 bp, Homo Sapiens
tacctgtgtaggacactagtgcagtgagcggcagagaaagaaacaacggcacagtgcaaggccccagtctcactgggcagcggctctgcctacaatgaaatatgacttctgagcttggactcttttaaaggccctggggtctacatctggctgactccaggcagctagtgacacgctaaggatataactaaattccacccaaagtgactgatcccatgcctgttatgtgcaaagcactgtgacaactggggtttaagagaaatgggcaaacccccagtccttattcttggaaagcacagagtggtggggttgcggggggtgcgaggctatgaacatacactcctgga

SEQ ID NO: 426170 - DNA, 202 bp, Homo Sapiens
actctgagctgcctgtcgtgacctccaccgcgcgtagttgcctgcgatctgactctgccctgcgtgacctccacccctagtgcctgcgatctgactctgcccgatgtgacctccagccctagtgcctgcgatctgactctgccctgacgtgacctcgatgctcctagtgcctgtgatctgactctgccctaagtgaccttga

SEQ ID NO: 426171 - DNA, 196 bp, Homo Sapiens
atcactcgaccggtcgacagcttcctgaggctcatttgttcttccaaaccaagtctaataggacaagctcgtccatctttctcccatgggtgatgctcaagcaggagtcttggtctggaatcattaattcctgcaggtgctactgacattagctttgtagaggctagtttttcagtggtctgaacacctgccatgg

SEQ ID NO: 426172 - DNA, 248 bp, Homo Sapiens
acctgtctggacactagtgcacaccaagcagatggtacagacaagaacatgggttatttacagccagtagagtagacgaaggcatatgcgctaagccctcttaaacccactccctgggagccattaacacatccatttagatgaaagagtcccgaggttttgccatgggcatttctgctacactcccctgaagcatcgccatctgccctgcctcctcccagaggccttgtcacccccactcctgccaa

SEQ ID NO: 426173 - DNA, 141 bp, Homo Sapiens
cttcaggaactagtgcacaacatcccaggaacagatgttgaagatggattagaccctgacaacgagagcaggagagctggcaggatgagcccagccaacccccaagtcacagaacaacgagtggttctttaaagccactca

SEQ ID NO: 426174 - DNA, 349 bp, Homo Sapiens
cccaaaaagaaaaacattagtttcagtcaaacccacgttcgttccctaccatgtgtagctgtgggaccctacacaagtgaaattgcctctgagccagttgcctcatgtaaaactgagatgaccatacttaacatggccatcgcaataactagtgttggttacctggccgcttaagtaatttgtgtaagaacaggtttaccccacccaaaagaactgggccatggagagccttcataggaagaaaaggacttatctcctcttggtcaaagtgaccaaatgactgcatagccctcgcagcttccccagtctccccacccccacagaatttgagaagaagcagctgagcatc

SEQ ID NO: 426175 - DNA, 209 bp, Homo Sapiens
taggaggcttcaaatagatattgtattacaaaagcatctgaccagacccagagataattgatagagattatcttcctaatcccttcagatgacactaactgcaaatacaaaaatggtttccatgtgaataaatagtaatcaagtaatatgtacttttcacctttccctcaacacatttgcatgttagaattatatctacccctcttaat

SEQ ID NO: 426176 - DNA, 262 bp, Homo Sapiens
ttttaaaaacggaagaaaggaaacagacgatctgggcttgtcaaacgtccaagtggaaggcccacgctgcaggcaaaaagtagaagatgcatgacagcacggcggcacactgtgctaaaagcccaatgcaagaccacgcatggatgcggatgcacagcattataacctttaaatatctccagaaactctaatgttaacacttttggttaaaacatcccaattattggtcattcaccattatgcctcaaatgtctttttcttt

SEQ ID NO: 426177 - DNA, 241 bp, Homo Sapiens
gggaacggtggccgtgaccgtcagcttccacactctgccttctgtgttcttgcattttcccacatgcgtgtatcatctttacaaacaattcaacctacagaacccctctgtctcctgacaccccagcttcctgtatgtcccaaaaagaaccctcgagctcctgtcccactcctacacgggggctggcggcttctcagagacggcccacatccccactctaattcccaagattcaacacact

SEQ ID NO: 426178 - DNA, 214 bp, Homo Sapiens
cactttgaagaaacagcagagagcccacagagcggataagaccgcacgtctactcctgacgacaaggagagcgcgcacgtaggcgtgcgacagcatggcagatgacggaaccagcgatagcaacactggctcgctgagcaacagcgctgcatgtggcctagccaccaacagatcccataccagaagatgagagagaacaataagtcgagccttg

SEQ ID NO: 426179 - DNA, 247 bp, Homo Sapiens
cctcgtggcttttacctacccatttccctatgccctgccaggaaggggaggctcgcacagaaaaccagcctgccaggaagaactcggggcagcttggctcagagcactgacacggagaagggcattgactcagcagggctccaagccagctcattctctggaatctgaaactgcacacccaagggctgacgagcaggctgccactcatacacttagccctgtggaatgaatgtgggccagcccttta

SEQ ID NO: 426180 - DNA, 309 bp, Homo Sapiens
tcgaagtctttgtattctggtgccatcgacggcgacactggtgcagaaccagcgacacccttgcctgggcctggtgactcatgaggacaagatggctgaccaaggagagggagaggttccactccctccaaggcccagggctgactctttttcatgcatttggtgctaaattgctgccctgaggctcttgaatagcttgtatgaactctggtccacccctcttgcctctcctaaatcccttgggaggtgtccccatgccctacacactgcctggagaagacgcagcaggcagagggggacatcgaggag

SEQ ID NO: 426181 - DNA, 300 bp, Homo Sapiens
tgttgccctggccaaaggcagctataagcttggtctgaaatgagatctttatttagacagttgccttctgcctctgagctggggctaagaccatggcaggctctggggcttctagggaccaggaagaggcaggaacagctgtagactgaggaaggagggccttgcttgagccatcaggcacacaaacagatccaagcatagaacaggtcgtggcggacacagatcaaagatgggcactaaatgccactgggatagggcttgctttagacccccccaagtcctacataatctactggaaac

SEQ ID NO: 426182 - DNA, 385 bp, Homo Sapiens
ctttaaggaaattgtgcgcctggtttcttaactatttgaaatctcagtgctctttaataaccatttagtgattctagactagagaatgagatggcttttctaataaattatcattaagaatgtataacaccatctaaacttggaataatctttctttctcttcctttaagatttagtcttcatgacctcctaattgctaaatcaattagcctttttctcagcattcctcccactgcccctcagctgtggtggatacaatgttgcttgccttactgacttgctatctggcttccatgggagtctaccggctggacctggttctgccctctagacccacaccacgcaatcttcattcctttcccacatgactgcactgtagctattt

SEQ ID NO: 426183 - DNA, 234 bp, Homo Sapiens
gattttctccaaacagagacaagtagactagttgcgaacatctgttaagtgtgaaaagggggaacaatgggaggatgtgggcatggttctgcagataaatgaagggcacctgctggggatgagccagcgaggtgggaaagaccagctcatgggaggctttgtctggtccactaaggagtttgagcattatccgaaaacaggaggctaagaaagcgtttcaactaagaaagaaat

SEQ ID NO: 426184 - DNA, 122 bp, Homo Sapiens
cttgccctcctcctcaggttaagaaaggcaaagagccctgcttttggctgtaaaaagccaggttccctaatcaggtgaaggcctgaggcagggactccttagggcagtgtaactagtagcca

SEQ ID NO: 426185 - DNA, 186 bp, Homo Sapiens
gaagtaccgctatggctgcaggaacaggccagcctaaaatgattatctatggctctagagcagtgctcacagcacagggctcagtcatataagccactaagacgtatttgataaatgtctgttaggtcactgaatgtccctagagccacatacagataacagacaccaggacagaaagaaatagat

SEQ ID NO: 426186 - DNA, 321 bp, Homo Sapiens
tctgtaggaggccagcagtgtttcaaattgcatttcttgaattcttggagaaatacatgtcttattagactaatttatatatccgctgttcttcttgacaactgagttatttggctacccatagaggcatttttcagaccagaacaagatctaatgtattctaatattttcatcttgaaaatgtgaaataagaaagaagacgaggttcggagaagttcgcagaccagagaggctttcaggctacagaagtttggccacctgacttaaactcaccctcttccacccagcccagtgctctttgaaccacactctacacactgt

SEQ ID NO: 426187 - DNA, 219 bp, Homo Sapiens
ttaggctttcccatgggggttttggattgggtagttacaagaaaacacgtgcgcaggggaaatttattgacacgaccctgatagaagcacagcccctcaggcttgctcactctcactctctccccacctcttgggtgagctctgctgtcactgcctccagacctctcatgaaggccccgccaccaccctccctggaatctgtaaggggtaccgagctcg

SEQ ID NO: 426188 - DNA, 345 bp, Homo Sapiens
accttacccagctttgtgcgagaagagtgaaaataactggggcgctcagggccaaaccccaaaacaggctccaactgagagccctggcaaggcctggtcttgtaaggagcatgtaccccctgctcccctgacgcattttagaacatgatgcagaagggcagagggcccgccaccatctctgcgaaagtctggaccggatggcagaagctggggctgggaaccaacttcagaactgccagattcaggtgtggaaggagaaaggcattatcccaatggggagaaaatggcactccaatctagttcaccagaaagagctggaaaaggttgcctttatgttgttggtac

SEQ ID NO: 426189 - DNA, 142 bp, Homo Sapiens
  misc_feature (73)..(89): n is a, c, g, or t
aaaccctctcctcacttgtttgtaaaatgtcccgagttttcccagggctgtgtttgtttgctgctattgtttnnnnnnnnnnnnnnnnnatttgttttatctttagcttttgttttcactgagactcagggctacgcattat

SEQ ID NO: 426190 - DNA, 125 bp, Homo Sapiens
accctcagccagaaatatagatgaaattcaaagctgttctgttttcagaaccacctgcctctgatgtagaccaagaaattgctggtagctttctaagtgttgagtttgcattggttttttcccca

SEQ ID NO: 426191 - DNA, 258 bp, Homo Sapiens
gctgggatttttgggagtatgcaatacctccagcctctcaaaggcatgggctctgcttcctgctgaactgttgacctttggagcagacaacttctgggaggtataatcaagactaaaaacccggggaactgcaatgagtcttttagaaagcagaagctgagtctgatagaacttagcccgtgaccttaatgggtactcggcagatgcagctgcctggctgattcgagaacaggacaggcatggaccctgctttcggag

SEQ ID NO: 426192 - DNA, 419 bp, Homo Sapiens
cattttaattaaaccacgatttgacagggacatttggcaatgtgatatttcagcattagaactctctttgcaacgcacttcctccacttggcttggtgaatataattcatttttattcttcagagtgtgttgctttgagatctgaaactgtcctctctgaatttcttcatggttcattgtagaacgctagaaaatgattaccattggacgttgtgggaatctagtcagtatctaagaccctatccaaggttcgtccagtagtagtggaatagggtctgtgaccctactgctggcattgtatttgaatattattatgccctatgtgatagtgatagagcctctggagagaaacatgagttattttcataccactctaatttcaagttctctgttacctggatttacttgacgttggtctc

SEQ ID NO: 426193 - DNA, 298 bp, Homo Sapiens
  misc_feature (96)..(137): n is a, c, g, or t
acctgctagtcaatgccagaaactgttatcatttatggagtacttcttgcgcaaaacactttcatccttgtaacacacctctgtgggatatactannnnnnnnnnnnnnnnnnnnnnnnnnnnnnnnnnnnnnnnnnacctccccgttctgcggatgatggatgctcaagtccctgatgtaaaatggtacagtatttgcatataacctgcacacatcctcccggagactttaaatcatctctagattatgtataaaacttaatacaatgtaagcgctacgtaaatagttgttatcttg

SEQ ID NO: 426194 - DNA, 438 bp, Homo Sapiens
cacagctatgggggagagctgagggtatagcaggacagggccatggaggtaggaagagggcgtgccattcgaggacctatctgtagttcagcacggaagtacgcagggtatggagtggcaggaggccagagtggagcccagaaaacagaggccagatgaagaattggtgtgcgctgcatatgaatggggtgggaatgaatgctctagtgggactgggaaaagagaacctgagcctcagggatggtgatgagacagaggctggccactccaattgtggtggcaaggagaatgctgaagagtgaatgcagcctaatttcaaaccctggctccatcatttactgtgtgcccttggacagattccttagtttctgagtttctaatcacttgaatgaggatcataaaagtttcaacggctctggtgaggatgaaaacccatgg

SEQ ID NO: 426195 - DNA, 405 bp, Homo Sapiens
cttttacaggggggtcgcagttaggaaggaagcctcacatttcccacccctgctgaccctgcttcttcaccaaggggctggaaagacattcccaaactgacctttctccactgtccccaaaggcgagggtgttctgtgcaggaagctctgcaggaagcaggatgatggagtgtccccaaatggtcacttcccctgcctgggccccaggttccctggctctaaaaccctcacagctcctgctatgtgtggggttacctccaccagccatttcatcctccctgtaacccctacagatgaggaatccaagtcacagagaggttaagagatttgcctgaggtcacacaggcaggaaacagcagagctgggatctgaacccaggcctgactgactgctgcaacgccgcat

SEQ ID NO: 426196 - DNA, 118 bp, Homo Sapiens
tcgtctgtaggaggcaagagtgtaacagcaggacttggcggctgtgaggatgtggggaatggaggaagacaggggccctaggggtccctgagctggaccagggggtgaacatgttgtg

SEQ ID NO: 426197 - DNA, 212 bp, Homo Sapiens
  misc_feature (127)..(148): n is a, c, g, or t
cttggtaattatttcattcctttgttatggctgaataatatccactgtatggatttaccagatttgctttattcattctaatgttctctctcagggttcactaagggttttttgtgtgtgtgtggcnnnnnnnnnnnnnnnnnnnnnnggaaagggggttcttttttttccccccggttgggggccgggggggtaattttaatttaatgaaa

SEQ ID NO: 426198 - DNA, 333 bp, Homo Sapiens
  misc_feature (321)..(321): n is a, c, g, or t
ctttaattgaaggaacagggagtgcccagcctggaaagaaaacagtcaggggactgtgaagggttttcctgagaaagaaggatcctacttgtgccaggtggcatgagaaggcaaaatcaggacaaatgggtaaagatcacagtggggatggcttcaggccatctgccctaaccactgtcctaacagccagcactgatagcagtggaatgtactctaggacattggaggaacaagtggctattcaagggccaagtagagaaggaagtcaagtatcagatgaaactcaattacctgcaagatctctttcaagcttgatacacncagtgtctcagt

SEQ ID NO: 426199 - DNA, 121 bp, Homo Sapiens
cctggatctagaaacatggtatgcaatgacgaccttgacaagacgtgtctcagtggcacagtggggaagggattctgattagagtgagtggaagagagaaggtgtggaaacagggaacaca

SEQ ID NO: 426200 - DNA, 377 bp, Homo Sapiens
gagggtggggggcggtggggggttggccctaaggaagaactgaggacggaagtagctttgctcccaggcaagagctgaagttcccgacccctgggaggagagggccaggaccctaggcttggagctggagctggggtaacttccagggggagataaagacacagctacccgaatggggaagccctggctactcacagctgttaaaggagggggggcagagaaacgtttccccaagagcctgagcccagggaggtggcagctctgccaggggcccaatgttggcggctcctgtcccccacagcctccaggacgcccctccgtcctctgcagcaccttcgtttacaggtcggcttttctattttacacctgcatgtcct

SEQ ID NO: 426201 - DNA, 347 bp, Homo Sapiens
ggagctgaccggagcgatctatgtggttctgtgtatttcatctcttggcctgtgtgtccccatcctaatatccttgaagtatcaaagcattgctaaataaatacccatgaagtttgctacaggggaagccagcaaaaagttcttaatttaaattcttgttttggaagagaacaagcagagagaagagaatgctttccattccctggtttaagtctcaatgaaaatggccatgtgagacattttgggtaaaaatgaccttctttggctcccattttggctgatgtgttcacttcttttccacggattgctacctcccctccctgctgcccccgcctgcaaagagacag

SEQ ID NO: 426202 - DNA, 142 bp, Homo Sapiens
aggcatctgcagctacctgtcccaggcaccccagagtctctcggggtatgctgatgatggtgacaggctcaagttgaagctgcaggaggaactttttgctgcttttaagcagcccaggcctgggacaggggtaccgagctcg

SEQ ID NO: 426203 - DNA, 149 bp, Homo Sapiens
tttgcaatcgtggtctattgtgatcaggaagatggcagctctctgtattcataatccacacagcgatgtcacttccaaatgcacaaagacttcatactcactatctttccacagccggggctaaaaagttagaagatcctatctcagag

SEQ ID NO: 426204 - DNA, 283 bp, Homo Sapiens
tgtagaggggctgccacacatgttgctcagcctgaactcgaactcatgaccttagctgcatactgagtcacatggttacccactcgcgtctggcaaccttcacgaatgtgctcactgaggacatcatcgatgaatgcaagacccgtttctatatccattgggctcacactacgcacaagcaccatgcctagtaccgcaacaaaggtcacagccagctacagacttcgcggctgtcgtctagagtcagccggcagacgtacaaccgcgtcgctagccgtgtgat

SEQ ID NO: 426205 - DNA, 196 bp, Homo Sapiens
gaaaagaaactgactggactcggtggggaaagactaaggggtgggaattcaaggcagagccagcttttgttcctggccagcccccgggaaagctggctacaagcagaaaggagctcgaagtgtgggatgcctcaaagggaaccatggggacagcagcagccagaggcaaaccgagggtagatggcacctatcacct

SEQ ID NO: 426206 - DNA, 379 bp, Homo Sapiens
cagtaagtcccacagaatacctactgataatcctgtggaataagcagcatatggaatgttgctgagctagaattaaagtccacaccgcctggccgcttttgccttttcttgacattgccaatgcatcctgtccccgagcgtctctgagttttaagtctcagatttgttttctttggagacaaactgcaggtaggtgttacttctcaccgaagttcccagatagcacaggctttgctaaacaacacagcaccaggaactccatcatagagaccgcaggatgctgtgtgcgcgcacatgcgtgtgcacctagtgagatgtaaacatttacctggagtaaaagaaattctttccccagagcccaaatttggctagtctcctt

SEQ ID NO: 426207 - DNA, 233 bp, Homo Sapiens
cattttagtgttagatataaagtgttagctaatttcctcccccctcaaatgcctgccccatttcccattgttgtgtagtgcttgtgttatcatggcttgcatttttaggtaggattggttcttatacataatcgctcctttgtagcctattgcaaccgtgtgtatccctgatctcactccagcatcacgctattaaatgactgttcccttagactatgttttatggaagactt

SEQ ID NO: 426208 - DNA, 313 bp, Homo Sapiens
ctccccagattctgcggagcgcaggttggccctttagctaggggagaagggaggacacacagctcaggggacctggcttgatgggggatgctgtggggacaatggctccagggtgtagaaacaagacagtgaggtggcacctgaacacacagtgaggtagtccctgaactatgtggccttcctcgggagtcacacacagtgagtgggagccaggggcatccccaggctgaggggccaggatgctaagcacaagggcagcagagccacggctggtccccatggaaggtgggagcagaggagagccccgtggcag

SEQ ID NO: 426209 - DNA, 381 bp, Homo Sapiens
gggagactatagaatatcctctaagagtgtgggagactctgatgactcactgatattgtcctagcacctagaaggatggaattgtcattagctgacatgagaaataatgtgggtagagcaggattgccaggaaagaggaagagttctgttttgggccacgctgagtttgagttaggcattggagtgtagcttctgagtagactgctggttattgctggcaagggagaggacaatgctggaaatatgcatatggtatttatcaaaatagagatgatatttgaaggtgtgaaactaaggcatgatcaccaaaggagtgagtcctgataaagtagagaggctgaagggccaagtcctgggaagtgccaatattaagaatttaga

SEQ ID NO: 426210 - DNA, 284 bp, Homo Sapiens
ctgtaggaggccaaactggacaacgagaggaatggctgcagggaaggcctgctaggatagaaagcaacacgtagcacacactggggatgaatgagacagagtggccgattgtccatatttcctgacgccagcctggacttgggaacacgaagccatgatcgtgagtgagactatgccggctcactcagtagcctgcctgggaggctgtggcatctcctataaattaaaccttgtgctttctaccctggcaggcgcttccctgcagccattcctctcattgtcca

SEQ ID NO: 426211 - DNA, 393 bp, Homo Sapiens
tcgccaggacgcggccactgtctggatgtagagagagggacggccacaatgggtcactgctgagtctggacaggcagggaagccatcacagaggggtgaggggagtttcgttgctgtctttggttgagagcacacgcagcacccccagatcaaggtgacctgtgggcaggaatgagtccatcttggcctggaacccgggcgatgggtgccctgaatgtttctcccgttggctagagccgattcctccccacccctcgccatgccacacggtcgcttccttgggaggtgttagcaagaaaagcagaagaaagcgccccaggcatgttgtgggaggagccccacccagtggggtgggaagacatcctccgtggctgccccaggagcttaggaact

SEQ ID NO: 426212 - DNA, 435 bp, Homo Sapiens
aatgacagatacccctatcgcttaactgaaaacccatggacttgtgattcaaacccagatttgatcatgctcttgaaaggctacagagccttcgagcttatgcatcacaccctgaggcataaacactaaggagtgtacatgctcacaattctcactctcaagctcctgaacacatgtgcagtccccttctgcacacacacatacaggctggcccaggcatggggggctcagccacttggagggctcagcaaatccggaacatttgcatatccagatggccaagccttgaatttcaaagatttccccatgaagaggcagctgacttccggttggtggccctggacgctcacacctgttgggctggaagactgaggagaccagggccccataatagaagataaacttgaaacagacaagaacatttccaggccctat

SEQ ID NO: 426213 - DNA, 343 bp, Homo Sapiens
tagaacagatcctcagagaaaggcagagatgagagttcacgtggccgcagaggaacagaggaggcacttccaatggccgaggacctgagatatgctttgttgctctctgacactgctccggctccatgcgactggctgttatgtttattgggacaagtacccttttgatgaaggaaaaggtgcattgatgaatttatagctatggcgacgtactgacatagttactttatgtcaacatagatgtaagtatttatttcaaagtacacaaaggaagaaattgcgtgtgggcgcaatgacgagggcagcgtccatttcatgctcatttcattccaccactgccacg

SEQ ID NO: 426214 - DNA, 218 bp, Homo Sapiens
cgagctcggtaccctgcctgtaggaggcgtgagcgaggatgctggaaaggaggaagcagccggaatgtatagggcctttgtggccatgccaaggcgcgtcagggaatatctgagcgtcttaaataggtcagagggcaattctgaaaacaaactccttctacctgctgtgtaggcaatgagttgtcattgttagatagaggataagatgaacccaatta

SEQ ID NO: 426215 - DNA, 132 bp, Homo Sapiens
tctgtaggaggcgaactcgtcaagcatggaactggcgagtgagaccaaatcatactctttgtttcttgaatgggtctccctggtcagcatgacctgtccttttaaccactgtaccatatttggtttttccca

SEQ ID NO: 426216 - DNA, 456 bp, Homo Sapiens
tgctttctgagttctcagagatagacaccctctagtcctttgctcatcccatccctgtggctgccttgggtacaacctacaccacctaaaagtattaaccttaaaaggagaaaaacagttagtattaggaataggaggatttgcttttccaggtgcaaattataggtacagcatcttactcttattaactgaaatgaaaggcactgcggatgaacagaactgttttaccagtgagtaaaaggactccctttcatagagtgtttaaagtgtccgaataaggtaaagcttcactaccatttcttaaccaactgtctcagatttttcccattcactccattgtgcttcttatacattactttctatgaagtacacttttatcctctggtttctttcattctaagcttaagttgctactacagagaacaatctaggaaaatctccctcttggaaaatgtc

SEQ ID NO: 426217 - DNA, 450 bp, Homo Sapiens
ttccctcgagtctcgaggaggcccccacaactccaattcacctaggtcctgtcatctatcatctctaattcttcacccccaaaatgatggtcccattacttgccacagtctcccacctcttcctaacccttaagcctttcctctggttctctaaaggaagagctttatctcaattttattcccaaactgacttcactaaacgtgagctctcctgaggatactacttcccatctctttcaagtgaaagtattttcctgtcataccctagaccctaagagcaggacatgagtccccttcttcctcttccaacactacttcaaacaagttctcaatcctcatcccaaaactgtaactataggagcttaagacaccaccgtcctcgtcgctatattctagtgatttctgttcactccctctcattcagaggtcactctctctcatcccccatgc

SEQ ID NO: 426218 - DNA, 355 bp, Homo Sapiens
ttcctgaaagagctggatggtcaataaaactaaatgatactagaggtaaagaaaggaagattggactgctgggtgtgaaactaggaagcctgttaatctgatggagaggcctcaacagggtgccagaggaagaagtcacgccaaggttgattaagaaacaactcaactagctaacaactcactgcacgtacccctaccttgattaagaaacaactcaagctagcagctcacgccagcagctcacgccaaaaatctaaatatcatcgattcctctcttccacttactgccacctcaactcatccaatccatcagttggtcctgttgtttttgtctccaaaatataacatttctatc

SEQ ID NO: 426219 - DNA, 268 bp, Homo Sapiens
gtaccctcgaagtctcgaggaggctgtgtcctgaaagggtggattcaataaactccgatagcccgaagtacttcttattttcatgatatgagtccactccattactgcaggaggcagtccagaggatctcgttgctgtgactgatgagggggtgctggctctgcagtgcatacggacagcaggtcacgtgaagcgtcacattgctggcttcctccttcacctgcctgcagtagagcaatcgacacaccaatctcaccgacggcacact

SEQ ID NO: 426220 - DNA, 352 bp, Homo Sapiens
gcctgcagctcctttgaacggaggaagtcacgtcgcctggtttggaactgaagacaaggaaagagcgagccgtcgagggtgagcacccggagaccatgaccaggatgaccgcaggccctgacagcaaaacatcatcgttgtggtaaaaaagatgcccctcaggagagctgtttcctccctggaatttgggtcgaatagaaaatatttcaccagcgcccacctgagcatttggcaactcagtccccgaccacaaactccatcatcttagaagagaagtccaggcacccaggggctgaacggcagtgcgggctttgacaccacacgagccgccagagaggcggcacactcagcc

SEQ ID NO: 426221 - DNA, 128 bp, Homo Sapiens
ttcccagactgtagcaggctaggagaagcaggagttggatggataacttaggcactaaatggaagctagtttaatattttaaagtcacccagaagataaaacaagtagttgcaagaaagacatttgag

SEQ ID NO: 426222 - DNA, 400 bp, Homo Sapiens
tggatggcttactttcatttttcaagtagaaattgtgtgcaaagatcacaactgctctcaagaagaaacaaacaacgcacaggaagtcatcttaacattattctcttttcttcaccttttaaatctcttttgctctgccttctaactcttcctttcaccacccaattcctcttgtaacacgtaaaatgactacaaagtcatacactgttcaaaccacaaataagaaacaatccttttcttttatagctatcaatagaatggatgtattctcaatcatattttccaggcttagcctctcccttttttctttctcttctgtgtcacacagtactgatatccagatttccaacaaattcccagtgtactttctttgatacacagctgagtatgctcaaataat

SEQ ID NO: 426223 - DNA, 142 bp, Homo Sapiens
cacactcaaataccgacccaagaaagaaaagcttccttgccactttccttttctcattagctgatacttctcctcttacccaccataatttatcctttaaagtttccagctttatgcaggatcaatagagtcttacttccaa

SEQ ID NO: 426224 - DNA, 403 bp, Homo Sapiens
agagtcatgcagccctcatctgcattggggcagagcgactgtaaaagactgttttctcagtggcgaaagttcaaatttagcggccatgaggaagccagacctcatagacacctgtgcctccattgttgacaccgcggcccctatgcgggaggctgcgagcttccaggccctacttgcagaagcagtcatgcagagcttggtgatttgataacatcagccaccttctgtcttctgtctaatcacggtacaaatgattttcctacagggaaacagatctcatttcttccccgatcgatgtgagaagcagcccgcctagtgaccgcaccgtcctctgcacttacacagtgaagcctgtgtctctctccgagaagtgtcacgtgtgtcgtgagaatcacgggaaatg

SEQ ID NO: 426225 - DNA, 388 bp, Homo Sapiens
ccaacacattcctgccgcagacagcacggagacatgtcctccctgataggtcccttccgagaaggcggccggggcggcatctccacccttccccaccgcagtgcctgctggggccaggagcaagatccacgcaaagtgcggcagagatggcgaatgaaggggagagaagcatcgggcagaacagtggctgcgagcctggctgaccgtggaattccacaggagactgaacacagcctcctgggcctgcttggggtttccgactcagtgggtcttggctgggggcagctttgctgtctgccccaggaggccatggcccttgtttggtacccacttcctaggagtcatgagagccgagctggctctgcctgattggtaagaacaaagggga

SEQ ID NO: 426226 - DNA, 299 bp, Homo Sapiens
acgcagccggagaaggcctagaggtacagacaagcttgacaggttctatagaccgagggaggccggagcgcaggagagcgttgattgtgtgatgagggcagcacaaggacccgagcaccttgaccacaatgggatctgctgacggcgtataaagaaagaaagcagtgacgggaacagtaatatgatcagtcttgtgatttagaaagattgctttgtgtacttttctacaaaaaaggattgattgagcgactcctagatgggttttgtgtcacgctaacactgtacaaataaatgaccta

SEQ ID NO: 426227 - DNA, 150 bp, Homo Sapiens
aaacaactgtgctgccagacagtatagtcattgagaatatggcccctggacgcccaacttcaagcacccctcctcctgtctgcccttcccctcaagacagaaagcagaagagcagagggtctggcctagtttaggcctagcactctgcag

SEQ ID NO: 426228 - DNA, 352 bp, Homo Sapiens
tgagattcaaacccacgtctttcccattctactttttgtgcctttctgttttaatttgcttcttggtattcctgtgtattattaatagtctgaagcttggaaatagatgcaatagtcattagagtgaagaaaatacagtgccgtgctctctgaaggataacaaggacatttttgttgtaattactattttgatttttcttttaagaatgttgccgaggaaggaaaacagagggaaaaaccagcaaagctcactgtgtctaacttttgccacatgcatggacctaatttcttacttgccaagcactagagcctttatttttgagactctgtgagggtggctgagttctgtgtg

SEQ ID NO: 426229 - DNA, 127 bp, Homo Sapiens
  misc_feature (57)..(71): n is a, c, g, or t
tcagtgtcatcgagcctggcttggtcccagatcacagagggttaaaccagagtgacnnnnnnnnnnnnnnnaacaaaaatgggaacagggctttcgggatacaaggtctccttacaatttttctatc

SEQ ID NO: 426230 - DNA, 294 bp, Homo Sapiens
taagggtcatggagccggagaagatgcctggatggatgcccatgccgaagacactggatgggggaaataggagtcagcacgcaagacagggaagctacaggagaacctgaaaaaacaccataatgggagtcaaacaagaaaccaaaccaaggccaacccaactcagggtcagagcccaagaaggggttacagacagacttcaagccaagttcttcctgcaggttcagagcttggtgcatggccagggtcttggactaggggtcataatatgcttatctccataggttattttag

SEQ ID NO: 426231 - DNA, 348 bp, Homo Sapiens
  misc_feature (266)..(276): n is a, c, g, or t
catgctggcagcacagagtctcagctgcctccccagttacgggtattcagctgcctgctcccgcacccagcaacctctgccacccgttacctgcagcaggggcccggatgcaggcaggagggtcgggggcaggtgtgcccacacctgtgaggtctgcactcaccctgaaagtatcttgtgtccagggagtgagacattaaatagcaaacaaaaaacatcatgacagatggaaagagattgcaaaggaaaggaaaaaacttttgtgnnnnnnnnnnnactgctttttgaacaagggaacttgcatcttcatttggcactgggccccacaaattttgtagctggccctgt

SEQ ID NO: 426232 - DNA, 424 bp, Homo Sapiens
ctcccagctttcacattgctcccttcaatctaggctcaacatggaagccagagagagcttcttacatgtaagtcagttcacatggctcctgtgttcacaaggtgtagtggctttcctctctctcacagtaaaagcctgcgaggccacatctacacagtggcctcacgggctttcgctcatctggtctgtgtgacatctctgacctcatcttttcttttactcactgtgattcacctgctccagccgcacttgtccttttgatgctctcaccccaggactttttttatttgctgttctctctgcctggagccttttcctcccacagggtctgcatcgcttagtccctcacctccttccagtctttgttcaaatgtcacttctctagtaaatgcttccctggtcactctgttttaaattgcagccc

SEQ ID NO: 426233 - DNA, 269 bp, Homo Sapiens
agtgactgagctgagcctgaaaaggaaaaaggtcagtttgctccatcctgccacatgactgcgagcaatggaaaatcaatcccacgggagagcagacttcaccccgcaggtggtaaactcccccagagtgctggtggcaccgagccacattccaatcctcaagcctccagctctcccaacaccaggccccgcagctgtcgggcctaaggactcgatagaggggactcctaacttctatctgtgggcctagtaagacttatgaagagaag

SEQ ID NO: 426234 - DNA, 163 bp, Homo Sapiens
catggagcctgtgcattccagagccagtgcactgcctctccaagaatgggaactgagcctggagctgctcaggattgaagctctctgtgcagagggcaagtcctcagcaaccttagtgccctggttattatgtccaagagacaaagaggacagccagctggcc

SEQ ID NO: 426235 - DNA, 265 bp, Homo Sapiens
cagagtcatggagcctactaataacatgaaacgggcagacctttgttggagcccatgacgaaggtgactgtcccactgcacaatctctggaccccagaatctctggaccaggatatttagtaaggccttgctgggaaacacacatacacctctatgtgcgctgtcatcaaatgaggtgacgcctatattacatctagcccagtgctgcagcatattaggtggtccataatgcacagtatgccagctgaccggctaccgagctcga

SEQ ID NO: 426236 - DNA, 370 bp, Homo Sapiens
ctagaggattcccgggcagagtcatggagcccctttgactccaacttgttagccgcagagatgccagttgctttaaaatcatgctaacctcttcctcctttctacaaccccaaggagcgtctctcgaaggagcctcaaagctccatttttcgctgcaaggggaatatcttttaactttgagggaggaagaatgaactaagctatttattctctttaattccataacctttgccaaggagaaatgatatactcattatctcaggagttcagctgggcactgtcttgccttgaaaaatcgctggctcagctcctgtcagataaagactttggcggactcaggagttaatgagattaacggcttttatagtac

SEQ ID NO: 426237 - DNA, 424 bp, Homo Sapiens
cgtgtcatggagacacagagaggggtatttgtctcaagcacacagctattaagtggaggggccactgggatttgaacttagatcaatagaccccagagcctgtgtgcttaactaaggaccctaaaagactattccagcctggtgagctgagttcctgtttgagaggagtctccgcagcctgagtctggggggttttcagcacctgtgggcgatgggtgcccccggggaggtggacacgctgcaaggtggaggttgtgtgccacgtttccaggacaccatatggccccaccctggtccaggtgctgctggagcaggacctgtgctgtcactgctctctgacactgctccactgtctcctccaaaagctcccaccctggtgggctctgcacccacagatttgatgaaactcacaggagtcaagcat

SEQ ID NO: 426238 - DNA, 344 bp, Homo Sapiens
cgccagagccaaccttggagaccttgcccagatggttccttcgccgagccagggctcgatggagaaactatgtattctgagctgtttatttaagcacaggggggttcctaatggagccatcagaccttgctcattggctaatagtttaattgggcccatctggaggacgctgtgccgagaactgtccctgctctgatattggcagggaggcaatttgtcattctgtggccagcgactggcactcccatccccaaagccacacagaagccgacccgactgtcacacgaggggagagcgtaacatctgaagcgatgtgtgttcactcttgcacagaaggagaaacg

SEQ ID NO: 426239 - DNA, 353 bp, Homo Sapiens
catctgtttaattcatgcagataaaatccaattagttcccctgattagctgcgtcttcagatttgctggcacataaaaccttgacctaaaagctcatttcctgcagatgtttcagatcgatgtacggactctgcgctttctcttaatgcattcatgaatttgtcagaacccggcccccgaatccatgatttaattaagctccgttccgtcagccagggctcaccaagatcctcatttgctttcttcctctcaaagcccattaataagagaaaaataggacagaaagctccacagaggcgggaagaagggctccctttcctggcccactggcgcctggccctacacactcggaa

SEQ ID NO: 426240 - DNA, 366 bp, Homo Sapiens
agttcttggcaatgatgagaggaggtccctgagactaccctgcactgttggggtgatgacggtgagccctgccaccggatgcagtgctgggcccaggaggtagtgccctgggggcagcatgagactcccaggctcctggtgcccaaaccacaggaaacgcccagagagccctggggtggcagcacagcagcggtcatctgagcatcccagtcatctgtgcgtttgagtcatctgtggatctgagtcgtccgtgcatccatgtcatctgggtgtccgtgcatctgagtcgtctgaggatctgagtcatccgtgcgtacacgtcgtccgtgcgtacaggtcatctgtgcgtacacgtcgtccatgcat

SEQ ID NO: 426241 - DNA, 488 bp, Homo Sapiens
gtcatggagcccagaactggatatgggcatatctgagaaatcagacacttatgagtaggagtcacctctctgggtctgagtcagcaggcacctcccgcctctgacaggcctaaccacttatcatgagccaggcatgcactcagggtagcctaaatgctaagtactgccagcaatgctcagactcttagccagccgtggaggtcttctctggggccacccaactatcctttcagacctcattctgatatctctgcctgaaaaagcacgcggggcagcaatagtccccaatcactgtcccttttaaggagtaaggaggacagggcaggggagtgggctgtcctagtccctttcaggggctatactccaagccacaagtctggtttctattacaattttccaaattgatatgtgatcctggtgacaacagtcactctctgcactggagtgtggtagcaccatctgtaaaatgggccactggcctttctttt

SEQ ID NO: 426242 - DNA, 340 bp, Homo Sapiens
actagatctcaagaacaacgacatgctgctggttagactaaggagggagactttgttttaaaaagaccaccactgaatgaagtgaacaagattgtagccagcaagtctgaagccacggagactggagccagggagtctgatttggctgcttcaacagctcaggccagagctagtgacagcatgaattaggacagtgactgggagagtgacagtagcgtttgagagaagtgagtatgttcaaggagtatataaggagattgggtgcagtggaatgcctccatttttggcttgacaagtgggtgtcattcagcaaagtaggcaatgctgtaagaggattgga

SEQ ID NO: 426243 - DNA, 414 bp, Homo Sapiens
  misc_feature (323)..(323): n is a, c, g, or t
gcagagtgacatggagccattgtagtcaacaactgttctgggaaccaacagccttgtgaagaatgcggctgtccctatctcatagatgtggaaataggtcctaggatctgatgcaagtcttttgatagaccaactctgatcaataaagctttccccttagttcatcatgcgagggggagggcatgggtgcagacccctccatctgcaggattgggtttcatggagtggcctgggctctgggccaccccctcttctgaccaccattactctgctaccaagtccgtcccaaggattctatggcccgggctgtcgtcacacactgngtaccggcatttctggtctctcttccagagtccctccaatgtgcattcctcagtttatgtaataacccttaccctctcacagtgctttaca

SEQ ID NO: 426244 - DNA, 374 bp, Homo Sapiens
ctctttctgcggctgtttcggagtgaattaagtgagctggtatttgtgagatctctgagaaaaatgctggacacatacaaagtgctatttaggtcttggctctgtaaacaaaatgatcttaaaagctcatgcataccagcccttgactttgaatataagtagctgtgttctaagagggtggaaaatacttgcaattactgaccaatttaatgactgacttttccccaccccctaaatttaagaaagctggcactttccaggaatgactataatttattctggctctgagacccctgagacaccatgagggtctcacaagtgtgtctgagcagcctaccggcaaaggcagttacgggtagcggttaaatgcccag

SEQ ID NO: 426245 - DNA, 453 bp, Homo Sapiens
  misc_feature (361)..(361): n is a, c, g, or t
  misc_feature (423)..(423): n is a, c, g, or t
  misc_feature (441)..(441): n is a, c, g, or t
agctcgttctgcggctggttgcgcgatctttgcaatggcacgctggacataagtcgcttggcagtgtataagtgataaggcgctgttccagtgtagacgggcagaattgtcagacctttcctatctatcaagtccacagagaaggcaactcactctcctttgtaggggacatctataaataattgaagttgacttacacaaatgaagacattttcatgttttgcctattgttgggaggcttcccagctgaatagaagtaatctctaaacaccaaagctgttacaactattgttatgtcaagaagactatttgagagcctttgttcaataatagtgacaggagccaaccacatccgggccanattataaaggaaatctacaaagtcttttcaatgcccacatctcccagaatcaggagggcagnggaatggcagaacagaantctggacaatac

SEQ ID NO: 426246 - DNA, 313 bp, Homo Sapiens
gataaggctacatctgaaaaatgatggcaaagccagtgcctgagatggaagagtccagtccatggctactgtgatgattctgaagagcaagaaccttggtctaggtcccactgagacctcatcctgttctagacttctttggacctgaatgatgaccttacagagagcaaaataccaagaattcggaagcaggctatgtgagcactcaaaagaagggaattagggagcatgggcaatccccaactctgaagtcaatttttcaagaaaacagggaatgctactttatatcagcctgagttgccattaagggtag

SEQ ID NO: 426247 - DNA, 324 bp, Homo Sapiens
agccttttcacaaatacactgttcccaatatgcaaaggggatcatttgaagaggggaaaaggtggaaccggagtaagtccaattttcccaaagaaacgctggtcactggcggggcagtttcgccctagccaggccaacgcgaaaggagaggggctgcccaaaagtacccgctttcgccatggctggaaagcagggctcacagtttccgctctccctttccaaggcatcaaattccttttaccggagaggcttcaccctagagggaaggagccggcagatgaacctgctttgaagcccagccgtttgccatgcccaggtggatcc

SEQ ID NO: 426248 - DNA, 171 bp, Homo Sapiens
taccattttacatttccactttcagtgtgtgaaggttccaatttctctacctccttgccaatcttgtttctgattacagccatcctagtgttaagtggtggtgttcttggttttctagctggattctatgacgtggcctttgggtaggatagggtggaggcagccgcagaa

SEQ ID NO: 426249 - DNA, 184 bp, Homo Sapiens
ctacgagttgaggggagtgaggcctgcctgtagacctcttgattgccctgctctgcaatagaatttgctagacttccacgctgtttgactctgtctctctgctttttggttctcaggctgaaattgtccatcctagaccttcacaacctataggacaccctccaacaccacttccctgcacagc

SEQ ID NO: 426250 - DNA, 306 bp, Homo Sapiens
aattccagctcggtactcctctttctgcggctggaggttggccagcactggaagcaggcccaagacacaccttctggacgtcggcctgcctcatattccagctctggccttgccatccctgcccaggctctggttctagcttctgtgcttccacgtcggctctcccgcacactgccagagtgacctccataaaataacttgcttttcgcctacaaagtgtagttcaaactcctcacctggcaatgaggcctttccttccaaggcctttcagaatttgcatctttaccctcgcctctccttgccaga

SEQ ID NO: 426251 - DNA, 245 bp, Homo Sapiens
gaattccagctcggtatccctgctaggaatgatagagtgaggtgtgtaaccatttctaagcagatccaggtgatcctaaaggcgctatcggtgctgagatccaccactctaatccctgtggctatgtggaactagcactcaccttttctgtgtttgctctccccgtccttgagattctggtggtgacacgggcaccaggaacacttccctggactgactgatgagatcagggtgcaggcatctca

SEQ ID NO: 426252 - DNA, 224 bp, Homo Sapiens
ctctttctgcggctgttccctaacaccacaattgtgcgtctgtatgactcatccaagctccagagagtccagcgtctgggacctacactcagggaggggccacgttccttttctcctctccactgcacaggaaaacagaaaggtgaatgtgggagcatgcatgttagcgctgacagctaatgtttaaatggaattcctagccacattaaatatattcaacgtag

SEQ ID NO: 426253 - DNA, 475 bp, Homo Sapiens
gtctggcagggcctcagctggtgcctggcaccgtcgcttgccctggcctaggtgctcgctggactgctccttcctagtgccaggtccacttgcagctcctgggagctgccccgggagctcagccctgggtgcccctggctctcccagctcagtgtttctctatgatcaatcagggcatcgccaggaaggggcagggctgccacctccctggtccacctggaccgaaagctgggagaggctgccacataccacctgggtaggtgcgccacagagaccctgtctcaccctgggccaggactacagcctgtgtttagtctgcggtgggcgcgatggggggctttgctgcttcactgcaccccacatgagccctgttgggagggctgccagatgcagtcggacgcagaggcgcgggtacacattgctccaccagccagacccagagcttcctagtggggaccagtctggagcttgaaat

SEQ ID NO: 426254 - DNA, 144 bp, Homo Sapiens
ggttgtttccatatgggactctttctatgcaaagacttatatttcaatgattctgagttttactttggctcatgatatgaaattggtgcatttcataggtatgtgagtatctgagaggtgaatgagtgttcttagacacttggg

SEQ ID NO: 426255 - DNA, 153 bp, Homo Sapiens
  misc_feature (21)..(21): n is a, c, g, or t
ccagaaccctctgcggctggnctaaatggggtttctaaaaattgccaaaccaagttttttattattagtgatgtgctttcctttcagctgtaactaaaagaagatatcggttacttcttgaactttacagtgactttgcatttgtgttagttt

SEQ ID NO: 426256 - DNA, 451 bp, Homo Sapiens
gaactctttccgcgtgtgtatatctctaaccttatttatctaacccatcaggttttttgtgagttctctaacatttttctgatgaactcctgatctgcttaaattacagctcatttatgatactggtaagtaagaatcctgactaacagagtggttgcaaactagggaaaacgtgttagaccaaaacctaaaacatggtacagtagagggatggagtattctgaaaggaccagacactgtgacattctttccttcaggggagatgactcaccctgaggctgtacaaagggcaacccagatggactcactagcaggtcatagcaggatccatgcctgtgtctttggaatcctctaaaattcagtcatgaatttcagttagcatgtgaaagctcaggcccaagaattttagctcttggagacaaatgtcttcattagaagagtaggagaatca

SEQ ID NO: 426257 - DNA, 311 bp, Homo Sapiens
agctcggacttctttctgcggctgggctctgcggctgaggacttttctcgggttttcagaggaacctactcaaaacaattcaagaagcacttcctttgcttactgagatatggctttggcaggaaggggcagggagggagtgtcagggcagtgaatgctgtctgcattcccagccttcttacagaagaggactgactcgactctgcgaccaggcttagaacccacaggcctaaatttctgtgttattttagctctgtagtccgtgacccgagattgtggaaggcccatgagcttcctgtaagcagccgcag

SEQ ID NO: 426258 - DNA, 296 bp, Homo Sapiens
gatctgttatgctgtttgttgccatctactgttgtcaaattctacctacccttcagggtccaactgaaatgccacattaccaggaaaggtttttctcattgtccctgccatacttcatttctcttctgcccttctgtagctcaggaccctctttaggtgtcactcccattagattgtaagtttcctaacaagacgcacgtcatcgtctccaaatcctttgggtcagcacagcctcttttatattaccagtctaagcccctttgtgtgacatttaaagtccgcctggactgactgtt

SEQ ID NO: 426259 - DNA, 317 bp, Homo Sapiens
gcttgtttattgttcttagggctggatattcgtatgttctgataagaactcaatcggctcagaaatgtcatttcttagattctactaaacgtttgtgtaggacctgtttaatgaaaacacaggttccattcagccatataaaatgacacatcacacaccacaaaaatagcccccttgttccaaaaacacagacattttacatttctacctgaagtgtacagacgctgactgaagctctgtgttgcagtgatgcgtgctgctaggattgtggctctgttttgcatttgctagccaggcttcggctttccagtcaggta

SEQ ID NO: 426260 - DNA, 259 bp, Homo Sapiens
gccacagagttttacatggacgggtctctgagtggagtttattaggaactctaggagagacaggacataggtcttttcaattttctttagtagagctcacatgagactgcttatactgagtgtgtcacagagaacactgagagagaggtatacgggggataagcagcacgctctggtgtagctatgtctcgtaagatggctgtttatagtgatatctcccaatagcgctccattgcacagtctagacacatgtgtccgt

SEQ ID NO: 426261 - DNA, 110 bp, Homo Sapiens
aaagtggagcagccactctggatggccatgaggtgttttcttaacaaagctaaacaggtcttaacacacagtccagtagctgcgccccttgctgcagccacaccacaacc

SEQ ID NO: 426262 - DNA, 249 bp, Homo Sapiens
  misc_feature (133)..(147): n is a, c, g, or t
gaaggaggctaggtgaggaagtgcatggaaagagtggttctgagtgaggtccccgaggcaagcatgggtcagatcaggcggggcctttggggctaagtaaagaagttgggaaggtatgtctagttatgttacnnnnnnnnnnnnnnnggaaagggggttttcaatttttggtggcaaagcctggaggcaagggggggaatttggtttaacaaaaacttcggtttacaggtttaaagggtttctcttgcc

SEQ ID NO: 426263 - DNA, 451 bp, Homo Sapiens
tatagggagtagggagcagttacttgaacctggaggtatgaattctttatattagtcagagttcaccacagaaacagagacaactggatgtgtgtgcacacacgtagaaaaagagaaagacttattttggctcacatgattgcagaggcttggtaagtccaaaatctgcagggtagttctgtaggccagagaaccagggaagagtttcagtttgattttaaagatagtctgtggcagaattccctcttcctagaaggtcagtctttttctatgaagacattcagttgattggttgaggcccacccacataacggagggtgatctgctttactcaaagtctacaagtctactggtttaaatgttaatgtcgtctaaaaaatacctgcatagaaacatctagaataatgtttggccaaatatctgggtactgggggcctagccaatttgacac

SEQ ID NO: 426264 - DNA, 119 bp, Homo Sapiens
ggcgaccttagcaagtttcttaacatggctctgcctcatctcatctcatctatggcatatgaattatactactcaccctacgtaatcttaaaaaattgcactaaaatgagagcactctt

SEQ ID NO: 426265 - DNA, 127 bp, Homo Sapiens
aaacatactctaagaacaatcctttcttgtgatagctattactcaaatgacaaaagctgggggaaatgccttgtaaatatcagaaaaaaacttctcctcctaagtagtttaaaaatatgcagatagg

SEQ ID NO: 426266 - DNA, 325 bp, Homo Sapiens
tgaaaggtccattccttgagttatgaggaaaggaacctatagattagagactgggaatatgatgggatcaactgttaagaaatttgggagtcctcagaacctgtgggtacagtaaaaagaaaacgactttagggcagagacagtttaatgtagctaaagaggcagttttcgatttatgagtgaacaactctgcttctgggtaatgtagtaggaaggaccggataagcctccaggtgggagttcaggtgggtacaaggcagttttctcggtcacatcccattcattgaattattcttctttatctgacacagaaagagctttactg

SEQ ID NO: 426267 - DNA, 334 bp, Homo Sapiens
  misc_feature (290)..(290): n is a, c, g, or t
attagagactatttaagaagtaataagaagccatctagaaggcaggaaataaaacaccaagttcctgtttcccacgactttactcaaacccctagaaaacacttcctcccaccttgttcaagtgagctcaaattcttgggaaaacaacaagtgggtataggaactccagggctacatctatctccttcttcagcagcctggcacctctccatggctttaatctctctctgcagctggtaatcgacatgttcatagcctccttatttttcagtctcactagctctgccggngtgtttgtatgtggtgcttcctatctcagttgagataaaagacg

SEQ ID NO: 426268 - DNA, 178 bp, Homo Sapiens
aaaggaatcctcacacacccttcctgtactcagcatccatctctagccccgctctcagtggagggtgaacaaggtttttgtgtgtcctcgatgtcccaggggaggatgggggacctgggaatcacttggtgctcgtgcaaggaggaagccggcaatgagtttctgctcaagtccatgc

SEQ ID NO: 426269 - DNA, 412 bp, Homo Sapiens
ggggttgaggactggccttttctagggctaagcgtagtatactctaaaacagggtaataagcaaggggataaatgattggtgtttccagtacatggctcaaaataacatgttaattataaagttaaatagcctaataagcctttaggtaaaagccaaatattagaaagccatctaaatttcttaaagtcttgtgtttccaacatatttcgatttttaatagaggttcttaaaataaactccacatagcactattattttattttgtcagaaactattagcatgccaaaccatttttcactcttaaaataaaaattctgactaacatctcaacattcttctttacagattgtgaatctcctgactattattggtaattcaatgggcctagttaatgcttacagccgcagaaag

SEQ ID NO: 426270 - DNA, 331 bp, Homo Sapiens
gctgtcatggaggcccagcctcagcgaggaaacgagacacctgaaacagagttttaagtctataaactcactgaaactaaaatagcagcacttttaggtgatgggctatatcttccactagaggtgagaaagaagtagaagaatatggttcatccatggataatggcagacgagagttgctgcgcaaaaatgcacagccgtgatctttgcaggctcatgagatatgttgcttccaggacatgaaatatcatgccttgagtcaacaagctcccagcatatggtgaggtgaaggccgagggagactgtactcgaaccagccaagaggaacggg

SEQ ID NO: 426271 - DNA, 412 bp, Homo Sapiens
atccgagctctgtctgcggctgagaacgcgaggttctgaaaaaccttagcaatagatggtagacaataacaaaacagttgacaacacacctacacggctattggttcttctaagtgtgaccagatgctgataagctgcattaatattcaaacaaaatgggcagaaaagcaggctactgaacatgcaaatcagaaaagggctttaactggtggttttatgtgcagctctgccctagactatttatgtgactctgaagtcccctaattctcgaatgtttctattccattacatgggaaacaggatccatacaacaacaaatatctgagtacctttgtgccaaacacaattctaaatggttgattaaacatattataataaattatatggtatgttagcaggtgataaatactat

SEQ ID NO: 426272 - DNA, 290 bp, Homo Sapiens
aatgagatgatgtgtacaaagcccagatgctcagcctgtgagctgcaatggtggtgctgggggtataggggacttgaagctacttgtgtcatgtcctcttgcattccccattggattcagaggttggggccagatcctggggtgcctcagatgccaggttaaaggtttggaccctaatccagtggccttggagaaggccagggatactttagcctgggggtggttgcagtgatccttacgtgataaaatgcttgttaaatctaccagctctgggcttcctccctcggagg

SEQ ID NO: 426273 - DNA, 243 bp, Homo Sapiens
ctgcacacctggacaacctggttctgtaaaccacgtttttccctgttttgctattgccaaccagagtgcaggttctgccactgagtcctcctacagcaacagcagaccacagccgcccacctccagacagcccccggtctcactggccacagacttgctccttagaggcaaggccactggcaggctctcagttcctctacggaatgtgaaacgtgcctcatctccccagccgcagaaagaggt

SEQ ID NO: 426274 - DNA, 393 bp, Homo Sapiens
  misc_feature (58)..(103): n is a, c, g, or t
  misc_feature (151)..(191): n is a, c, g, or t
gcgagaaccttgtggggctgtcttagcctaacccgggagcaagtccacacggcgtgtnnnnnnnnnnnnnnnnnnnnnnnnnnnnnnnnnnnnnnnnnnnnnngtgaggtgctcacatctccacagccgcgggcgcgtatatatctctgtnnnnnnnnnnnnnnnnnnnnnnnnnnnnnnnnnnnnnnnnntccgagccatatggagcacacgactctcaggcacgtgcacccacacatatcacacataggcagtctcttgtacagagacacagtcatatcttgtgtacacacagatataggatttcgctgtcgcacacatatagagacttgcactctcgagacacagcgaaaacgcaaaatctcacatactctctctctaacatctcacagt

SEQ ID NO: 426275 - DNA, 459 bp, Homo Sapiens
ccttctttcaagaagcagctcttaaaattggacttcatgaattcactaacaacttgtcatggattaggctattccattgctttcctttagcaatttcctccagcagcttcacttcctgcaagagcaaagttcctgcccagcacagggcttcagactcagcatcgatgcctgccttccaccggcaccctgagccacagcaccctgtccattcctcctggactcccctcctgccctctgcattgaagaaagtcctgacctcattctgggaccctacagaagaccctggcattctccaccctggccacacttggaatttcctgggggagctttgtaaaaaatgcagctgccctggcctcactgtagaacttggagccaatcatgagagcagggtccaagcaggaggctctcgggaacctcccctgtgactctgaggcacagccctgctgtgcaacagctcag

SEQ ID NO: 426276 - DNA, 268 bp, Homo Sapiens
gagctctttctccggctgatagtaactttttcccagatttcatgatagactgttaaagatgtaacttcttcatctttatgctgcttgccattagcattaactgatattctgattcttctgggggctgtaataattccatggtcatgggaatatttttaagctcctttggcaaatccaatgctccagctgtattcttctgcaccatcttgtccatctacttggcaatgggaaccaccttgtccaatgtggctctggcaggtcttcccca

SEQ ID NO: 426277 - DNA, 402 bp, Homo Sapiens
taagcatgccttttctttctctttgattgtggtcagtgcatggaatgtgccagggccgctgcggagcaagcacgtggccccgaataacccctccctgccaacggaattctgcagagaacatgtaagggctgtgctgtttcactcctgctttgggctctcagggtttgtttccgcgatcatccaaacctcatcctccttctcttgccccagataatttattggaagtctggagagggacttgagttctctcaactctccaaccagactgttgctgtgggcgaggccatgtcgggtgagctccaaggagagcagttggaatgacagagaggaacggtttcaggctgagaaatgtgaaatataaattcaaaccaaacttggcacctgtttggagagcttcagctg

SEQ ID NO: 426278 - DNA, 403 bp, Homo Sapiens
gatacatgagcaaagacacatttgttatatcctatcttgatgtttttttctggggtctgaacctttgctgaaatatttattggtaacaaccaacagccaagaaaggtatgaatgaattttattctctaatcttctggtatctatagtcatgactctgcattgaaaataagactgggccaaatccaaaagaatgccaaaaccattggccaaaatgttaatcctagggcatgattcatccaccagcgagtgggctattggaagggaggccatttaaaggctactttgtgacaagaaaattgacatgtgtcctttctcctctccctgaacaaaaaagaaggaaaagacattcacacaaaactcatgtccttgtgacagaagacccaaccaaccaggttgtgcaaca

SEQ ID NO: 426279 - DNA, 232 bp, Homo Sapiens
caattctgaagtggctccaacaaggaaaacagagctggtcaggtcatgtgtgaatcgggcaaggcctgcaccctctcccagagtcaagcagctgaatgcaggccccaccatttaccagccattagggatggaatattcttcaaactgcaacacgtcagacacaactggggcctgagtattgcttttctgtgagagctagaggtaggaagccattgggagggagatgtcagct

SEQ ID NO: 426280 - DNA, 117 bp, Homo Sapiens
gtggagaagaaacctaacagcatcctgaaacctgattaccagcccttggccgaaaagaacatttccaccctgcccgtgaacttgttgctgtcaacatctggacccttctttatatgt

SEQ ID NO: 426281 - DNA, 166 bp, Homo Sapiens
aatgcatgcataattaatttttctacactcctgggttgaaatttttgtgaacattcttatcttggtttcattttggtttggttacatgaatctgtaaatgatttggctcctttcccttgcttgtttctaaatatcttctgagagcaaaaataaatattctaaatgg

SEQ ID NO: 426282 - DNA, 324 bp, Homo Sapiens
gggaggactttagagaatccccggcgctctccacatggaacttatgcttacactccctaccttcaggatttctttgcacctgttctgaccttctcccctggcaccgtcatccacagccttgaagctatttctttacttactgtaatgggcattctcctatcacagttgattgctgcgcttaagtgcaggctgctgcatgctgaacttcaaggagtcgcaaatggagatgggtttaccgcttaactcgctcattcattgctgttcacattatcggttctcagagactttatggaagcctagcggtcattttctgctgcccatttg

SEQ ID NO: 426283 - DNA, 250 bp, Homo Sapiens
agagctgttcccagtatggcttttctccataggcatactggcccttaagacgggactcagttacacgggcccttcagtcaggactcagttccatgggtgctggcccttaagtcaggactcagttccacgggtgctgtcccttaaggcaggactcagttccacggcggctgttttgatggcgctcttgcctcgcctctgggcctaggtgcccactgagctacactctcctcacataggacatcccttcatc

SEQ ID NO: 426284 - DNA, 194 bp, Homo Sapiens
catttcacagcctcattcctccactgaaactgctcggtccatggtcatcaacaaggtcctatttgtcaagtcctgtgccctttccccagcctccgtgcctttgcatcattagatatggttgacctttccctagaaattcgcccccacacccatggaatcctgagacactccatgctcctgtagccccgcgcctt

SEQ ID NO: 426285 - DNA, 347 bp, Homo Sapiens
tttttgtcactagactgtgcccatcctgagatcgggaaccttgtctatatcatccaaatgtccccactgcctaacacagtatctggcacttagaaggtgctcagtagagctttcggtctgaatcaagttcccagagcttctcatcaaacactgtgcttatgttatcttcaattgtcttagtggttttgatgaaatagggcttctgatcactgtcagacatacagagtcactagttctctcagagttctatatccgaatagagaattaagaagtaacagtaaaagcttccagaatttttcagaagagcatgtacagacagactcatgttgttaggagggaaagaaaaa

SEQ ID NO: 426286 - DNA, 361 bp, Homo Sapiens
  misc_feature (117)..(183): n is a, c, g, or t
acttgctgtaagggcacagccccccttggggagagcccagttcagcaatgggagaagggctgccacggaggacctgcgatgacatggaggtgacatcggaattgcttctccacacgnnnnnnnnnnnnnnnnnnnnnnnnnnnnnnnnnnnnnnnnnnnnnnnnnnnnnnnnnnnnnnnnnnnacaggtcctccctcccacggctgttcctagcgtcacgtgggatcctgtgggtggaccacacccctggagctcagcacaggaagctgctattagaaactgcagaggtgagacggcagtggctgggaaatcctcccagagcgggaccttgcagaatgcataggagctcggcagctaggaa

SEQ ID NO: 426287 - DNA, 111 bp, Homo Sapiens
tttatttctttcctgactgccactttcctcgaatctttcatgtgcacagctcataaagtttctactgcatgttctaggcattcgtgtacctgcctgtctctgtctctatca

SEQ ID NO: 426288 - DNA, 145 bp, Homo Sapiens
tagggtctctccaaaggggttttggttagggggaggcttaaaagtaattgagttatgattcttttaaccaacatgtaagtcaagaggctggccaagagtttgaagagcccgaacctgttagacagtaaaccaattatctttgtga

SEQ ID NO: 426289 - DNA, 171 bp, Homo Sapiens
ccttgcagacaaatgcaaataagaacggaagtgaggagagcccagaaccctgttgaaagctaataaagacttttcccgctgcacctcacaccccagaatctcaagtagtttatcgtagcccactacaggtcttggattacctccatttcaaaacccgcaggttaaccctcc

SEQ ID NO: 426290 - DNA, 309 bp, Homo Sapiens
  misc_feature (66)..(100): n is a, c, g, or t
ctgtgaaaatcagtgaatctaaaactaataacctccctaacctttcaaacaatccctcaggttggnnnnnnnnnnnnnnnnnnnnnnnnnnnnnnnnnnncacagaggacactagcaggcaacaggtaatttcaacttagtgttacatctgggcatcaagaacctctgaggtctaatatataatacagcattcaaaacagcagggggctgcattatttctcatgagagaatgaggcaatttaatattataattttacaaaggtgtattttatttatgacctcaatatctgcccatgttccatgatactg

SEQ ID NO: 426291 - DNA, 131 bp, Homo Sapiens
gcgcttactatcagcttatggtcatacatcagccatatagccacgtatcatcaaaaggtaattcactcactatattttttgtcgttcatttctctctgaattcactgaagcaactatagtgaccagatgtg

SEQ ID NO: 426292 - DNA, 331 bp, Homo Sapiens
agaattttaggaaaaggaggaacagatggcactaaaggcagtaggcacctgatgaaagagaaaatgcatggctggcggaagggagcttagagaaggactgggagaacaaaagcagagaatctgaaatgtaaggttatctgctctgctgaactacacacacatagttgttctatttactgcttggcaatattgagtgactctatcaagtactgttgacgatcggtgcctagtaataatcacatgcatctctcaatagaaagctcactttacagaatcaggtcactaataagggcctggggcatgtatatcaccatgtaggtgtgaatatgca

SEQ ID NO: 426293 - DNA, 254 bp, Homo Sapiens
tacccagccctgttgtcaacttattaaccacagcggacgggaacatggctaccggagggccataaccatccgctgatggctctcgagcaagactcatgtggctaaactgagaccctaggttatcctgcacagagcattgctggtaggctgagactggcagtaacggggatgggtaaggggctgtagagcactgaacaggctgtgaagaggactgcagaggatgaacaggctgtgagaaaatgtgattagctgct

SEQ ID NO: 426294 - DNA, 442 bp, Homo Sapiens
ccaggatgagtgtatcccccctttcttcctaacaggctctgggtggtgcagagcaaaggggtggtgacgagaaggggagaagaggagagagggaaggagagcatgacacatacaggaagagaaccgataaacagagtcaaaggaggctctggcagacggattacatggagcataaaaagaatttcccaactgggaagcatgcctgcaaagacatttgctatcttaagaaaaataaatctcacatcctcgagtctggccatggctggtgaatctccactcggggaagggcggctcagccccaaatctggcttctaagactcttcaggtgcctgagattccgtctgtcatcaagccatcttcccccactcttctggcctcaagagctgctccctcgcttgccatcctggcccaattttatacacagtcccatcctttaatcctc

SEQ ID NO: 426295 - DNA, 450 bp, Homo Sapiens
cacagtcctgtgggagacttgtcaagcaggtgtggctaaaggactagtgctttagggagctaatggtcctggtgagaacaggggggatgatgcaccttaagtctggaaaggctcagaaaggaattatgtagtgtggtgggagtgctgtctatcagaggaggttgtgggggcaggcatggtaatcttgcacaaatacaaggaataaagtagtaaggctagagaaagttctgaaaaaggaaaatgagaatttaggatcacaaaattctctattgagaaatagcctgatgtgtaaccctagaagcatatgttcaaaactgagtagagggagaaagctgtaagcaattatggcaagggtattgggtgggctttcctctataagcaattatggcaagggtattggtgggctttcctctagaacactgaagtcatccaggatgatggagggacatg

SEQ ID NO: 426296 - DNA, 436 bp, Homo Sapiens
ccttggcagacaccactcttcactgccatcattgtcatcagtctcgctgccaactttggaaggtgtctttgtatctggccctgttgggttcattacaaagggaatcctcctatgaacttgtgtatacccttagaaagcacctgtcttcaaggagcttaaaatctcactggggagacatgacataaaacttaacatgctcatccagtagcaatctgcctcccacctcacctgtcaaccaaaactggtcttctaaagctaagagtatcctctcttgtttaccaaattcatctcctaacttcacactgtcttggctacacacctctgtaggtctttgccctactgagcatgatctacatgaaactcaggaaaatttaaaggctttgactcagacagacttaggtctgtcttagctctgactctttctagccgtgtgacc

SEQ ID NO: 426297 - DNA, 345 bp, Homo Sapiens
ctgttcacgctggagggcgactttttgcctgaactacatttcgatcaagctaacatgacctagtcaggagggggctatttaactgggctactgccagattcttcaacaaatgtgtgccaatacatccaacttaaacctttctccagccctattctctcatcttcacaatcaaacttctggaaatctacctacacataaatgtttacttccctatccctactgagtcttcattcctcttcaatttggctttcatttgacctttgcacttaaattgtgaatgccaatccacagaaaaatcccatattgctgcagccagcaggaactctcctgtcctcatctcactgt

SEQ ID NO: 426298 - DNA, 287 bp, Homo Sapiens
tacccagtcctgttgcagaggttatcccgagacgcttacagagaatggaaccttgactctgatatatgtcattatcgcgaattgagcattacgagacattattcagaacgaatataacatttctgctctagagctcccacagagctacaagcagctgacatataggatgaagcataaaaagctgtataacttcagaatctgggccgtagcggagtatctctagccagggaagctcacactccaagagaggtcacgggctgtcttccctcctttggactgagaaacac

SEQ ID NO: 426299 - DNA, 397 bp, Homo Sapiens
  misc_feature (44)..(275): n is a, c, g, or t
agactctagaggaaccccttcccagtcctagttgcaggccattnnnnnnnnnnnnnnnnnnnnnnnnnnnnnnnnnnnnnnnnnnnnnnnnnnnnnnnnnnnnnnnnnnnnnnnnnnnnnnnnnnnnnnnnnnnnnnnnnnnnnnnnnnnnnnnnnnnnnnnnnnnnnnnnnnnnnnnnnnnnnnnnnnnnnnnnnnnnnnnnnnnnnnnnnnnnnnnnnnnnnnnnnnnnnnnnnnnnnnnnnnnnnnnnnnnnnnnnnnnnnnnnnnnnnnnnaagaatttgcggacacctgggacacctcacaccttgccccaagcacaagatcacaaggtggtaaagctatttcatacatcctgctggctccagccagtgcccctagggaatatctctcacct

SEQ ID NO: 426300 - DNA, 386 bp, Homo Sapiens
gcgggtgagactatagaggaccctcttcagagtccgtggggaggcacaacagctggagccaattcatccagacacagaggtgaggggcctgaaagcagagctggatctggggaccctgcctctgagaggcagggatcttctcagcaagtgatggccacatgccctcagttcacctcaggctatgcccacaaatgggagttagccagtgagctttgacagatgtggaaagaaatcctagctggaaaggaagagagtgaatcagtggagccaagtggtcaacacctgcggagcacctatgacatggcggatactgagcatgtacttgacatacctatgccattgggaagaacaacttctgagagtgggtatcatgatgtcgattttac

SEQ ID NO: 426301 - DNA, 344 bp, Homo Sapiens
agatgttcagataaaatatcagtcaagcacatgtaacaaacacctttcattaaatacaaaatgactttgtagaggtcagctatcactgtcaccaaatgccatcaaatcttttggtcctaaaaacaatcacacagaaaagctaagatttcatcctttacaaaagcagggtcatcaccacactccttaaattctagctatccacaatgccaaacaacactggctcctttatcttcgcattcgaagtcaaggggtctaaggggctggcagaaattgctcagtcatgactgtaacaaaccatatctgttgtactttcctacaacaggactgggaaggcgaccgagctc

SEQ ID NO: 426302 - DNA, 383 bp, Homo Sapiens
agagtcctgttggagtaaactacaagccccactgtgcctgaaagcagcaagccttacacctatttctaaataccatgtaaactcaaggcttggcgaagaagtcctgggctttgactggatgactacagaaatctgaaaatccaatgatgtgtgtgcagtgtgactctgtggcagaggcagatccaggctctaatgcagggatagagccttagggaggggctggccctgaggtggaggggaactaaccttctttatacatgtgagacaggcttactttcacacagatgctcttaacttcttttgatcacagctttagcaactaccactatgccaacaattacctcaaaagttactgaagagataccacttttaaaaaccacact

SEQ ID NO: 426303 - DNA, 260 bp, Homo Sapiens
atgcagttaggtccggtgttttcaagtcagcccagaaggcagcgagaccatatggatgtgagccctggaaagcagtaggcacatccgggctcaggtaggggctggcctggcgtctgctttgtggggaggaggggttctgttgagaggccccattgttgacatgttttctcatccagacgctggacacccgggtttttgcagcctcttatacttcttacctgttgatagtcaattaaagatggaatcagtgcgtggctggc

SEQ ID NO: 426304 - DNA, 103 bp, Homo Sapiens
ttcagagttggcgacaatactgaggcgacaataacctgagtttgggttgcagaatgaaatcactcctgaagagagcagtgaaggtctcagcagaagcttcccc

SEQ ID NO: 426305 - DNA, 187 bp, Homo Sapiens
tattaaggtatccaagatagaactatccaagatagaactaatttaaatagccatattcagacaaccatttattaaagttcccaatactccacaggactacctgttaattcatcattttgataggaattcaatcagtccttacctctaatattaatctaatatatggtaccacacctctagtacagta

SEQ ID NO: 426306 - DNA, 233 bp, Homo Sapiens
  misc_feature (108)..(124): n is a, c, g, or t
gagtttcactgtgttaaccaactctgctctagaaaaagaaccgatggggttttgatgacgagctgctctcttagttatgggaggtggggactctcttactcatagcannnnnnnnnnnnnnnnngaaacagatttttcttttgtgcccaagttttttttgcgggggcccattttgggttcatggaattttccccctccaggttgaagggattttttttgcttaggcctcaaaa

SEQ ID NO: 426307 - DNA, 417 bp, Homo Sapiens
  misc_feature (321)..(321): n is a, c, g, or t
  misc_feature (382)..(382): n is a, c, g, or t
gatcactagagtaatggccaggactagaagtcaaaagacctgcacttaggttactggtctttttctttgtgtgggattatagctatgttgccatctccataggcaagagtattctcatttttaaaatggagaatgcttttgatttaccaaggtattttaggaattgagaaaagtgctctgtaaatgtccaagtgctataaagtattagatgaaattattcacactctggccctcttatgtgtctgtccccaagctgtttccaacttaatgctattgattgcccaatttgcacgaaccttttacttcaggttggctagtctnttccctggtgcttccaaaccacatgcactcttatgatggcttacatttgttttacccgctntctcccttttgactgctaaagctgcccgtcaaatc

SEQ ID NO: 426308 - DNA, 125 bp, Homo Sapiens
ggaggagcaggagcctccgcgcaagcagatactgacggaggagaacatggccacccacagcccacaacacagcctgcacaaagaccacccccacagcagcccccccaagacctcaccccactccg

SEQ ID NO: 426309 - DNA, 363 bp, Homo Sapiens
gcatatgtgaaggcgggaattgcaacggggctatttccaaaaacttccagaagggaagtgtaatcccttggactagcatggtggtgatggaaataggggataaactggttagggaggcaaatctagaacttagttttgaacatgctggtttgagatgtgtgtgagacacccaactagatgtgttcagcagccagtcatacaagctggagtgaaagatgaggtgtcggctagagatgtagtagaatctcatctgacttcagtgttaatttgtaaagtcagcatgtaaggccaaagaataaacaattaaaaatcatccttcaaaaacccttagagctgtggacctgagtctttggaaactcaaaa

SEQ ID NO: 426310 - DNA, 244 bp, Homo Sapiens
ggcaaactcaattctagaaagatatttatgagatgatctgagatgtaacactgtgcggataccagatgatgtaagcaattaatgttaattattgtcatgattaaaatggtcttctcattatgtctttaaagaatccttatcttgcagatactcaactatttagcgttaaaataatacagtagagggtgggtggtggtggatatagaagaaaacagagtggtcatgagttagtaagaggtaaagc

SEQ ID NO: 426311 - DNA, 284 bp, Homo Sapiens
ctagttccctacacttcacctcagtgctcttttgtcaaccaagataaacccctgatggcgaagcaggggcaggatagacagagtccccaggtggagtactagaactaacacttaccattatgtgtgacctctgacaggtcacttcacctgcaggcacagctagagcaagcagtgacgcatgcgcaggggtgtcccttgcctccaatgcagccaccatcccagctgtggtgctgaggatcacactagccccaactaagacctgcggctggactcctgcctctgct

SEQ ID NO: 426312 - DNA, 125 bp, Homo Sapiens
taaaatagcagtattcacgcagggcagtgatatggcccaagacggggtccagaacaggctctcgagcatgtggacatggatgggaaagcgctgcaggccagttgcgtgggagggctgcactggac

SEQ ID NO: 426313 - DNA, 394 bp, Homo Sapiens
  misc_feature (374)..(374): n is a, c, g, or t
agagctatcagaagctgttctgtgttttttccaaaaagcagatgtgttatgtaaaatgaaatagaatctgttgctttgctttagctcacttacctgctcagtttctgctgaggtgcatttcctggcagtcttgcttacaggctcaagcagagtgggggagtttgatgattggcattacgtaaatgattagagggaaattaaatatgagaatttggcctgaggcgaagaggtatcttcttatcaactatgtccacacaaacccatggacaggattagctggagtctctgtgatgcatgtctgaacattcctgtcttacggtactcagattcttaatagagtcatttcaacaataggcattttcaaggacatcggngtgctttctcatatatcctg

SEQ ID NO: 426314 - DNA, 374 bp, Homo Sapiens
caatcatatcacccatgggtggtgattttcttccctttcttctctcagtaatggcactgagaacacaatgttctgaacattgtaaggcagaacacatgaaaattcctagagagaagatctgttctatccacccctctcctccattcagcatgctgtgttcccactgtggttctgctgttggatagcaaagtctgttttgagagcttcaaggtaagagggtctcaaattgtggctagatgcccaggagtgattaagcaattagaacattcagacattgctaattgcctacaactcagcagcagcagcccatctcctgggccactcagctccctaacaaacgagacctttgcagagccaccagggttctctttttt

SEQ ID NO: 426315 - DNA, 313 bp, Homo Sapiens
agaacagcattttgcgatagtctgagcttcttgggtggagaggcattttgtacggaggttttaaaatcagctaaattaccttctttctgtcattgctatttctaaatccaaaaggtgcttatatttgtccatcttacccagtccctcagtggactgccttgcccatgcagtgcatgttaataactagcagaggcacagacctcaacccttgtaggcccactgcttccttttccacagggtcactggtccctgacctggctaacctggctcccagggctttccctccacctccacaccttgtcaacaccttttt

SEQ ID NO: 426316 - DNA, 399 bp, Homo Sapiens
cattactagtgaagatgctctagttgacctataattttctgccctttccaagaccactgattcagaggaagcctagtagagacagacctctctgaattctcaatgaagtctgaggaggcagagtttgcaaaatgaattagaccaggctggagactcatgttttgtcatgggaagagaggcatgtgctacgtggagagggactaaagagaagacacgtaaaggaatcccaaagataattgggagataggtgagagtaagggaaggagagggcatatcctgacattctctgtatcattccgttctagcattgccataaataagtacctgagactaaggaatttataaagaaaagaggtccaactggcttatggtcctgcagactgtacaggaagcacagca

SEQ ID NO: 426317 - DNA, 385 bp, Homo Sapiens
gtggagagggagggagattatggtaataatgcaagaccaggctttaggaggagcacgccgggagcaatgtgcaaaatggaattgaggagggagagacagatgcagggtgaatgtttacaataccccagctttccaagaaaattgtggttctagttctccaacctcaaagttgaacttctgtagcagcatgggacatggaaggagggtggagatgtgacagggacttaccagacaaaaggggctgcaggacctcaccacactgggctcattcatcttgcaccaatgacttgctcttccaaacaacactgccctttgttaatcttttcttgaaccaggacccacagaaatacactgaccattttctggacctaattccagaatacgc

SEQ ID NO: 426318 - DNA, 319 bp, Homo Sapiens
catttaggctgttttcatttttcacttgttcaatcaatgctgccatgtacactccagcagtacactgcagtagtggcttgtgtgagatttctccaggtgtgtcctagggttggagctgctgggttgcagggtctgttcatctccaaggaggttgtccacaccagggcttttaccgccagctgcctcacaatagagaagcatccagtcaccagggcctcccttggccccatgcaggtccgggtgtccaccccaatcaacagttttgcttatttctggtccacaaaaaggtttcagttattttgatcttggctagaccttt

SEQ ID NO: 426319 - DNA, 328 bp, Homo Sapiens
cacctgccggacacgtccaggccgccaccctcccactcccatgtgctgccccagcttctgctccccatctgggaaccaccctccactctcccacagggaagtgcttgcttccctctgaggctctgagggcacccggggagggcagggcacagccttttgtgtctctacttgccgagacgcctgagatctgaggttggtcacagatatggcgcaagcgtcaggatgggagttgtgaccacggcaggcctgggccctacactcacacacactgcccacgccgcgtcctgcctctccacggagtcccccttgtgcctccacccatctcctc

SEQ ID NO: 426320 - DNA, 420 bp, Homo Sapiens
atgccttcgcgggcggactttgaagaatcccgttcccagacctgttgtagaacttaaggatatgactggagacctcagttcacctctttgtgtagatggtgcagaccccagcccaaggaggcctaaccagaggggtttccatggagccaacatctccagtggagatgcagaaagcaacagtccaaagaaagggtgttgcatatatgggaagagggcaagaaagtggctaatgcctttgctctcccatctctccagctgccaccaagctatgaggaagccataaggtcactgcctccaccaccggccagctgtggctctactcagtcatcccaggaagcagccacctgccctgctcaggggaacaccacagtgtaggagggagcaaccacctctgtcctgcccttcccttttctccagaga

SEQ ID NO: 426321 - DNA, 323 bp, Homo Sapiens
ttgagtcacaaggtggcagagtcagaacctactagtctagggatgtcagtttacagctcagtacccaaggtccatgaaagcccagtgaggagcctgaagttgcacagctaaaggaagggctgggactcgaactcatggctctgtggttcagtcctttggctaaagggtccatgaacgccacccacaaagaatgtattgaatgttttgcttctgggctctggaggcatccagggtagctggggggttccctgccagtgaggagggagcaggcacttgcacaccattcctcagtagcccggcctcattcaatctggcaggtaggt

SEQ ID NO: 426322 - DNA, 422 bp, Homo Sapiens
ctctgtctcccaccaagaaattgatttctgccctgactggcttgggtgggcattctaggtcatccactgtctgaggtcaatttggaactgatgaagaattcttagagtgaggtgacaggataaaacaccaaagagattcagaaagcctgggttctgatcccattttggccaccgtcctctcaattctttcaacaaggatttattgaacatgacaggcatgctccctgccctcacaaaacttggagtctagcaccaatttgctgggtagaattgagagagtcattttgcctacttcattcagacacctacacacatatacacactcaacttccctctatcatgccatgtccccttttaccatctagactttggacacgctgttctgtctagaatacgcctttcttattgtatatagctaatgc

SEQ ID NO: 426323 - DNA, 114 bp, Homo Sapiens
cgatagctcaacctctttgatgtccagaccaaatgtggcccactttcctttgggcatcggtgcctttcagcctgtttacctggaggcggtggttctctgcaacatctgcctatc

SEQ ID NO: 426324 - DNA, 198 bp, Homo Sapiens
agatttaaaaatgatttcctaacacaatctcacatgctgtccatattaaaatttcaccaactgtccctcaaatgtctttttatgactgttttaatttttctggtcaggatccaatgtaggatcagaaattgcatttggtttttgtctctttactctttttttctagaaaagatttctacccttttgtaagtgacactg

SEQ ID NO: 426325 - DNA, 442 bp, Homo Sapiens
gtgggagtcccaactgtcccctgtggcttccagagtgggaccttgctgtgggataggctggccaatggtgctccctcccctgtgacccttctgttgggtgggtcacgaggaaggactgtgggtgttgcccacagacaggtggacatgtggcaaggacaccttgggaccttctttctgacgccccttgaagggggcactttctcagctttgagatgagtctctgtggatgtgggaagttcactatctcaagagcagcagccttggaaaatccaacacagaaccccgagtaggggcgggaaggggtcctgtcccgctcactggctgcctggcagagttctgcacaaggaagcgcctgtgttgctgtgggcggaggaatggactgagggctacattcgcttcctgttgccgctgtaactgcttatcacaaactcagtggtttaaa

SEQ ID NO: 426326 - DNA, 326 bp, Homo Sapiens
atcctagacagtcccgacgtggactgagaactccaactggactgaatataggaggtgtttacatcggagagcctctacagcacgactgcgctggagattgtctagcggcgagacgccggcatacaagccagacactgaccgacgatactcactgtgcggactggcaaaccagattctaatctgtcatctggccaccagaatttcattaaagtatcagcaagtttctccttcctccaatctatggcaattccctgttattgcactactgtcaggggtgaaagcagtcagctggcaaatgccttaaatagtgttttctatcacttcat

SEQ ID NO: 426327 - DNA, 429 bp, Homo Sapiens
  misc_feature (387)..(387): n is a, c, g, or t
gtagaactacaattatattaataaatgcttactgtgtcccaggcactgggctaagcacttacaatcattagcacatttaattctcaggacagtcttgggggtaggaattcctggaaatgagctccttgtccaaagctatagagttaccaagcggtgggtggagttgggcttcatgccccaagcctgcgttctaaaccacctcactgtgtgtggagttagcagtgtagggactgtccctccaatacaatctgatggagggaccatccagtgatgttgtcttcttcagggtacaggctaggccgctgtcataaagtaacccagataagatgccttcctcaggacgaagctcatctcttacatgcaagtccacgaggacatccaggctgngatggctgctccgtgatcatccaggccccttctccctcattg

SEQ ID NO: 426328 - DNA, 398 bp, Homo Sapiens
  misc_feature (338)..(338): n is a, c, g, or t
  misc_feature (367)..(367): n is a, c, g, or t
aaagaagaaaacagaagacactgggccacaggggaactctcaggagaccccaaaacaaaattccctgaaaaaaatttttctcatgagcttgccctgcagataagtatacccacagtgttatctgtctagacagtgggtggcctccttcgtcccggcagggccggggtagggctggccggctgccaggaggctgaggaggaaggtgagtcactggtccctgactggcctggctgacctgtgacagtgtgtgtatgcctggtcccctcctaagtaagaggaaagactgactccccagcaacccttcagctgcagactcacttcttccagcactagggtgngggtgagtgggaggagcctcgaaacccanaaggaaaaggtcccagtggactcagtgcagt

SEQ ID NO: 426329 - DNA, 169 bp, Homo Sapiens
ggaccttttcatcatagttgctacttgtggagcttgagcaagccaattaatgtaaacagagacatcagtaggtaggaaatgttagtcatatttagagactccaaggaatacagcggtaaagatctcaagtccacttaaaattaaaacttaaagtacaatttttcttctt

SEQ ID NO: 426330 - DNA, 207 bp, Homo Sapiens
agctcgtttccttacagtcctgttggagaatgcttcctgctggttggaggggagggtgcgcatttgaaatcaacatcttttttggggtcctgcttctaacctctgaggtccagtagtctgacagcttgagatattcacatgacagctatttcgttcccaagttcaaatgcaacagtagacagtaaattgtgctacagtcccctacca

SEQ ID NO: 426331 - DNA, 257 bp, Homo Sapiens
  misc_feature (100)..(160): n is a, c, g, or t
cgtattaaggtattccttagaatttcacttcttaggtgcttttaatttctgaagccccttaagattcagcaccaagtctttgggaggacagaaagtgacnnnnnnnnnnnnnnnnnnnnnnnnnnnnnnnnnnnnnnnnnnnnnnnnnnnnnnnnnnnnnaaaaaatctaagagaacttgagtgaccctaccaggagacagatggagagcagatgggagctgatcccaggtgaatactattccaggtacctctaaac

SEQ ID NO: 426332 - DNA, 389 bp, Homo Sapiens
gtagacgagctcttccaggacagcttcttcacccgggatttttcagcatacctaccactacctgccctgcaggctgcctcaccgcaggcctcacttcttctttcccaagacccgcactagcaatgacctagacccttgccctataaccaccatcaaatacactaaggtcctccatcctcagtctccaaaacagaattcttgtccacagagcagctccttcactctttcccaacacagtgcgttcccttgcattggatatgggacatgggcactatggtccctgccatggaggtgggagacccaagtacacagtttgcccaacaaagaaagattcttttccagggctagtagcctggcactgaacttcccactctggatgggtcctacag

SEQ ID NO: 426333 - DNA, 410 bp, Homo Sapiens
tcgagctcggtacttcccaagcctcatgaaaccatctttttctaagtttatctcccttactaggaagtaagtagtttaaaagcaaacactgtatcttaactccagtgaggaagagcacaccaggcacatagtgggcatatgataaatggttacctaactgaatcccaagcactacacaatgaagaatgaaatatagcttgacttctcagcccattcaccaggaagtcctcagttccacttctaaaacccatgccaaatctgtttacttcgtgtgctagcacagccaccacgccagtccagcctctatcgtcttgcatttagattcctcacagcctcctaattttcctgcttccatctaccctactacacacataccactctcccgcagccagaaaaatctttgtaaaaat

SEQ ID NO: 426334 - DNA, 248 bp, Homo Sapiens
cgaccggaaaaaaactttcagagaagtccataagaatgagaccttttatactgcctaaaggaacatggcaaaagaggactgaagagtttctagggaaaactggagctatcctaaatacatctttgaactggaaggtgactttaggatcacccaggcttccctgaaattgctccctgatcagagacacccttgggctataaggaaagtatccttatgtttccgtatattccctcaaattgctttatgct

SEQ ID NO: 426335 - DNA, 121 bp, Homo Sapiens
ttcccagttctgtgtggaggtccttctagcgctgcctatgtggagattcttccccactcatcttgggggcttggatttgttgcataaagcagctgatgtgtttcccacagggtcctgccag

SEQ ID NO: 426336 - DNA, 290 bp, Homo Sapiens
gaggtggcagcagctcatccggatgcccagttctctaataaggtttgagagtcattcctggaagctcaacctagaccctgtttcttcagctccctctgtcacaatgctttcacaaacctcttaatagccaaatatctttcagcttaaacaggccagactcttatctaaaactgaactctggctataacaaacatgaaaaactactgtagaccatattcactggaaaaaataatttggcaaaaatagttctaatggcatggatattttaggtaaagctcatattattgtag

SEQ ID NO: 426337 - DNA, 176 bp, Homo Sapiens
tgcggccgcaggctccgtcactacctagcatttttcacaggaggagagctcttttaaaaaacacctggtcaccttccatagagatttctaaaggcatcgagagcatggtttttctactggggggtgggctgggggaaaatgcagagttgggtacacatgcggctcttgcggccgca

SEQ ID NO: 426338 - DNA, 263 bp, Homo Sapiens
aggtttgttcatcacactgtagcagttttagaacaggtctaaactcagataaaatgaatgaactatttagcccattctctttaaatgcagcatggcatagtttaattagcgcaatgtaataatctccaattgctcatagaaaggaactaattctgtcaaagtgttttcttagtttcccccaccatgaaatgcattttattcattttgaagcatctgaaaaataaataagcagctgatatccagaaatgaccataaaataactg

SEQ ID NO: 426339 - DNA, 433 bp, Homo Sapiens
cacgaacgccgatgatatgattaaggaaagcctgtctactgctgaagtgcggcagattaaggcggcggctggacaggattaatgagggggcaagcccgaagagcgacagacaaaccagctggccagtgagctagtcctggaggtgacagtttataagcaagtctgaagtcacgtgagtggcaaacacaggaatgagtaacaccttgcattactatagcacatgacgccttcccctttgctttcatgtgatttaatcctcacaaacctccatgagctaggcagggtaagtgtcaatctcatttcacagacgaggaagctgaatctcggagccactgcgtggtgaggctgagaagctaacccagtttcctgactaagatgggtgctcctttgactgcctgtgtagcctccacacttgctgggtatcagatttacc

SEQ ID NO: 426340 - DNA, 136 bp, Homo Sapiens
cagaagacggacttttaatgtcatgattgcttttctgtggcatattcactgttcgtataaatttaattcttaactatacaattagagcttaaaccagattttaatatttgattcatgaaattacattcttttttgc

SEQ ID NO: 426341 - DNA, 358 bp, Homo Sapiens
cgagcacgatccggaattccggccatgggatttgcctctttcattaaattgtcaaaggagatgttttatatgaaaaagatcaagttgctcagattgctccactccttgctgtattcatggaactgaggctctgagagagaatgccgcccactccctgcacctttgcacaccactggcacaaagcgtgtcacccagccagcattgaccagagactggaagcattgctcctgatgtgcacctgctgagagagctttcttactgctcctcctttcctctagctcccatattccagtagccacctggctcttgaagcatcttgaaggattgatctggaatatcagatcagtcctatagatga

SEQ ID NO: 426342 - DNA, 120 bp, Homo Sapiens
gtttctctgctgggacctaggccttagtgcgggctttcagccaggagccagggatagctcagagatgctttgtttggcagaccttctcatttcctgcctcttacccccgggactgcccca

SEQ ID NO: 426343 - DNA, 326 bp, Homo Sapiens
agaacacagatgaggaaggacatttaatgatgaaaatacagcatgaacaaaggaattatttggtttttccttttcttagcactgttatagtatttcctgttaatacaactcactttgtctcctaactataacttgtattgatagtattattatatgtgtattacatgtgtagatgtcatgtttctctgtataaactatatgtttacaaagtatacagatgtctaatataagtcacttattttaccaggtgctggagatttaccatatatgggtgattaacccattaacagtgtatgaaaaagctgcaccagagcatgtacaaagta

SEQ ID NO: 426344 - DNA, 458 bp, Homo Sapiens
ggccgaatccgaaatccgggcatgggatcacacttgcacactcagtcaacaaatatttttgcacttttgctctgcgccaggcacggtgcacacagaggaacacagaatgaccccatggagaacatgaaattacctgcccaatgagtggtgtggcaggcttctgagggcagggagtgatcatcgcctggattggtcagggaaggtcagtgagtggaagtaggacaggtgttggcctgagagtcagagatggataagagaagggccttttgtaagaggcagagtctgacagaggggcagctatcagagtgtgggcttgagaacacctgggcataaatcaaggctcagtcatgagaggcaaagtggaaggtgggctgtgccaaacacagggtcagctttagggcccactggctgtgatgaaagagggcggtgggttactagtgacttctcagccagaagtg

SEQ ID NO: 426345 - DNA, 186 bp, Homo Sapiens
cagagtgacagctcttgttgtacattggtctctcttcctagtgtctgagtatcactgagtctgaccatttcaaggtggcctcagagtgtccagacaggctgagaaccacctacctaaatcacagagactcaacccagatgctgtcttctcaaagaagttttagcagcaacaaggaagctctcctat

SEQ ID NO: 426346 - DNA, 439 bp, Homo Sapiens
  misc_feature (199)..(255): n is a, c, g, or t
ggctcgaatccgaaatccgggcatgggatttgaggaaagacatttcttccagcttccctaaaatttttctcagagagccaaggacctctcctttcgtgggtctgaaacatctcagtgttccatgagtggcaactggcttctctctctaagagctctttgactggcctgacacggaataaaagtacctagcatcaccaannnnnnnnnnnnnnnnnnnnnnnnnnnnnnnnnnnnnnnnnnnnnnnnnnnnnnnnnctccctctctccctcacccactgttcctttcttcctccttactttttgaaaaaaatgtgctttccgcccccacccccatggccatatttacattcctctgttattaaatgttagggaatttttacattgcagaaatttaccttaaacccctcctctttcctgattccatcccatcccggaattc

SEQ ID NO: 426347 - DNA, 446 bp, Homo Sapiens
cgaaatcctggatgggatcccaccgcccctgacacaaacaagcagatggtgatccttgctgccctcaaggctgagcatctgaagcccacaagaaagtttgcttgcctggggcacctgtctcataaggttgactggaagtaccaggcagtgatagccaccctggaggaaaagaggagggaaaaggccaagatccactaccaaaagaaacagcagcagaaacaggcccaaaagaacggggagaagaaaattgcaagttcacaggggtcctcaagacccatgggcttctggtctgagcccataaagactgtttattcctcaaaaacaaacaaacagaataaagaagctgaatgcaagacaggaggccagcccttcagagaggcccccggctgccctgggaagaggctgtcctcagcaggtctctccatctcactgggcccagcaccaca

SEQ ID NO: 426348 - DNA, 308 bp, Homo Sapiens
ggggtgggggcatccaagaaagattcattattactttaatttcttccctttgctaaggaaatctgagagtaatggctagccactgcacccagaatagggacaagtttttttaaagggaataaaaaagctgtcagggctactaagtgtaaaattagactttcaagctgtgtgttggttagcaggtgtgggtgtgtgactagaaaccagatgtcactctgtccctgtgcatggcctgttggctcaattcagagatgggctcagaataagtttcctttagaaactaagccttgctctatgtcctctttaca

SEQ ID NO: 426349 - DNA, 421 bp, Homo Sapiens
taggagtcaaccccgggtgctgcatcacctttccctttcttcttggacaggttcagcttgttctgggctacctatactcaacctgcttccccattagcttctggccagacttctttccatggctgcggaattgcaagaaataccatacttagactactgccagagaataatgacatttaccccttgtctgtgctttgtgtgagggctgtctgggttccatatatgaaggagcgtcactgggtggtcacgcaattgaatcacgcaattttatcttcttcccataacatatagtttctctcaagaggaattaccttcatgattacttcccatctttccccaaacttgatgggccatggtcaagatcttctgcaaatgtcctctctcaaatctgccttcatctgatctttttataatggatctg

SEQ ID NO: 426350 - DNA, 192 bp, Homo Sapiens
atagggaacaaaatgggacctgggattaagaaacaaaatagaagacctgtggtctgatggtgggcagggagttgtgagtcacagaggagctcatggcaaacatgacctcatgctgaagagcagagcctggaactgctcatatttaagcctctgctactttcattcagagaattggaaaacatgcctgatacc

SEQ ID NO: 426351 - DNA, 297 bp, Homo Sapiens
  misc_feature (11)..(11): n is a, c, g, or t
aaaccggcccngggataaagaaaagcaaatatataatttactcttgttaaggttctactgtaaaacactccacaaatacagtgtaaagtacaaagctagtgataagtattaatgacagacatttgtgggtgtacctatgcatgcaaccacaacacacagtataattaaaccttgcaaaatagccattggttcaggactagaaatgatttacatcaaataagcagtgaaaggttgttacacacccctctccccaaacttcctaagatacaagggtagggcagggtaggattttttaaa

SEQ ID NO: 426352 - DNA, 460 bp, Homo Sapiens
atctaataagagttcactcacatacatgtaaaatcatcatattgctgcccattaacatatttaagctgtaagtaatggatctgcccaccttatcctctttttggtttctcagtattcactttggaccccctaaaatcccttgcctttcccatatttctgtatttacagagtacaaacccaattagcttaatagagtcttggttattgctttattatttatcaattttttaaaattaaataacaattgtttatattaacggtgaacaacatgatgctttgaaacatgtatacatttttgaatggctaaattgtgctaattaacatatgcattacctcacatatttatgatttatttgtggagagaacacttaagatctaccgtcttagcaattcgcaagtatacaatacattgttatgaactatagtcatcatattataaaataggtatcttagatttatt

SEQ ID NO: 426353 - DNA, 223 bp, Homo Sapiens
aatatcctcaagtcttgagggaacatcaggtctcatcagggtgtgatcagcccacagtttgtgccagttcctttcatccgcctgtgggtgacaatcccttcttgtcccatcaccaccatgtgataatcctcgcctccagccttaatattgtctaattgtatgagacaatctgtccaaacaggtcttcctgtgttaaggtcagacctcgtgagtatgtgatcat

SEQ ID NO: 426354 - DNA, 429 bp, Homo Sapiens
tttcggaattccgacgatgggatataatttcactacagaaaacagaggccaggcagtagcttcacccatgggagtcttcagacttgtgctagactcagaggacacagagcagatgtgtgactgacacgtctacctggcaggtaatctgacacacacagaaaagacaacacgaatcgctcaccgctgctgagcgctcaccatgcgccaggccccattccaccgactttacggcataatctcattcaatgctgacaacagcctatgggatgtgactgtcattggtccattgaacagattagtagagtgaggcagagcaagttaagcactttgcccaggtaacaagtgcaggggccgttagactgcagcaagtactgctgtaggctcaaagaaagagcgactgggaaaagcaggggacactaaggtaatcat

SEQ ID NO: 426355 - DNA, 486 bp, Homo Sapiens
ctccaaaaacactcactcacttccaactcttaaaagaatgtaaaagacatttgtgttttacttaaaaccaaatatacagtaatttaaaatagcttattctgttctgacaatttcagtactcaaagctctcatttctaaaatgaaagtctcagtaaatagatgatttctacaggtcctctgtagtgccaacatttctaatttgcctgtaatacatgtatgctactttaaaactaactctcaattgtattaagaatttctctgttcagtggttttaaaaggatacattttaaatgggcagtgtcttctccgtatctcttaaatttctacattaaccaactatacattctaattgcctttcatgtagaaattccaataattacttattgtagtaaaattcagatgatggcttgacttttttttctagtccctcctcttagtaagacttttctggtataagttttatactttaacatctagttttttaaa

SEQ ID NO: 426356 - DNA, 298 bp, Homo Sapiens
ctgctgtagccctggtcattgacacatgacagatgttaagtgactgttcaaacagcccatcagactgtagtataccaaggcacatgccaggtgctatctaggatacagagaagagagtaagaagacccaggaacctgtgatctattcgaggaggcgggactttatacctgaaaaaccaaagtgatactttccaagtaatggagccaataatgacttcagagtcagagtggttaagaaagatctgcatggggagaaataaagcctttgatgaagattttaaaagatgagtaccttcctg

SEQ ID NO: 426357 - DNA, 294 bp, Homo Sapiens
cgccaataggaactttttggaccaaggctacacgtatcgctgcgcgtaatcttgagcatctataccatgtacatattcattaaacctcagaatcttcctgacagggagatcagcgacagatgccctttgactgagctgaaggaaacgtagcctctaagatcaccgagccaatacttaggcatcaatcaagcaatcaaattgcctctaacccagtgcttcaatcttcattggaatcacctggaggagctctagacactattgatccctgtagaaccctccccggaattcgtagat

SEQ ID NO: 426358 - DNA, 500 bp, Homo Sapiens
  misc_feature (378)..(378): n is a, c, g, or t
  misc_feature (431)..(431): n is a, c, g, or t
  misc_feature (448)..(448): n is a, c, g, or t
  misc_feature (480)..(480): n is a, c, g, or t
ttcgagctcggatctccaattccggagatgggatctcttattttgaaactcaccacaaccatttggtcagagtgcttcactggcctccactctgactgctgccgaggggctgatcagaagacaatgagattgcaacagctcctaccagttgtatgctgacaaaatgggtaggaaagcttcccttttccaacagataacagcattggaagcagaactgaaatgcactgtgtcatctcatctccccaagacaagactgtaatgttccaaagcctccttgctcacagaaaggatgtaacagcagatatgtacggaaacataaggatcctaggcatccgggatgcctggccactgggctggtcactcttccttagacctctntaaatcagtacatttcctgagcttggatgggtttgtctattagcgtttcccanagaacaccaattatganagagggttcagactctgtctcaatagggaggntacttgttaccgattctcta

SEQ ID NO: 426359 - DNA, 136 bp, Homo Sapiens
ccaggaatctacgccacagaaacctcagtagcttgaacagggctttatgtccgagtgttgattataaaatttaacagttaggagcagctaaatgttgaaaaactagagaacagttaaataaattatggtgctgtca

SEQ ID NO: 426360 - DNA, 263 bp, Homo Sapiens
tggactcgagtgtgaaaaccactagcgagactccatctggggtggggggtgcggaagaagtctggtgttggttgtagagtgtggccgtgagagcgtaggaaaaaagaatttgaattttttcttaacacctaggcaatgacaacgctcatctgccataagaatgttctataaaatgcacatcttttactcaaggcaattctgcccctcaacaatgtaagtatttggctcatcttctacaagcccgacacctgcagctttggggt

SEQ ID NO: 426361 - DNA, 124 bp, Homo Sapiens
tctgccgttttaaggccagggcagtgacatacatgcagataagtatgtcacagacgtggtagacacatggtatacaacagaatccgctgcactagatacagggctccatattattcataaggag

SEQ ID NO: 426362 - DNA, 100 bp, Homo Sapiens
cagacttctaaaaagcttgggttacagaacgcgtgctgtgttcctatccccggaagtggcgcacccatacacacaaacccacatctatgagtgacttctg

SEQ ID NO: 426363 - DNA, 380 bp, Homo Sapiens
aatgctggctcgtggagagccaaaactcgatgaagatgcagaccctgcccctgttagaggggatcatggctcttgcttcttcatgtcgccatgtgcttttttaaagtgcaggacaggagtagctgattggctgaacccaggacaaccacatgcaaggaatccaggtaaagcatgcttactagctggccttaccatgcaggaaatttgtaaaccaaggaaatggctcagatacgtggcatccaacactcttgagaaatatcatatatgttgcatggacattattggtttctaatccaaatcaagacatatattcccataagcaagggcaacaagacaacatctggaatcatcacttgcctgccttgggaaataactttacc

SEQ ID NO: 426364 - DNA, 394 bp, Homo Sapiens
tgtaggtgtccagacagcacacgaacggttacctttcagtacagtggggcatgtcctatctggtaggggacagcctataggatactgaagaacacctgggggagggaatcgggccctggtgctaagtttagacctgtctgtcactgaatgagcattctggccttttccaactcatttttacctacctttgaggttaaagctgataacctctttgaagagaggtgcctttatacctttctaacggaataggaaggaggtagagagtagaggttctttgttctatttgtagcttgaatgagatgttttaaaatctgactttcagtggctctgtttactcatgatagtgtcaaaagaataaggtcagctggcccattgtggttcaaaggagagcact

SEQ ID NO: 426365 - DNA, 111 bp, Homo Sapiens
actgattttagattggggaggaccaactgtcaacaggagtggacgctgcacaaagagtcacggatggcggcggatatagggatcaggcccaaaggggatttgtgcaggagt

SEQ ID NO: 426366 - DNA, 154 bp, Homo Sapiens
aaggccttcatggacacctcctctgcccctagactgggctcagtgtccctctgtggcactgagcccctctgtggccgatgagctgccctccaagcaccacgctggaatgtatgtgttcaggctgtgtgctcctcgaggcaagcgctgagttcta

SEQ ID NO: 426367 - DNA, 375 bp, Homo Sapiens
catagaaaaaaaccatataattgtctctgtaagtatttagaacaaagcttagtatatgaatcatacaggcagatgagctaattataaacttcataattacattaatatgcagatatatttctagtctagcagctagatggaccttgctaaccactttgtcacaacctgttgttctagggtgggtgaccgccatcttggatactcaccaagggccacaaagcccctttgcaatatgtccatttcgtggaacactgatgcctaaaaagccatctgtgctcaacagcttacttgtcctgtctgtattctaagctcatccctttttacttcttactcaatagaaacccagaactgtagcagtcagctatcactatgtaa

SEQ ID NO: 426368 - DNA, 470 bp, Homo Sapiens
  misc_feature (440)..(440): n is a, c, g, or t
  misc_feature (447)..(447): n is a, c, g, or t
tcatgcaggttgtcagggaagcgggggaaagctggctgtcacaggcctcacccagctcccacacaaacggaagggccagtctcactcccaccatgccccctcaacagccccaagtctgtttccaggcagtaggggatctgggcctgagaacttgccccaggctactcacctcccagctgtgaaagaaaaaggcttggttctttccccacctatggagtctgcacaccggattcgtgccctcccccttctggccaggaggcttctcgccagttcaaattgttacaaagttcagctggagacttccttctccctatagcgtttcccctcctattcctctggctgccctcccgaaggatccctgtggtgccaggcaggaatggcctgcttgaagacccagcgagctcccaaggctttcctgctgcttcctctacttctatatntcgctgngctctctaaattgactcagctcc

SEQ ID NO: 426369 - DNA, 337 bp, Homo Sapiens
  misc_feature (135)..(212): n is a, c, g, or t
tgaaatacaggggtggagcaggcagcagggaggccctgggggcttgataaatccccaagcagcccattcctgcctggcaccacagggatccttcaggagggaggacagaggagcagaggtaaaattccaagtggnnnnnnnnnnnnnnnnnnnnnnnnnnnnnnnnnnnnnnnnnnnnnnnnnnnnnnnnnnnnnnnnnnnnnnnnnnnnnncgaatctggcttgcagacttcacaggcggggaagaactaaagcccttttttttcctgcaactggaaggcagaaagccttgagcaattttcaagcccaactagccttccatctggaaacagacttg

SEQ ID NO: 426370 - DNA, 441 bp, Homo Sapiens
ggggtgactcttggtcagaggttgagtgtttccctaggtgtggaggtgcacggagaagagaggggtgcagttcttaaaggacacatggcttatgccacaccccctgccccaacccccggagtggccagccttcctttgactggggaggaggcagctgtccagggttgtcctcacctctcctcctggagagtgtggtcccttcagaaaggggacccagtagtgggtgacctggtgcaaaccacccactgcctcctctgggccttcctggggctcttcggctctcaggagaggagggagctcaggctgtggctgctctgtgagttggacacggacgctccagccgctgggcccagcagtgtgaatggccatagagaacaggggcccagaggctgctctcgaggacactggcagcagttgtgctctgggctcgccatccttgaa

SEQ ID NO: 426371 - DNA, 203 bp, Homo Sapiens
  misc_feature (62)..(81): n is a, c, g, or t
ctgttatactaacatcctttcttagacaaatggaaacataccagatacattgtattttaccnnnnnnnnnnnnnnnnnnnnaccttaaaattttgggaaaacttcttcacccggtaacataaaagggggctattattttttttgagagaagacgggggctcccttaggggcatgaggcattttatttaaccggggccttgggg

SEQ ID NO: 426372 - DNA, 443 bp, Homo Sapiens
  misc_feature (397)..(397): n is a, c, g, or t
gcagcctgctgagcagagcagtggtacccagtgcttggccccctaaactattctttcctcctacggctgtggacctgtgaggctaggggctgtctccaagttctctgagattgcctttgaggccttttcccattgtcttggatactagcacttggctcccatttagtcatgctagtttctctagcaagtagttgctccataccctgctgggattctttctctgccacatggccaggctgcaaatttgctgaattttatgctctgcttcccttttgaatataagttccaactttaagtcattcctttgctcccatatctgatcacaggttgttacaaggagtcaggccacatcttgaatgctttgctgcttagaaatttcttctgccagagaccctanattaccactcttaaattcaaacttccacagatccttggtacatgaa

SEQ ID NO: 426373 - DNA, 241 bp, Homo Sapiens
tgggccactgtgcctgaccttgcctcacagctcttaagattctttctttcatctttactttagacaatgtgatgactatgtgcctaggcaatgatctttttgcaatgaattccccgggtgttctttgagcttcttgtatttggatgtctagatctctagcaagaccatggaagtttttcttgattattccctcaagtatgttttccaaacttttagatttcccttcttcctcagcaggctg

SEQ ID NO: 426374 - DNA, 336 bp, Homo Sapiens
ttcaagaaagttaatgcagctctgatgcctctagttctttcatttctcccaggtgggtcatcacagcttctaactaagaatcttaagtcaatccgtgattcctactaaagggcagaaaagtcctttggttccttcaatgccaagtaaatatttacatgcttgagcagtcggtgtaggttggtgagccctggactcacacagatccatgtggacctcacctcactaagcctcagctttgccagccgtgaagtgggaccaatagaaataaaaatcataccttaaatgtctagatttgcgcctggcctgtattgcgcactgaataaagtgtatcgaata

SEQ ID NO: 426375 - DNA, 431 bp, Homo Sapiens
ctgaacgcagcctgctgaggtattgtccatgagagctcaaggagtggcccccacactctaggtgccgcccgtgagagcttgagggaggggccctcacactccaggtgccacccatgaaagcttgagggaggggcccccacactccaggtgccacccgtgagagctcgagggaggggtccccacactccaggtgccgctcgctgtgccccgggcatgtgacagtgtggacatgagagctcaagagagtggacagaggctggccccgcaaaggccaatgtagatgggagcgcagctgcaggcaggtggagagcactgccttcctgccacagcccacctctaaaatcgctgtcagccagccgctccctgataactctgactggcgactgtgacccagggaacggaaaccgccaatgaggccctggagctccctg

SEQ ID NO: 426376 - DNA, 179 bp, Homo Sapiens
  misc_feature (142)..(142): n is a, c, g, or t
  misc_feature (168)..(168): n is a, c, g, or t
tggtaaatccaggccttctcccttagccatgtcttgcaggcgcctgacgcactggccacagctgacacaaatgtgtcacggacccccaagaaaacaccacatgcagtccttcctcaggccgtgctgcccacaaggggctcanaatgatttgttgactgaattcccatnttacagcaggt

SEQ ID NO: 426377 - DNA, 288 bp, Homo Sapiens
  misc_feature (89)..(162): n is a, c, g, or t
agctcgttccctgttgcgcctgaaacattgagttgaaccaatccagcaggtggtttgcacttttgtggaccctggggttgcatgcttgnnnnnnnnnnnnnnnnnnnnnnnnnnnnnnnnnnnnnnnnnnnnnnnnnnnnnnnnnnnnnnnnnnnnnnnnnnccccccgcctccgttacctgctggggaaacagcagcgcctacggcacagggttgtgtggagggtgcaagagaagtggccgtgaccatccctctaaatgggacaggctgtattccatggacatgatg

SEQ ID NO: 426378 - DNA, 349 bp, Homo Sapiens
  misc_feature (193)..(252): n is a, c, g, or t
ccaagtgggcggaatgaacccagtgggcggaatgaacccagtgggcccgagcaaaactcagacaaaggcaccacctgtcaaagaggcttccggctagaaaagcgacaccctaaggattctgtgaaattagctcatattagtctgtttgctctgttttctagttttcttcaactttatgctccagatttgaacnnnnnnnnnnnnnnnnnnnnnnnnnnnnnnnnnnnnnnnnnnnnnnnnnnnnnnnnnnnnggcaaacaaattatttcccaaagcaggtttttaatctctaatatacccattattatagcaatataatctcaattcaaagcagcaatgtccctttaca

SEQ ID NO: 426379 - DNA, 435 bp, Homo Sapiens
gacccccaaatgggagggaaagcccacctctagcctgaggacctccagccctcctatgggagtcttgagcctgtacatagataagcgggcttcctagagactttcttagacaaaaatcagggctggcctcccctccctacctggaggcaagaaggaaagagggtgacaaagggaggttggcctcaagcccattgcctacctgccctccacttctgcaccccagaagaagaggggcataaagatcctaccagctgtgtccccagcatgttctcaacccacagaggcccagacccccatctccggccccttctgtccctgttcggactccttagcaggcaggaggctttgtgatgttctcagcacccttgcccagcctctgtcctgggctccccgtgccatcctgtggccctgtcagtccctcccctgatctgttct

SEQ ID NO: 426380 - DNA, 356 bp, Homo Sapiens
  misc_feature (307)..(307): n is a, c, g, or t
ggtgaagctcagatccaagactgctggagaggaggttttagctgagagactgggcgaagaggccagaggggtgcagtgaggttttacaggccagagtctatagacaggggcagggcaccacccggactgaaacttgccgtgacagcaagtggggccaacgcgaagaggatgtgagaattcctgggagcagaggtgaagcgttatgagtggcctcggaagaagcttaggcagagatgagcatggggatgaaggcgaggagagcctgtggagaaagtgagcgagtgtcatggcagtgcggtggggcggngactgctaatgagaccagaaactctgcactttgtcattgccgaatccct

SEQ ID NO: 426381 - DNA, 142 bp, Homo Sapiens
ggctcagagactgttctttacacacttccaaaggatagatctgatggctaaatccaatacagatcaacctggattatctgaggtgtgtaactcagccacaattctgacacaaaaaatgagatctccccaccccgcccccaac

SEQ ID NO: 426382 - DNA, 224 bp, Homo Sapiens
  misc_feature (138)..(147): n is a, c, g, or t
gggaatttttgggaaaagacggggtttcaccgggtaacccagaagggtctggatctcctgacctggggacccgcccacttgggcctccaaaagggcgggaattacaggggtgacccaccgccccgggccaaatttggnnnnnnnnnnaggtggaggttcagccccctgagccccaccttaggggctgcaaccgggggatcttttagagtggacctgcgggcttg

SEQ ID NO: 426383 - DNA, 136 bp, Homo Sapiens
aaaacagttgaggtaatattgggttacaggtatttcttatacataatattgaggaaaaaaataaaggaatcctactgaaaaatccttctgattgatatatatcttttcaagtttggaaaatttcactcatgattaa

SEQ ID NO: 426384 - DNA, 295 bp, Homo Sapiens
ggccgggagagaaactgacgagactcttttttgccttggattccgattctgcccacttgtctaaatcaatgattccactataaatcatgtaaaaagagtaagagtcttttctgagagcgagctatgatctcaaactccagaggttctgttaaaagcatgcctggaagagacggaacatatcaccagactccgtacaaatatgaaggcttgtgtgtgttagcggttcagattgctatttttctacataatataccacagctctgtttcagatactggccttttctccctgtaattt

SEQ ID NO: 426385 - DNA, 295 bp, Homo Sapiens
aaggtaaagacgggggaggctaatgcctcagtggttatgggggaagccagcgctggtgggttcgggtggaaggtaagagaaaaggtggagaatggtaaggctatactcaccgtgtgtgctctaaaccagcgagagtcatttcagaaatggcactgaaatctgttttccgggtttactcgttgtgcaatacagtgctgttttagaaattttgagttcaaattacttattctttggtctaggatgcctgtaagataggaatgatattttcacttaaaagagtgaacatttcggccgt

SEQ ID NO: 426386 - DNA, 310 bp, Homo Sapiens
  misc_feature (195)..(256): n is a, c, g, or t
cacaggtcctgcagtgatgcaggcattgcacattgttcctggactagtagtctgaacctacagggggcggggaccccaccctgaagcagataggcggtcccagtgctcaggtgtggtatgccgactcatggagcctgcaccccaatatcacactccagaccacttattgacaccctcccccaaacacatacggtnnnnnnnnnnnnnnnnnnnnnnnnnnnnnnnnnnnnnnnnnnnnnnnnnnnnnnnnnnnnnnagagtgcccatcatacacataatgtctaacacacacaatccccctgcacacaat

SEQ ID NO: 426387 - DNA, 478 bp, Homo Sapiens
gtgaacgcagcctgctgaggatactcacaactgtggtttggtttcagcaaaacatttattcttctattgtggggtataatcactctgacacactcataacctgtatgttagtttcttaggcaaagaaacactcttcgcacagggattgctcacaactctttccatgccaagaagcatgtgaggaggaggggatggtgtgcactcctgttgtggacggtaacagaacctggaaatcaatgctttgaggggattttattttgacagctttcactaactttgtttttatactttcctaagtctagaatgagaagagcctttaagttctcactgatcctcaagggaagaaaagaagtcccctgtgaggggaacacagcatcttttgagaataccttttccaactgcagccatcttgcctttctcaccttccataccacagggctgatccaggtacctgtagagtgctccatcacgctggact

SEQ ID NO: 426388 - DNA, 280 bp, Homo Sapiens
  misc_feature (135)..(190): n is a, c, g, or t
cagcctgctgagacggagctgcctgcggtgagccaagatcgtaccattttactgtagccttggggacagagtaagactccatcataaacaaacaaacaaacaaaagtcaataagaagggagtcaaagcatgtctnnnnnnnnnnnnnnnnnnnnnnnnnnnnnnnnnnnnnnnnnnnnnnnnnnnnnnnncctacaataaatacagataatatgtaacagaatcacaagggtaaggtcttctccatcagtaatacttcaactgtaagtatttaatctgca

SEQ ID NO: 426389 - DNA, 155 bp, Homo Sapiens
tagcagggcctggtaagtccagcccattgcctaagagttattatcagacttttgaagtgggaagggcttgtcagtgactgtctcagacttcaagtcagatgtcttttgacaatgggtggccttaaggatagctgtacccaagacaggcttggaag

SEQ ID NO: 426390 - DNA, 436 bp, Homo Sapiens
tgaatgtcaatctccttcctatgggtccccatccattgctgtccacctacccaccatgcctagcctgggtgtccagcgcaacatccccagcgcggctccctcccaggtgggtccagccctcccccgtgggctctgagcagagtgaaatggctcggtgggctctgaggactgcctctgaactcgtgggttctgagcagaagaccatcctggggtctctccagccttcggggtagagtgcacagaggtccagatggagtgaagcactggccagctggaatctcagctcccctcaagccccatggacccagagtgaatcccctccctgttccggggctctgtgttctcttctgcacataggagctgcaagcctgccatgtactgttccttcagggcagctgtgagatggggttgggcaggagatgatagtatcctcagc

SEQ ID NO: 426391 - DNA, 181 bp, Homo Sapiens
catggaatggctgtcagtataattgattgatgatggattagaatgctgaaaccttgagggtcaaggattacgtattgtgagctgggactctcttggatttgcttcagggaatgggtgtcattgttaccaaaagcctccttgtaagaaggggcaagctcattggcttatctgcactgagtgg

SEQ ID NO: 426392 - DNA, 429 bp, Homo Sapiens
  misc_feature (313)..(313): n is a, c, g, or t
aaactgatagccatgttcatggatacatttcttaatttcttaaaagtcagcattcccattatggtaaccaaagtaggtgtttgcttactgtatgcaatatgaaaggcagtgctgtgggacccactttatccaaaatttctttccctccagtctgtctgcttcagtatgtattagccctccattgaaagtcaccactttggtttaatgcctagtcctaaagcctggaattcagatattcctgggtaaattaatatgaacctaacattagctattagcaccatggtgtgaatgaattgatcaggttgctgcctgngagagcaagggaatcaagcagaagacaaaacatattgatgggataaggggtgaataaaggaaatcagagcactgaatacaaacgtagatgggccagccctggggaataaaggtgtc

SEQ ID NO: 426393 - DNA, 209 bp, Homo Sapiens
gcaaaggaaggatgaactggagcagaggatgtcggccctgcaggagagcaggctgcagctgttgttgcagctggatgagctgatgaaggtgctgatggcttagtccacagcgtcacctaatacatcgcccacccatagagccggccggccgatgcccatgccgaggcgctgcacgtctgccgaatacagcctcaccacactgtccgacg

SEQ ID NO: 426394 - DNA, 270 bp, Homo Sapiens
ccagtacataagcttcatagaaaatttcagacatgcaatcataagatcaaagagtaaggtcctacacctttggccccaagccaaaaaacactattgaaaaaccattaccatttacttgctttaggaaaaaagccaagactacttagacctttcccacttgaagaaaaatttacatgtttctgaatatggatctaattttaagttccgtcttaatgtgctctttctttcagaggtgaaacaactaatacatgtgcttctgagccacagctt

SEQ ID NO: 426395 - DNA, 165 bp, Homo Sapiens
tgtttcgcagcctgctgagttacatatggactcttattcttatttatggtggtagcggtgacctgtgatattgcccccccgttttaaaatttcgacagtctcacgctgattccttttcaattacaaaaaaagccccccaattccagggattctcgtggctaaatt

SEQ ID NO: 426396 - DNA, 391 bp, Homo Sapiens
agaggccatgctttgatgactagttggataatagaaggtaaaactaaagtgatagacttactgaagactgatttgaaatatagagcaagtatccagaaatgatcaaagttctttttcacgattgtactttgctaagctcctgtgtctctggagctcagagtgttgccacagcttggtatatatgggctaagcagggccagtctctgctctaaggagcattcactatgtcaccaccacttgacattggaaaagcactttcctcttgtccaatcacttggccagtgtgaactctgtgtgtcttaactctttaagaggcaagtcagtcaggaagtagcccccttgccaaagcaggaattttacttacagcatggattctaagcaggccagtgat

SEQ ID NO: 426397 - DNA, 243 bp, Homo Sapiens
gacatgcaaaactgctgtctatcttcagacctggcccattgtcaaatggcaggcttgcagagcaaataagggacctggcctagctcacaaggcagtcagaagtgatccaaagttcaggctccccctcccttttatcactccaccctgcctctactcctccgcctcctattcttccggcctttccatctggaaaccatgagcctcatggattccaggcacaaattctcagatttcagatgtttg

SEQ ID NO: 426398 - DNA, 280 bp, Homo Sapiens
tctccactatgaaatcgcgtagaggctttactattcagcgtttgatgaatgcaatgcgacaggctcatgctgatggttggtttatcgtttttgacactctcacgttggctgacgaccgattagaggcgttttatgataatcccaatgctttgcgtgactattttcgtgatattggtcgtatggttcttgctgccgagggtcgcaaggctaatgattcacacgccgactgctatcagtatttttgtgtgcctgagtatggtacagctaatgggggtaccga

SEQ ID NO: 426399 - DNA, 188 bp, Homo Sapiens
ctaagtgctttacatgtattgtctcatttaatcctcacaacaaccttgaggtaagtgctcattttgtccctctcgcatgttatagttgaggaaactgagacttacagaaaataagtatcttatcccataccacaaagtggtagtgataagattcactgaagtcttacacgagtctataccatactcta

SEQ ID NO: 426400 - DNA, 293 bp, Homo Sapiens
aaagagggttggagctaatggtcaggcccaagaatgtggggatggagaccctgtgggggtgagctgagaagctaggaggaagcggtcagagaatggagatgctggaaactcacagagggaggaggggagccattattggtgacggcagtggctcccaacattggccagatgtccaaatcacccagggtaaccttttaaaatcccaaggcctaggctacactgaagcaattacatcagactctgtgagggaggacccaagtatcagtattaatttttaaaaatgcctcagaggt

SEQ ID NO: 426401 - DNA, 381 bp, Homo Sapiens
tgtttgcggcctgctgagttttgccattgctggtacaagaattgcagaggcggcggcactgtatctgacatgtgctctcctatgtcctgccctgatgctggcagcgggtctacccccagctgccccatctcctttattagcatcaaacagaatttggctcaagcgctggctccagcactactcaagatctgacctcagatgagctgtgcctcacttatctgagctttctcaaatgtaaaaagagcaataatggtctgtttcttgtccaggtaaaaagagctgatgtctatagagcacaaaggtcaggctgtgacacatgcagtacttggtattttaccaaggctggtgaaactatgtgtagagtaagtaaacagattctga

SEQ ID NO: 426402 - DNA, 127 bp, Homo Sapiens
tttgagaaactctaatatacagcaatagtttgaggttaaagacagacccttgatattttaagatagttctctcattttcagcacatatatgacatatttacattctgatgtgttttattatcagcct

SEQ ID NO: 426403 - DNA, 365 bp, Homo Sapiens
gcagaggatttagacttcgtctaacagagctgagtcctggatggcgtcgcgggacactagaacccaggcccgcagctgccttcatattcccttgtaaagtgagagaaagataatctttggctaagtcacagacctatgttttgctacttgcagcctagtatagtctgatttaatataggacctgccctacccttactaggtatcgcctgctttcccatagacaaaccagcatgccgagaaagatctaacttctagatttctctaaagatgtgtgtctgtgaaggacaagtataggactgttccgcttcatactaccatgactatgtgagttcctagcgacttatgaagtctgcggactcactctc

SEQ ID NO: 426404 - DNA, 142 bp, Homo Sapiens
gagagaaagcacacacagttcagggctaatgacagggcaccgcaggtaggaacatgactgagccctacagcttgcacatgtgtggttgggcaaaagacaattgcagatgttcctggaattcccaaaccggatacaaaatcgc

SEQ ID NO: 426405 - DNA, 246 bp, Homo Sapiens
actgcttcctaaatggccaaggataaaggggaataatcccaaccttaatgccgcagtgtaagtcaccttgattccctccctgctcagctctacctgaagacactaaaacacagtatatattccaaaggaaaaagtcacagtatttccctggacagaaccagaaagaggggagaaatggtttgaagcttactgatgatcaaactgtaaaagactcagaacttgactttaaaaacactcttcttggcc

SEQ ID NO: 426406 - DNA, 223 bp, Homo Sapiens
cttgtatttatagacttctgatcccaggctttatgggcggagacatgcttttatgaggataaaaacccacattatccagcgaggaacacatgagggatgtaaaagaaaagaggtcttactgtttcctttacattctgtcttctacagtcctagtgccactgctttagtggaggtcatcattatatcttgcctggaccagagaaaaagcctggcctaactgggc

SEQ ID NO: 426407 - DNA, 363 bp, Homo Sapiens
  misc_feature (306)..(306): n is a, c, g, or t
gaaggtgctgaattcccgcgtgtgtttaaaatacacgagcgcagactccagtctacaccctgtagtccgcattaagcaggcataggtagctgtaggagtggaacaaaagcagcctgtgtttaatctgttcacaaatcttttgttcctaaatacttggaaaggtggttagaccaagtaagggagagattcaggactgggtggaagctttgatttagactgatggctgacaatgcagataggaggctggtctctctaaacacataaattcgttatctaaacagagtgtgtaatgtcacaaatgcctgngaacctaactgaaacagttcatgatttgactgtagtcagtccctgtttgggcactcc

SEQ ID NO: 426408 - DNA, 326 bp, Homo Sapiens
atttcaagcctggatgagagctgatggtgtgagggggtgtaacgggtggtcccagtctgttcttggtagtggtagaggaggggagaatgaggggagggcttcccttaagaagtgatgtttaaactaagatctgaaaaaatgagtttaacctgattatgcacatagttatggaaagagcatggtaaaaacagtgtgtaggaggaactatgaaaaagccaatataaccacagcacagagatgcaagcacttgctgagtttgacttaccagattgtgtatgacttataaaccacattaaatattttggactttcttctagcagcagtgg

SEQ ID NO: 426409 - DNA, 297 bp, Homo Sapiens
gagatagaaatagaggtggcagttgctaaacccaagtgctggcccttgtgtaagttctgctccactcatctagacagtttcaaaatgccattaaatattgaccccacttgggccagccccggggtttagggtatatgttgatgagccttgcaggttactggtgtgctgctctacccagcagaggacaaggtgcagtgggaagaaggagccttcagtggtaaccggaatcttctgaggcgccagggaggatgctctagaggacaccttgaacagaggcagagaggcaggaaaggccca

SEQ ID NO: 426410 - DNA, 278 bp, Homo Sapiens
ggtttaaggaaggtttaccctggctcaagttggaggttttgattaatctctcggattgtactttctatgactgaatttggagtttgtttttgagggtggacctgcttatagcctaagaatacactgaacagttacagggcctgccatggctgtatgtggtggcaggagaaaaatctctctcaatgaataaaatttacaaggagtagaaggaaatacaaaccaaagctttgttttgatcatgtcacttgtcttcttgtcccacaaaccaggtaccagtg

SEQ ID NO: 426411 - DNA, 431 bp, Homo Sapiens
  misc_feature (364)..(364): n is a, c, g, or t
ctggcatgcctcgcaggcggactttaaagaatcccttgttggcagcctgctaagtcattaaatcagttaatatttattgagactttatcccaccccagatactgtgacctatgagggaactatgataattactacaacatacctgtgacccccaagatgtttgctgtcaagagccagacagagatgcagacagacacctgaatgtgaagtgagacatgctgtgggcaaaagcactgcagagacacaggcgacggagctcagttaccgaagagatcaagtgagtcttttttattaattaagaaggtgatcgatgtttgaaaagatgtcaatgataattaattagaccctagcaggttaccatggntaaggactctgtgaagtaatttaactgagacaataaatggtggtgtcagtgctcatgtgaatatcat

SEQ ID NO: 426412 - DNA, 161 bp, Homo Sapiens
tataagtggtgtgatctgatttttgttggctggactgtagaatttctatcactgcaagttggaaacaacaccaaattgttaccgaactgggccaccagccccagaaaggaatactcgacttgccaaacaaaagtggatccctccacatgaaaaataagggg

SEQ ID NO: 426413 - DNA, 415 bp, Homo Sapiens
ccttatgaaggagaaggttcctcttcaaagagggaaacccccatttgccacttctgtgaatccaagaacatatcattggcgaggaaaatccagattacgtaagaaattaggcacactgtcctctatgtgggagaaaggcacattttaagtgctggaggaggaaacacggtcacttatcaaaaaaggcaagttccaatgcacttcagggctttgtccctatatggcccgctagccttaccaaacccaagttccaagctgccaacaaggcaggccaaattgccaacaaagcccattccccaagacacactctctctctggagaactaagacaatgacaaagccacgtatcacgtgcatcatgtgcctggcattcccagaggttctggtatgtaccacatggacaccaagatatctca

SEQ ID NO: 426414 - DNA, 343 bp, Homo Sapiens
  misc_feature (93)..(112): n is a, c, g, or t
ttgccaaaaaaatctcgaagttacgtttgactttcctcttttgcaccacgtcagctgtattagcaactcctgttggctccattttcttcggcnnnnnnnnnnnnnnnnnnnnaaaacaaaacctaattttttcaacaagcaggttttccagggaaataatttgggctaatggaaatttcaacccccggggtaaaggaggtttaactgccttaagcctcccaggaggggggaattacggcccccattcttaaccccgggttatttggcagaccctttatttgaccggaccccagtttggttttttccaaaggaaccccggccttttttctttcaaatagcgggg

SEQ ID NO: 426415 - DNA, 149 bp, Homo Sapiens
tccagtgagttttatactttcttgtttttgtgttgctaattagcatccttttctttcaacatgaagcactctccttagcatttcatataaatttattaccgtcagacctgtctaagaaatataagacaggtctggtggtgataaactcc

SEQ ID NO: 426416 - DNA, 434 bp, Homo Sapiens
aatcctgaagcgcctgtgagctgtgcttgagtccttgtacccaaaacaatgatcttttttctagaacacatatgggcactgggctcggtgaaggcccacctgcccatgcttgcttggatgcaggaagacgctcacagtaggcgcacctgggagctgctgcctctggatgccacaaggagaagttgctccaccttttgagcagagctgagccaagggccttaatctaggccctggttacaggttggctccgctgaagggatagagagagtaagggcttgaaggtgcctcttcctcaacctcttaggccaagagtgctcaatggcatgccagggcactgcagagttggccagtggccctagccactggatcctacactcctcccctccctcttctggctttcctcccatcctccttccatcattaagatgatgacg

SEQ ID NO: 426417 - DNA, 324 bp, Homo Sapiens
aagacatttgtggagcctccccaaaggcctgtccttaggggatgtgatcctcactactctgcagagaagtcagtcacagggtattcctgcctccacacagcacttcgctcccaagctcggtggctactacttccctagcctagtaactgttattacacgtgggaaatgtgaagccgactggactacccctactctttacctggctgaaaacccaactgataagcagagactaagaactccacagtctccaacagcgcaacagggaatcggctttgttttctataaacagacaggcaagaaaaacgttcaggttaaaacgcagtc

SEQ ID NO: 426418 - DNA, 381 bp, Homo Sapiens
tcctgagtgcagcctgctgaggagttgccttatgcaaagcacagttcatgtgctcgtttcaaacagtggaaaaacaaaccaggaaatgcttctctgtctgtctgtgcctcctacctgccacaggagaactgagggtagaatctgcgtacccttctcagcacaccacaaatcctagtcacttagagagacacagactgcctacaaggctagtcaactcccaaccacctttgcagaagggggagagagtgggagtttgtgaagagcaaaagcaggaattggatgggaaaatggtctagggctcacgtggagtgacccaggacccagagtctcacctcccaaggctaggccttgtagggcagcaaggccaagcatgctgcagga

SEQ ID NO: 426419 - DNA, 350 bp, Homo Sapiens
gggggctgtgaatcagagggaagggtgataaaaggaatggtatacacatgaggggccaagggtggagcagagggagcatggagttaccggctggcccaaagtccccagaaacctccatcaggctcttcctttctggcagggtggccttcaaaggaggactcagaacccagggaccactgcatttcccaggccctgagccccagtgtgggaatcacatcctccaaacccacagcgcccctcaaattcctattcaggtaagaaggcaaaaagtaacagccttccaagcctacgtggacccagcatcggtttttctggtttcccctgcgtcagaggtatggaggtctatgttc

SEQ ID NO: 426420 - DNA, 260 bp, Homo Sapiens
  misc_feature (118)..(135): n is a, c, g, or t
gagcagtgacggaatcatggctcaccgtaaccttgaactcccaggctcaagtgtttctcccaccctagtcttctgagtggctaggactacaggcatgtgccaccaatacctggctaannnnnnnnnnnnnnnnnnagagacaggggcctcactatgtggcccaagctgatctccgagcctgatctgcctgggcctccaaaaaggctggaaatacaggcgtgagccatggcaccgggcaatttatttcctaagtgttctcc

SEQ ID NO: 426421 - DNA, 494 bp, Homo Sapiens
gccacggaatcatagctcactgcaacctcaaactcctggtcccaagtttatcctcctgcctcagcccccccaggtagctgggaccacaagtgtgcgccaacaaggccagctaatttttaagatttttgtagagatagcgtctcactatactggccaggctgatcttgaactcctgggctcaagcaatcctcccacctcgggagggtgcataatcttatgcatttcattctaatacaaacctaaaactcaaaagccccaacacattttgatcctcaaaaatactttctacttttctagaatccattataaatagatcttcaaatgaagttccaatgtctattatttctattctgctgtcagaagttgggaaagcccagaagaacgttccttgttgctctggaattgaaacagagatcagagtcccagccattggacttgccacttaggagtcagcggacctcagcagatcacctgctgcactgcagagaccactg

SEQ ID NO: 426422 - DNA, 418 bp, Homo Sapiens
  misc_feature (117)..(222): n is a, c, g, or t
tctccggaggcagtgacggaatctgttcctcagcgaggaccccaaattagaaacctgggtgctgtgcttacacttcatgtgtgggtgatgaaggggaaaccatgggattgctaaggnnnnnnnnnnnnnnnnnnnnnnnnnnnnnnnnnnnnnnnnnnnnnnnnnnnnnnnnnnnnnnnnnnnnnnnnnnnnnnnnnnnnnnnnnnnnnnnnnnnnnnnnnntgctctacgaggacagcagcgactattgtcatttaaagaaataaatcatcatatcctctcacttacccttcattcaataagttggcaagacctgtagattttacttactttaataccattgactctgccctggctttctaatccttctgggttggcacttcttacacaattcccgccataattggatggatcacac

SEQ ID NO: 426423 - DNA, 402 bp, Homo Sapiens
agacagcagtctctgagaactcttaaaggcctgaagatgcctgttaaaaatggacagatctaagatgcaatacagaggagatgctgggagattataaggatggagagtagatgagaccagttgtggttgctgggagtcttcattagtagtggtaagagctgattcaatgacagccaggcagaaagggaaggggaactgttttgtaggtttggggataggaaagaggggggtcaagtatagtcataagcagctgcctgcacatcagaagtggagcccaggagagcacaggccttgcaggtcctttggtgtgtggtacataaacgtgtggtaaatagagggattaatctgcagaaaactccctgcatctcagtagctctcaagtatgtccaggcccacttcttt

SEQ ID NO: 426424 - DNA, 317 bp, Homo Sapiens
ggattaatgagatcacatatgtaagggcatttagggtaatctgaagtttctctgcagtttctgcatcttggcctaggatttttaatcccttaggaaaattctgtctatcttctgggtagtttagggttagtatggctcagagccctaccctggtcctcttgtcctgacattaattgagttagaaataaggtagtgctcaatatcatgctatataccactgctcttggcacccttaaatccagccatactcaatacccccaatattcccatttgattcactaatgactcaagctgtcaagtacagtagaaaaggtaac

SEQ ID NO: 426425 - DNA, 447 bp, Homo Sapiens
acctggcgacttgttacacagagaaacccatgctttacatggtatgaacacgggcacaccctttgggcacttaggaacatggcatggcaagtggtatgctttgtacagctgtgctaccgtgcgtacacagaattcgagaactttccatttgtaaagtcaggacttgactaggtaaagggcagatggaaatttttaaagccttttattcagttcattctcttaagaattattccaaggaacaaagttacctgaagagctcatataataagaagtacaaaagaaactgaaaatttggagtcactgcacagtaactatctatataaacctcaagatccacgtgaggaaaatttccccataatttccttttataggccaaatggttataattacaactctcctttgaaggcaaaaattactcattaaatggacacagcctgttttgctagt

SEQ ID NO: 426426 - DNA, 274 bp, Homo Sapiens
ccgctgcagacaacagcacatgatgatcaagcgcggtgtcgctagaagtactttgtaagctagaaatcatctaaaggagcttccatttcacttacatctcatttggtgaatgagaatgtaggagtgatagtcagtaataatagcatccaccattagttgaacagtcaattaaaataatcgaaagaaatcaattgaaaaaacaatcacttttgcaagcagtatttagtgaaggaatatatagactatgttgaatcactatcataagtgcctgtgg

SEQ ID NO: 426427 - DNA, 314 bp, Homo Sapiens
gctcggtacctgctgcagacacagatttacttgtgttgtgaagatctgagaagactggtataacggagagagtatgggacaaatgaaccaaaaggaaaacctcaagaatgcttcagagtgcatctcagcatttcctaagtaaacccaggaaagcacggctgcattccaataagcagctagagctaagcagggaggtgacacgaggaaaagtccaacccaaccaacctagacatcgttaaactagctcaactatcccacttatcacatacttaccgacatttgggtagagacacctcctgcagcctaatagacac

SEQ ID NO: 426428 - DNA, 178 bp, Homo Sapiens
gctcggtacctgctgcagacacagcataataacagtgggtaaacacatgggctatgccatcaaagtgaatctaaaccccggctctgctgtggtttacacatccatttcctaacctataaatgggggtttataagagtacagtacctacttcaaggaattgtagattcaacgcaacatt

SEQ ID NO: 426429 - DNA, 114 bp, Homo Sapiens
tacagcagaagaatggagggtgaaagttcaggatttctagccagtctgtccaggttcagatcctgtttcttccagtaccaggcaacgtggggtgggcagtcccttctctgtgct

SEQ ID NO: 426430 - DNA, 119 bp, Homo Sapiens
cagcagcagacaacagcgacaatcactgaccactgtggtgcttttacgagctacagtcgtaagcgtgattcattttcgtgctaattatggctttaaccttctctaagggcataaaccca

SEQ ID NO: 426431 - DNA, 370 bp, Homo Sapiens
tgagcgtgcgatagtgtgctgataatttgtgcgtgatggtactaacctaccggtgctattgatcaggctcagtttgaattcttccgcgagacaggtaatagttcatccatcatttgatcccctgtagtagccgccacagttggttttcactacctctccctacgactttgcgtgactccaatacatctcctggttgtcctgtgcggtagttggtttccagctgttggaagacgtcttgattgagagactgttgatcgcacccccatcctggccacatctctctcagtatctgataatgctctgtccacacctccacaccaccttcctcctctaccctctgtcacaaaggcacaggtccctcttccaccaa

SEQ ID NO: 426432 - DNA, 104 bp, Homo Sapiens
tgcagcagacaagagcaggaaacgtgagcaggagtcagtctggcgtgtatcccacccctgcacagcaagaaccaacagcaagctaccactgtcacgtaaaagct

SEQ ID NO: 426433 - DNA, 167 bp, Homo Sapiens
ctaagcagacatcagcaggtatcaggactacatatggctctaaaaggtccactggattaattaagaaagacgcaccttgtattagccactgtgaactgtatacactgtggtcaaagctctgacaaggtcctttccttattcttctgattattcctattgggattatg

SEQ ID NO: 426434 - DNA, 389 bp, Homo Sapiens
ttacaggatccccactcagcaccctcttctacggaggaaggaacgggccagcagacttgcggcactcctgctccccttcccatttctgcacttgggggtctagtgaggcctcctgtgcgatacgatgaattcctcccgtcctgtatcatcagacctcccgcctgtgatgcctcctggatctactcctttcgcctcctcccttccctgagagcagcccctggatcatgctccacctccgctgctgcctcggaccacctgcccactctatctgccatcacgctgtccacgctgagctccctgcgcctgatcatggcttcatcgttgaacctccttagaggaacacatcaggctgtgcgataccacgaattgggattctaggttgccccaga

SEQ ID NO: 426435 - DNA, 222 bp, Homo Sapiens
ttgatgtcgtgagaaggctgagggctaagggacgcctcaaggggactactcagcaatgctgtgagaataaccttgagagtctatgacttcttagcttagaaacttttctctggctccatagctcaggacatgaagactttgctgctgtcatttactgtgctctgctagtggattggggcattaatgtaactcacagcaaagactctccgagtgtagtgtttc

SEQ ID NO: 426436 - DNA, 182 bp, Homo Sapiens
ctgtgctatacagtgcttacatgcccatctcagctgtgggggacaagaagaccacaagccattttccctgtggcatggggagacatttgagcagagcctaagaattgagcaggagtcagcagacacaggggaggcaccaacacagtcagggggccacattggtttgtcatggaaagccacca

SEQ ID NO: 426437 - DNA, 388 bp, Homo Sapiens
taggattatacagggtggtacaggagaacagtaaaattccaggcagcaatttttacatgactagcataaaggaaactattgaaatagctgcataaactaggggctgacaagaccttaaaaaaccagagtgtgggccaagctggctaagactgacccagcatggcactggatttgacctaggtttcacctaggatctcattatatgctcattaacatactaaatcacatacccaccagcaccatgcagttccaggaacacccatatttggtgtagaaatgggtggtactacagttctgagaaatcgtaactgttttcctggaatcttcctgaatattccatgctttgcgtaaagaaacccataaagatggaagtaccaacccgcttggt

SEQ ID NO: 426438 - DNA, 448 bp, Homo Sapiens
atgtgctgactgcgtgggaaacacgctctgaggcactgggcacctggaggtctgagtgacccttggactggggcttaggcaactgggttcctaagggctgaggactgagggactcagaggttgtagaaaccaagacttgggaatctctggggctgtgtgttggggtcttaggcacccggatgtggtgtgtaaggcaatgggacttggagggtgtctaaggcaatgggacttggaggtctgtggggctgtgaccagggggtctggggccaggatggtgaggtctgagcaactggcatttcaggtctaagggcccaggatttaggggaggacatctcataggctgtgtctggtggttctagagaccaggagctgagcatatgagagaccagacctcaggggcctgtgggtctggtactatgggatctgctgggtcaggccttgggatgtc

SEQ ID NO: 426439 - DNA, 165 bp, Homo Sapiens
tcggaggactgactgtcttgggttaataccctgcttgtggcatgtttcccagagtgcctgcaaagacctccatgctgcagtccccgagccacaagttcagaagtctgcggatgcgctggcaatgtttgttctagaagaaatgtgagaaataaacattaaggtatc

SEQ ID NO: 426440 - DNA, 165 bp, Homo Sapiens
  misc_feature (32)..(32): n is a, c, g, or t
gtcgagagcactctacgatgttagctaactgnaaaaaaggttgtcaccgagtcatccttcaacaaccttatctctaactaccctctcttcatagtctacttcagatagacaaacttaattatctcatttctctgaaagtgccatgctatttcatggcttcacaca

SEQ ID NO: 426441 - DNA, 172 bp, Homo Sapiens
aaaattccaccttcagatttgacctgtggtaattctgtccagactgccgtaacagaagaccataaatggggtggcttcacatttttacacaacacatttttttctctcatagtatctggaggcgggaaagtccattatccggttacgggccaacgtgttaccgctagctgtg

SEQ ID NO: 426442 - DNA, 149 bp, Homo Sapiens
tgattgttgtgcttacatgttggaggtaacctgtgatgttgtcacgtcacgtcatttgcgcagtgcatgcattgtgtgcgcctgtgggtgtgtattgtggcgggcagtgaggggttataagcccagaccctccaggtaacaaccacagc

SEQ ID NO: 426443 - DNA, 192 bp, Homo Sapiens
tgcatgacagtcacagtcaatttctcagcgcacccatcaccacgaatacatacattagatattctgaacttgctcatcttaggacttcacattggtgtcagtgttttctgacaaatcacgtgtatcaggaatgaatgagggaggtgtggctgggtgaaggcagagagccgaaccctaacaggtccacatctg

SEQ ID NO: 426444 - DNA, 112 bp, Homo Sapiens
ttggggagcagcgatgtccaaggtgatcacccctcgtagcaggatgaagagttgctgatctgtggcattgcaacattgtgcagttacgctatgtgccttaaatccatcaaag

SEQ ID NO: 426445 - DNA, 178 bp, Homo Sapiens
gggtagaactggatcttccaaactcgttcatgcagctattggaaggaggcttcagatccttgacaaacaggcttcttcatagagcagttcatgacatagcaactggcttcctctgaaagagcaagtcacgctccaaagagggctgcagacaaaagcgttccaagccagattccttgtt

SEQ ID NO: 426446 - DNA, 405 bp, Homo Sapiens
  misc_feature (78)..(219): n is a, c, g, or t
tcgtgtcgtgatcggcattccctcactgttcaccctgcagtcttctccctcactgttctcctcatcctagaggagggnnnnnnnnnnnnnnnnnnnnnnnnnnnnnnnnnnnnnnnnnnnnnnnnnnnnnnnnnnnnnnnnnnnnnnnnnnnnnnnnnnnnnnnnnnnnnnnnnnnnnnnnnnnnnnnnnnnnnnnnnnnnnnnnnnnnnnnnnnnnnnttcgctcactcacagactcaggatctcacgatctcagtcacgatttcactcatgatctcactcacaatctcacgatctcactgactcatgatctgacaatctcacgatctcagactcatgatctcacgatctcacaatctcactcacgatctatctcacagacttatgatctcactatctcactga

SEQ ID NO: 426447 - DNA, 436 bp, Homo Sapiens
gatgtacgctgcaaaatcgtaagtgcttttacagaattgcaaaaccttgaagaaactgcctgctccgcctccagaccttctcctgcatttctgctgtggcatgcacaccgcacgcccaggtgacaggcagcttcccccagccatctcatcctcatgacaaacccacaagactggggctccagtggttcccatttaagggatgaagcacctgaggctcaaagaggaaaagtgctttgcccaaccggaccctatctcagatggaatcccccttgaattaccgtcacttcccctctatttgcttgttcaccttcaggagagctgcacactgagtcggtgatagaaatctctccccagcaagtcgcacacccgaacccgctgctgccagcccgtagctgccccaggtgtgtctggtggctcatctgtggcttcctagtag

SEQ ID NO: 426448 - DNA, 220 bp, Homo Sapiens
gcccggtgtgtgaacgcattcctacttctccgtgtgtgtagagtaccgaattcttactcactcctgtgtgtgagtaccggcatacttccgttgtgcgtaagtactgcattctaacttcccttgtgtgtgattaccgcattcttacctctcccgtgtgtgaatagcgaatacctagttgtcccgtgtgtgagtactgcattcttacttcccttgtgtgtga

SEQ ID NO: 426449 - DNA, 461 bp, Homo Sapiens
  misc_feature (134)..(373): n is a, c, g, or t
  misc_feature (404)..(413): n is a, c, g, or t
atgcatactgggtgtatgaggtaagtcaaggtcaattttcacattttcgctttttaaaattaggtataatttgcataggtagaattcaccttttctagggcttttttaaatgagatggagtcttgctctgtcgnnnnnnnnnnnnnnnnnnnnnnnnnnnnnnnnnnnnnnnnnnnnnnnnnnnnnnnnnnnnnnnnnnnnnnnnnnnnnnnnnnnnnnnnnnnnnnnnnnnnnnnnnnnnnnnnnnnnnnnnnnnnnnnnnnnnnnnnnnnnnnnnnnnnnnnnnnnnnnnnnnnnnnnnnnnnnnnnnnnnnnnnnnnnnnnnnnnnnnnnnnnnnnnnnnnnnnnnnnnnnnnnnnnnnnnnnnnnnnnntgagccaccgcacccggcttccaactgtggnnnnnnnnnngagacagagtctctggctcctaggctgacgtgcagtggcgccatctcg

SEQ ID NO: 426450 - DNA, 284 bp, Homo Sapiens
gtcggctcatgcagagaccgcgcggaggttaggactggattatgttccagagaaaatacactgtcttgccactctggtctcttctccctcactgtatcagaagtaggtccagaacgcaggaaggagggggacgaaggagtcagtgggagcagatgagtaaaaagcacctgcctttggtatccttcgttgatctgagatgcattatccgagcccgggaccacggaaaagccgccagtttcccctaaccagtgagatgtgcctgctggatttttcctgcagctctg

SEQ ID NO: 426451 - DNA, 321 bp, Homo Sapiens
tagtcggtcctggtgtcagtcggctcatgtatttttttaattcatcaattttgtagctcataattcttttgaggactactatcctaagttaagtggacatactttccttacagctccttcttcctcttgttcatgggcacctttcatttctttccttaaatactaatagtctcacagatactagattatatttcagtgcattaccagtcctcttaatctagctgggtaggctgagctgtggtcatggttatttgcagcttggaaactctacttgcatgctttctatttttgtgcagtttgagaagtcccttttcctcatgg

SEQ ID NO: 426452 - DNA, 164 bp, Homo Sapiens
ggcctggcttatcggctcatcctccctacacacaagggctacttcctgaaccaacaccgaaggcggtggtgctggttcagcagactcaggatttgggggcagagtggactaaacccttggtggttttccaacctagttcttcaaagcagcagagctcagagtca

SEQ ID NO: 426453 - DNA, 259 bp, Homo Sapiens
gagctgatattctcagttggaagggggaaggggagacaggattgtgagaagggttgttctccattttcaaaataaagaacttcgactactgcacttccccaaatgaggctttctctccaggcacatcttctggttcacaagctgctcaagaagggcaggaagggtcaccgcaaatcccatcccattgttcctccagatccagcttcccagagattacagtcagctcatctggaaaggagcctgtgagccgacgagtcca

SEQ ID NO: 426454 - DNA, 140 bp, Homo Sapiens
ataccagtgccacagcatgcgatgctctgaatggcattccctctctggtcccagatactcatcactttacgtacaaagcggcagaataacctgactgacacgataaccgaatggactatcgcacagagtgcctaatagta

SEQ ID NO: 426455 - DNA, 376 bp, Homo Sapiens
  misc_feature (72)..(145): n is a, c, g, or t
gtatgacaacagcaggccttacctaacgatcgtatctttcacgtcacatttttataacagagagaaaaaaannnnnnnnnnnnnnnnnnnnnnnnnnnnnnnnnnnnnnnnnnnnnnnnnnnnnnnnnnnnnnnnnnnnnnnnnngatatgcacagagtatcttgggatgtgcactagaaactggtcagagtggcagccaccacaggggagaggaccagggggcttgtgggatcagggtgaaagggagactgcttttcatgtgctcccagaaatttaaaaccagtgaaatgtcttatttacttactgaaagtttgtaaattaccaactgagcagtctctaggaagagcacacgtttggagtctgagagtcagacag

SEQ ID NO: 426456 - DNA, 102 bp, Homo Sapiens
attacctgcatctgcagtatgcatgttagggatagtgcttatcttaagagtctgtggcgtacttaaatatcacaacatgacacttaactacctgacccctta

SEQ ID NO: 426457 - DNA, 260 bp, Homo Sapiens
ctagaaaagctctgaaatttccattagcttgttgtcagtttaacattttctcagctggaaatgcatggtataattaagaggatttaaagcataatttaacaaaatattactctatacttgacattttttaaaatgacaaattaaaatagaaatcatgcccttgtcttgcagataaggatgctgaagctaaaaacaatgtccaaggccaaataactgacaagaagaaggccaaggcatctagaaaccatgtcttctgattc

SEQ ID NO: 426458 - DNA, 313 bp, Homo Sapiens
atttcgcctgctagacaacagcatagtgggggtcctgggggtcagacagttaggtaacagcagcccctcaacatcaggaggttccctgggggacagttaggtaacagcaacccctcaacatagtgggggttccctgggggtcaggtggttaggtaacagcagcccctcaacacagtgggggttccctggggcgggtggttaggtaacagcagcctctcaacatagtgggggttccctggggggcagacagttaggtaacagcagcccctcaacatgaggttccagtgcagatgaagcggagcaggcatcgggg

SEQ ID NO: 426459 - DNA, 285 bp, Homo Sapiens
atgaggttacgacactgtaccggtaactaatacaggatcatctgaacaccatgttgtacccttaatgaaaatgatgggtaggctctaatgaaccccaggcatatatgccaggactcatgaggtcagcacactgtactaagggacaatgacacatcagtgtggaagggatggggctaataccacgatggagacaaaaccactttactggtggctaatcagcagagtgaatttgggctaatgtggggagcgcagacaggctgatttcatatgacgattgaagacact

SEQ ID NO: 426460 - DNA, 153 bp, Homo Sapiens
acagagagtacatctatcatctcagtaacaaccctttccaacacatagttatcacatgatcttcttactctatgcaggatacgtcaagacccaacaaatgaaacacttctcctggcacattcatatccccattatggtttatcttttttcaaa

SEQ ID NO: 426461 - DNA, 264 bp, Homo Sapiens
aaggtattaaagaaagcagatataggacatgaggtggttaagtctcaagaactatggctccgggcaagcccaacctgtgccctgaatgaggaaataggaagccgcaggcctgacactcctttcctacaccagcttttcttctctcaggtttctaaagccagggagatgccagttgtcagcctgatcgcttctttttctcagtcatttaagacccatttatgggcacccgctttgtgccaggcttcatgctgttgtctgctggag

SEQ ID NO: 426462 - DNA, 316 bp, Homo Sapiens
gctatgctagctaagctttagtgaactgcatttcagtatctgggtttaggcttctaccaacaattagaggagaaatggccatctggcttcagctgaaattgccattccttgtttcttagagtatttcatggaggggactatgccataaattcctcttcgagctcagcagtagaaaatggatggtccctcctgacgaatccatctgcttccacatttcaattttatttatgaaattgagaattcataacctatcctgtttcctttttagctttggtttcctaaagcttgaagccaaaattagtgcttcattacaata

SEQ ID NO: 426463 - DNA, 348 bp, Homo Sapiens
  misc_feature (97)..(150): n is a, c, g, or t
  misc_feature (165)..(217): n is a, c, g, or t
cttcgttacacagcagagaagacaccaggccgtaacgctgacacatacacactcatttgcatgctcacaccaaaccagagacaaactcacaagtccnnnnnnnnnnnnnnnnnnnnnnnnnnnnnnnnnnnnnnnnnnnnnnnnnnnnnntcatcacgctcagannnnnnnnnnnnnnnnnnnnnnnnnnnnnnnnnnnnnnnnnnnnnnnnnnnnntcgcctccagatctgcgcgcacatagcaaacccctatgcgctttcactgtccaaacagacacacaagagactcatccccaggcactgacacacacatgtaatgcacaaccactctgcccctacgtggacgg

SEQ ID NO: 426464 - DNA, 423 bp, Homo Sapiens
cgacacagcatattgttatcagcatcgttaaaatcatactctttattgtagcagaataattgataccactgcacttcaaaactcatgtcttatatgtggatcactctgaaataacatttcattttctttcttcagaaaaatgatgttccaaagagaagttcagtttaaaaatttatatgaagagatttctgatgaagcaaaaacatacatatactacattaaaaaatataaaaagatatcctacatatacaagattaataaggtttcatgaaagtaacaggcctgaagaaactttgaaatctctgcaaactttcccgtcatttacggaaaacataaaacctgaatttactatctgcccctttcaactttattctatttttctaaagcatcctcgaaataaaaggtagcattattggtgtgagg

SEQ ID NO: 426465 - DNA, 116 bp, Homo Sapiens
cgtcagattaagcttggtgagacatatccaagttcacatttttctctaagtgctttcccatcatcatactggtccagccctatcctcagatttagctatagaatacttctttatgg

SEQ ID NO: 426466 - DNA, 403 bp, Homo Sapiens
ctaagacacagcagagtgttgacgtatgtttactgtcccagaatcactttagttctaatgtaaagttacctctgccattatttcagtggagtgtggaagaacaggaggtaaggtcataggatgcaggaaagaagatgttgataacctatgtatgtgtgagaacaggacatagatagggtaggtcatggctaggatcagtttactacttccaatatcctggcgttttctagaaaactatttgagaaagcacatattactttgaaacagcagtaggcaaagtaataccaaattgtgatgtaatcatcaagaaacccatatttgtaataaggttaattaaatttgctgcagtcttgagacaagcctcctgtaagtgtgccagtaaatctggtcttgctttatcaaa

SEQ ID NO: 426467 - DNA, 400 bp, Homo Sapiens
aaggttatcatacgctcaaacattcactttacaataggcaggtaagggagtaatgggtacaggttattgcatcgacgaatacagttttgtcgacaatgtgttcctgtatttatcaggatcctatactctaaatcctgaagaatcagtgtgcataatgcttctaacctcttcacctttgctccacggttgtcgataccagcatcattatcttaccttagcattaggctgagtatgctccttccgggttgcaaaatgcctaatgatcatgtagccccttattaggcgcctattcctcttctatagggagggaaggaagaatatcaagaaagcctcatgtctaagtgccctgtatccctggcgatctttatgtagcatcagagaatagacactgataaaaaca

SEQ ID NO: 426468 - DNA, 340 bp, Homo Sapiens
  misc_feature (212)..(212): n is a, c, g, or t
ggtgtacggaatggggggtggtggccgaataataatagtggtacatgctaaatttagtttagaaaatactgggttaattcgataaatatttaaggaacatcaattacatgccaggctgtctactagatgcagagtgagacagattctataccagtaattttcttaaacgcctcggaacaagtctaactgttcccattatgacgcgttcccanaagttcagcattatattcctacttatggacaaatttcatcgtacccagtgagccaacagaaagtggcaattaagtgtcctatacagtaagggcaagagtctaacaacacgcatctctagtgctgcctg

SEQ ID NO: 426469 - DNA, 245 bp, Homo Sapiens
aaaactatagataacacattatcgaaacatgaagcaactatgtcattgacaagagtgagaggtataatgcttgcccacacagatcagatgggtcatataccctacatatactatgcttatcttgcttacttagctgtctctctgtgattgatggtgtaaagtatcaggtaatttagccccagtcggacaggctatcttcaccgaagcgccgcacataatgtcttacgtacgacgatagcacacac

SEQ ID NO: 426470 - DNA, 160 bp, Homo Sapiens
cgggcatgtacagtgtggactgtgtgtgcgtgtgcatacgcacgtacatttgtacgtttgtgggatactggtgggtgcacacgctttgtatgtgtggacgtacacgtgtctgtgtgtggggtgagtatgcacgtgtgtttacacatattccatacaaaca

SEQ ID NO: 426471 - DNA, 140 bp, Homo Sapiens
ctggtcatagcccttgccgagggttcacgccaagaagcaagaatgaaattaataacgaagcacatcttcagagaggtttatcactactccagcatgacccagccagtgagtagtgcaagggaatacaaatccccttggac

SEQ ID NO: 426472 - DNA, 337 bp, Homo Sapiens
tggatagtaaatgtaaggtgttctccgtgttttccattagctgaatatcttccaatttgtcactttgaagatgacagtccatctggaatattataggaaaggctggatgccccgttgatctactgattgctcctcaacccgtatttctactggtgattttctctatgtccatatgcaggtgagcttctactgatctggaaatgccatgtccttcactgacacactggacaagaagaccatcagtcatatgcactttgacttctcagaaaacatgagggctgcctcctgattgcagccagcagaaagtggtagaaagaagaagactttgaaatgagac

SEQ ID NO: 426473 - DNA, 161 bp, Homo Sapiens
gtcggacctgcttacttggcgttgcccttttcctaacactcacaaagctacagtaatactaacatctcagacgctcagtgaaatatgaaagcgtctgaactatcctgccctgtcatcatcctagtcttcatcgccctctcatccatacgcccaggtcagca

SEQ ID NO: 426474 - DNA, 518 bp, Homo Sapiens
ggccctgcttacgtgggcgtatgtatatatgcgagacaactgggcatgtctggctgacagctggagggaaggacataaggtctgtgtgcgtccagaggagacgctgcctctcccgagtgcgactcccctggagttctgcgctgagtctctcctgcttctcagagaagtcatgtggacatgaactgcaagagtctctgcaaagggacctccagttttgtttggtgggagataaccagctcactggggcttctccatccacacccagccatgggagtctggaaatacagccctgtggaattcttcgttgcccgacatcccttacactcctgtccctaggtcagtcagccctgggctctgaagtcctgaggccctgaggccccacatctgctcaggcagagcactagcatcccggggatcaactgctcctccaaagagccactcctgcctccctgaggcagcaaagccgctgagcttctctgggcaaaagagcagaatggcacccggtgaaacctgtgcac

SEQ ID NO: 426475 - DNA, 515 bp, Homo Sapiens
  misc_feature (293)..(474): n is a, c, g, or t
cttctcaatgctcttataggtcttgaagtcatacatctactgtctggatctatactcgtgtcggatatcatcttagtcttcgtctactgactccatgaggacagccactgaaagtagcactgctgacatagaactttagaactttagtcgattcacagcggaacaggcgagatagagaaggagacataggtgttaaaacaaaaagaaaactttttaattttgcattcacaccactactaacaccaaatgtctggagtatctatacaggaagcatatctccaatgttcctaacnnnnnnnnnnnnnnnnnnnnnnnnnnnnnnnnnnnnnnnnnnnnnnnnnnnnnnnnnnnnnnnnnnnnnnnnnnnnnnnnnnnnnnnnnnnnnnnnnnnnnnnnnnnnnnnnnnnnnnnnnnnnnnnnnnnnnnnnnnnnnnnnnnnnnnnnnnnnnnnnnnnnnnnnnnnnnnnnnnnnnntcccttgggtttaataattcgctggaatacttcacagaatt

SEQ ID NO: 426476 - DNA, 472 bp, Homo Sapiens
aatttctgcaataaattcagacatggacagacacattaagctgattcccctacacacataacaatccactgtctaatcctcacacagggacctcaggctcctcagcataagaataggacactgtgagagatatatttcaggaggcctgaaggctggtcatgatagaaattcctcggtttttctcccagaaactgtgggtaaaatgtccctattctagtagatcgttatcccaatatcatttgtcccaagtttgtgcaaacagttacgccatatttttccaatcaacttaaagcaaataccctcaaatgatttctaggagaaaaactgcaatatttagccctgtctcatcaaatactcagattgttcatggttgtgaggactttagacactgaaattagagtgaaaaaggcaatctacaaacccttgagtcaaaatcatagttctctgaaattgtcacatacggccaggttag

SEQ ID NO: 426477 - DNA, 113 bp, Homo Sapiens
gcatatacacagcagactcaggagcaccatgtcggctttctgtatttgagacaggtctccttaagttgcccaggatgctcctgaactctagggctcaatgagaaaatatttgc

SEQ ID NO: 426478 - DNA, 147 bp, Homo Sapiens
tggcgagagcttgttcaataacttatgacaaaaggcagagttggaatcgcagtccaggtatgtcctaccccctcccagatgacatcattctcaaggcggagagacaaggaagtggtaacgagttatgggaattctatggaagactct

SEQ ID NO: 426479 - DNA, 148 bp, Homo Sapiens
aaagaacacagattttgttgcactgccaaggcaagctaactgctgctctcatctggcaattatgtattgtgaacctttgtctaaagtcacagtgtctcgtgtctgggacaaatacaatagcacacaatgccgtaagtccccatgactt

SEQ ID NO: 426480 - DNA, 128 bp, Homo Sapiens
tcgtcttggtcatcagcatttcctgctcgtcgtcaggaagcttgtgctgcgaccttgccgattctgctcctgctggggaggtcgtgccgtctgtatctctctgtgtgtgagtttgcaggttcccagtg

SEQ ID NO: 426481 - DNA, 443 bp, Homo Sapiens
  misc_feature (408)..(408): n is a, c, g, or t
ccgggacacttgggctcagatagtttcagatttattcccttaaaattaagcaatgcgtacaaaataaactcactagacttaaatatttaaaaagagagacaacagccttttctttaaagaaacaaagcaggaagagatgggagagaaaaatctaggaagcaccaattgaggaagtgaaccccactacacttctatcacttttatgcaatccagtaataattctgagtgtattcctactttccctcttcacacccaatcacataggagaaaaacaattttaaaacacctagttgaccttactcggtccaaagtggaaatttccatggcaaacaataggaaaaagagtgcccgggttcagcacaccagtcagctacagattcttacggcaagaacacagccccccgtatnggggctgagattgttctcttgctcacgcacctcag

SEQ ID NO: 426482 - DNA, 106 bp, Homo Sapiens
tggaccgactgatctcaggaacagagctacatggtatcagcacagccctaaagcctgtacagatagacattcacaaggcagagattgcccgtgcactgaattttcc

SEQ ID NO: 426483 - DNA, 122 bp, Homo Sapiens
cggtaccaaccgggaccgctttgcatagctgcagcagcacttacccagtggcccggagtttcaagccagacttggagagggccggttgggggttgtgtctgcaggactcttggttctgcagg

SEQ ID NO: 426484 - DNA, 178 bp, Homo Sapiens
accaacgaacaaccacattcaccacctccgccactgccaatacacacactcagtaatcgctttcttctcaccatacatttactcatcaaatctcatcacagtctgagaggtaggtatgctgatcaatgcaatgtgaggaaaaagaaactggagcacaaagaaaggataacttgcctga

SEQ ID NO: 426485 - DNA, 195 bp, Homo Sapiens
tccccgggacgctttgcgcaaggaaatcatttgagaaataacaaggggacccccgacccaagatacacactcaggcctaagaggtttgagtttcttgaagagaacctcaggcagcaggccttgaagccactggggctccggaccctgccaacacctaattctgggaggaagactccttatggcgacgagggcatg

SEQ ID NO: 426486 - DNA, 182 bp, Homo Sapiens
ggaacaggggcaggactagattttctagattttctgaaagttgaggagaagaacttttccactccacgcatctgtctaggtaggatgagtgaccatggcttgtggacatgggaaaacaaggcaacttctagagggttctgacaaggtcctagctcattcttgtgcaaagggggttccgggtt

SEQ ID NO: 426487 - DNA, 204 bp, Homo Sapiens
atcggtaccaaccggggacacctttggtaaagtagtccctctcatgaaacttccgtagtcaccatgagttctcatctccattcttccaggatactgagtgacagacatatgcttgccatctagcagtcatattgaatggaaccctataagcgaactaatcctggcatggacattttctgagtatattgacggcctggaagcgag

SEQ ID NO: 426488 - DNA, 173 bp, Homo Sapiens
taccagaactttcacgttagggatctctgcagcagcagctttggggcggcgcctctatcgtcttggggtggacgatcattcccaattcccaattcaacgtggcggtctgcgcagcagtggcatcccttgttgcggttgccattgttgccgctgtctcacgccgccgtgaagat

SEQ ID NO: 426489 - DNA, 187 bp, Homo Sapiens
ctttggatgagtcctatggatgcatccccaggtgcaggagaaaagagaactcacggtcttccggcttcattctctcccctacctttctatagcctttcattttttccctgcctaatctttgctcctctctttatctccagttgatatctcataagatactttatttggggggtgggaagatgggtat

SEQ ID NO: 426490 - DNA, 307 bp, Homo Sapiens
aaccgggactgcctttgtccagtgttaaccttactcagtctctctgcagcattggcactactaaccaagctctttttacttactttactcttcctgcctgggcttcagagaaaatatacatccttcaactttctcttacttcctattatttcctagcctccttcaccagctcttcttgaatggcccatacttaaacattggaatcccctagagatctctctttgtctctttattttcttactccatatatccaccttgtgtaatatgaaccactctatgacttcaacaacaatctctaggctaatcc

SEQ ID NO: 426491 - DNA, 241 bp, Homo Sapiens
actctataggatcccaaccgggacttggcttggcgaaattgtgactcaggtaaaggacagttgggggagacaaggatgggaagatgcatgataaatgggccctgagcttggcaggcaacaggaaggcagtgcaatgttttgtagaaatagacttagcagagcaggcgcccagcattcagcgagaccacagattcttagccactgtatgacttgaaggtgatactaactcccctgaacctgt

SEQ ID NO: 426492 - DNA, 393 bp, Homo Sapiens
aaccggaccgcctttgcggcagatcctttcatgatccgggaaagaccacattatggggtgaacaaatttaattccaatgtcctctgaataaacatctggcagaaatgctagaggcctcagaagggcaagctccgggttggttcacagaggcttctgctaaggtagagaagaaccttggtctctgcaaagctggagtttatgggttgtgaggtgacagggactttctctgctcagtgtgtggctggctcttgtgttggtggctatatgtgttgttgctcaagaaggtgggtctgtggcatgaatccaactcaagtcagagtaggcaccaaaaaggcacccaggctcagcttccctggctcagcctggaccatcggcaggtcatttcagactaca

SEQ ID NO: 426493 - DNA, 283 bp, Homo Sapiens
aagccgacgcctttgacaagagattgagtggagtgatgggagggagagaatggagagaaatacagatggggttaggtgcagaccacaggttcaggggctctgtattacagcatggaaaaagactggcaattactaggtaggggtagcagaactggaacaaggtcttttgtattgtctagttttttaatggaatgggaaggtctagatgaagtttgaagacaggaatataaggagccctaaatgaaggaagaaatgatattactagcaaaggaggtcgcgggtt

SEQ ID NO: 426494 - DNA, 227 bp, Homo Sapiens
ctagagtcccacggacgcttggagatgatgccgtcgtgacgaggaatctgccggcactccaggccagaattagttggggcatggatggagacttgggatcctgttgtcaatccacagaggtctcctgatgtggctctgcagggacttttcagtcttagctcagctttccaacaggtccaccttctcccctagaccctggggacccagtccctttccccttctgtaat

SEQ ID NO: 426495 - DNA, 150 bp, Homo Sapiens
aggacggtggattattccttcaggatgcaggatagggacgtgcggatgacctccttccggatgcagatgaaggacgtgcggatgacttccttccagatgcagatgagggacgtgcggatgacttccttccagatgcagatgagggacggg

SEQ ID NO: 426496 - DNA, 469 bp, Homo Sapiens
tcttacggcgtatggtcttctttctaggtagggaacgaactgtgagactacagacgttgtgactgagatgactttgtataaatgaagaaaatgcgatgggacataagtagggtgtggggagagccttcatggggagatcatacttgacctgagtcttcccaaaagcaatccctctgtcttacaatatagctgtcaccacaattggcttgataaaatatggagtaacaaatgttaggttcacctagactaatcttcccttcctatacatgaagtacttggaggaaagagaaagcagtaaagtgattttccagagtcacacattctgacataggcagtgccagaccaaaaatcagtcacttcccataaggtggatatgcacactcacagaaagaacgagcctatgcatagaatgatctcattttcaagtaaaataatttttgagatacaaacatcagcaatgacaagcaca

SEQ ID NO: 426497 - DNA, 140 bp, Homo Sapiens
cgttctagaggatcccaacgcgggactttgttgagtctccacaattactgatcgttcctggcctggactatcaatccagcctcccacattattctgaataccacaattgatccccattactgtatctctctgatccacgt

SEQ ID NO: 426498 - DNA, 464 bp, Homo Sapiens
  misc_feature (443)..(443): n is a, c, g, or t
gtcatagctgttcctgagtaacaccaacccggacatcattgtatgacctgtagccgggaaatgttctgttgtatactattttggtcatatgcctctatggttgatcatatacataagaaggtgatccagatagtggagtatactcccatcctctaattgctgacccctcacaatcgctctctaagggttgggcaaagaagtgggggctatcccaaaagccttaggggagcactgcccaagtgtttttctctggtattaggattttcccattcaaaggcaaaagggtattgggactctggaaccagaggaatgaagaagaaagcatcttttaggtgtaggactgagaaccattttgcatcccctggtacctgagccagtagggtatatagatccatcatcaatgggtggagagagataacagcctcattaattattctgagaanctatactaccctgtatttccc

SEQ ID NO: 426499 - DNA, 172 bp, Homo Sapiens
caatagaaagatgggatgtttgcgaggctgctatgtttcccctttcccccagtctctgagagcattggtaatttggacacctttattagtttgagataataattgggactcactgactgaggctggactgaagatttaaaacatggtgggtgcctagaacttcttgtcaatt

SEQ ID NO: 426500 - DNA, 133 bp, Homo Sapiens
agacaaggcagaattaagagtagtgacaaacagactattcgttgtccgatgatggcatagggttgcggttgcctagtgccctagtccccttaccgtacatcatggtgtagcgatctcgaattcgaattcgtgg

SEQ ID NO: 426501 - DNA, 138 bp, Homo Sapiens
aatccggaccgcctttgggaacttgcaggttgctaggtggattggggacggtgatgagggtgaggagctggcagtagccccctcacattgtctttgcattactaactctcccttcttgttcccacagaacactctgct

SEQ ID NO: 426502 - DNA, 212 bp, Homo Sapiens
tttggtgtttccactgtatgccaacttaatttttaaggcaaaaaactctagcgatagcgtggctttaggtattgcaattgatgaatcgggtgatattcgtactgatatgcagtccgctagtaataaaacgacggcgtgtacaccgctactaacaacgggtgcaaccttaacgacagataacaatcaagtacagtacagaattgggacactgg

SEQ ID NO: 426503 - DNA, 233 bp, Homo Sapiens
  misc_feature (71)..(114): n is a, c, g, or t
tgctactgggcgtatgtgtatagtgtcctatcgtgtgagatctttgtgtaggatgttgtaatatagtctgnnnnnnnnnnnnnnnnnnnnnnnnnnnnnnnnnnnnnnnnnnnnggtggctgtaacatagtcagtagctatacataggtagtggcatagatagtgtaggcatagtgtaaggtaacatatatgtaggatagatagtaggtaatagtattaagcatagtagtaga

SEQ ID NO: 426504 - DNA, 119 bp, Homo Sapiens
aaccgaccacctttgttataataagaaaataaactggtcaaaaaagtattgggggttgtaaaggtacagctcatgactttgggaactgagtccatggagcagtcagacacatgccaata

SEQ ID NO: 426505 - DNA, 278 bp, Homo Sapiens
tcggtcctctctttccagatctgcatatcctattgtgttgacactcaacagcatgaaaggaaaaagacagttgaaagaagacatgaaattggatccatatttttgatcattataagtatgagttatacttacaatgatcatgttaaatggactttttctggggtcacagaattttggccaaagccccaaaggtgaagacaagtgacatgtaccccatgttgcaaaggagctgctagacatataccccaaatcttcaatgctgacaaacacttccttca

SEQ ID NO: 426506 - DNA, 161 bp, Homo Sapiens
tgctaatgagaagaaaatttttgctctcaccattcatcaatatacactccattgtcataatgccacaccttcaacatgaatttaaaggcataaaaataagtgttgtggaatcaattagcacaatcttttgggactttgcaccaaaacacaattgcacattg

SEQ ID NO: 426507 - DNA, 162 bp, Homo Sapiens
ggccctgcttattagcttcccagcttccccggttcttgctcttcccatcctacctaccagatgtcttcaaaagtggtgctccaccgtgctcagacatgggtcttattctcgcttcattttatatcctctccttacattcccaaagcttaaaatatctctatg

SEQ ID NO: 426508 - DNA, 214 bp, Homo Sapiens
ggcctctctgctcccagattcagtctcttagcgcttgcttgcgtcagttctgggaaattaaaattgaactatggctttgttaagtgggtagtccccaactagaagcgtggaagcagagtggcagacgctagccttcaaatgatgcaacgcctggaggacccctgttacaagtttttcacccaaagtgatggaaaacttacgttccgggaccacg

SEQ ID NO: 426509 - DNA, 425 bp, Homo Sapiens
catgcggatatataacagtttggggacggtattctctataaaggcaggtgttgcaagaatgagagactccctgaatcactcatgcccttgaggccagctttgacaagacacttgaagatactcttagtccctgggttccttcatgtcagaactagcaaatccccaaatcccaggatggagctgggggagctggggcaggagggctttgccgacagaaccatatctccagcatgccctagcaacaagcatccattccaatctctcagatatccagaactcgagactgcagacccacttagtacccactgatgagaccagcgagacccttagtagtcaataggcttagtgtttcctcaagatttggggcaactggaaggaacctcagattatcagtccaatttcattttacagaggagatggcagat

SEQ ID NO: 426510 - DNA, 199 bp, Homo Sapiens
gttatcatcaaactgtcgcccgacccgcaggtatgttgcgagagttctgggtccgctcgctgactgatggcgggcataccatatcccgccgcaggccatccgaatcgtcatccagagtcgatatcgatgccaactggaaggcgatctgcgatgccttcattgagacctatcacatccccgtgatccacgccgagacgat

SEQ ID NO: 426511 - DNA, 149 bp, Homo Sapiens
tcacatatttcatgagtttctttctctgccataacaaacacatgctaaatgatcatttttatgcacatctctttgtaccaatgagtgaaagttcttctagaatagacagctagaagtggaacctactgcagaggatagaacatttctca

SEQ ID NO: 426512 - DNA, 269 bp, Homo Sapiens
caatattcacagtttcttgagacttacgatgtggacatctttgagaagctacgtattctgcctaccacaaagactaacaaggaatagtcaaagagaacaggccggtccctctgtaaccgagagcagtgatatttcagcaggttacgtgacgactttcaagagttcaaaatgagaacgaaagatacactgttggcaggagtcattggcaatctttgacaaaaaagtttcagcagggtgggctgggccaccggtaccttacagtggattga

SEQ ID NO: 426513 - DNA, 561 bp, Homo Sapiens
  misc_feature (297)..(383): n is a, c, g, or t
tgtcggacctctcttctccagattccctctctggcactatgttattttcttctccatatctggcactttccttccaggccttgatttccacttccctgttgtatttggagtaatttagctctttcttagttcttccaatcccttcctccccattgcccaccagccaatcaaaggatgtaaaaggagtaggagagtagttaataactctattctgatacatgcacttaagtatacttgttcagcaactgttgcccctaccatttgtaagtttcatgacactcacatgacctcatgaannnnnnnnnnnnnnnnnnnnnnnnnnnnnnnnnnnnnnnnnnnnnnnnnnnnnnnnnnnnnnnnnnnnnnnnnnnnnnnnnnnnnnnatcatggttctctaaggcaactcattttttaatttcaatttaaacatctgggtccctggatatgcaatcctgggtacccatatacccaggtagaaggtcaccatagactgtgaacacattgcctgaccttcttaatatccaaatacatgcattagcatccagaattctccaccacatt

SEQ ID NO: 426514 - DNA, 462 bp, Homo Sapiens
atagattccaggcaggtcactcattccgttcctctcatctccctcttactccatctaccttcctccattcacctgtcctccattcctaatttcttttccctggtcttgctataatctccagctctaaaaatcagagctctcaatgaaaacaatggaagaataagacattctttcggtcttctgtctgcctcactggtgtatccttcatctcctgcccctgtgagttgataccccagtgcacggagccaagggcttttcccctctgagctctgggagggaagggaatggagctctgggtttgagatgtcatggcctgtgatagtcagtttggttcctgccactagcaagtcccctgaagctcccaacccagcctgatgttagcccagaagctcctgctctggccaaagactcctatccttgagggctctcagccactgctccaacacacttgcccccttcctg

SEQ ID NO: 426515 - DNA, 538 bp, Homo Sapiens
gtctctgcccagattctgccacttttctccatttcaagtcaaaaacaggctaaaccgtattttaccattgtaattttttagcacctaagagcagtctgtaacttttccaaaagttaaacttaaatttgctttcacaaaaacgctacagatttttaattatgcctaaatccttaaatggaagagattcatttaggaaacgcaatcttataaaaatgtgttagaaccccctttgagctgtgctcactgcatacccaagaatacatggacttgcccagtgcccctaagggaaaggcccatgcaaatgaggaaagatgtgtaagaacagctattttttttccaaagactttagctttctgggtttgcctgcattttatcatctgctgataaatatctgagtcaaaggtagaaagaaagacatgctgggggtacaggaaaattgggttaagtcagcaactagaaagctgtgggttgtggttttttgcttttcgcccttttgttgaagaggacaaaggcatgtgcattgataggaaaaactaat

SEQ ID NO: 426516 - DNA, 105 bp, Homo Sapiens
ttccttaaagtactaactggagacagtgcaaaggttgctgcttcatacaaaggtgcattatgacatgggtccttccagagaaaatgccctgccctttgagtcctg

SEQ ID NO: 426517 - DNA, 162 bp, Homo Sapiens
tctctgcctcgattctaaggagaagacagttgtgtcttcaaaagaaaaagattccagacactcctccctaatggaattcttctgatcccatagttcaaatcaaatgaaatctctctaacagcatcagagatgaaacataaatgtttggtagaaagagagtca

SEQ ID NO: 426518 - DNA, 105 bp, Homo Sapiens
agggggccctccaccctcgtgaccaggttgtgggccccctggcgctacttcttatcgttagtattttttattaattctgaaaagttgctccatggatttgcaggt

SEQ ID NO: 426519 - DNA, 543 bp, Homo Sapiens
gtctcgctcccagattccacggttataaggaaacttagaaatccttttcctaactctaaaagcaagcctcacatgcccttggatgcgtaacaacccattctaaaaagcactcatgcatcttggtgtggaaacggatcatgggaactctggagacctggcactcaagtagttaaggaaatgacaatttcaacagatttctgcaaagctcctttatggatagcccagcaggtgtttcttccattaaaacacagaatattaacggaggccttgatttacattctaagcctgatttacacaatggttttgttatgcaccagcctttgtccccaagtattaattctgctaaatatttcccaggcagtcactgctagatctccccaaggaatgagcaatgataatacagcctgtacctgctattttgccagcatcccatttcatcaatttatggcaagaggtaaaattggcaagttcagaaatgagacagtaaggtacacagtttgagtaattctgtctttactctaaggagataccgctattctgcag

SEQ ID NO: 426520 - DNA, 108 bp, Homo Sapiens
taggcacctcaatgtctagttttgtcagaatagcatcctagaggtcttagaaatcttacctgttggagaaagttttaaagttgcccaaacattccagcagttgtacat

SEQ ID NO: 426521 - DNA, 443 bp, Homo Sapiens
  misc_feature (93)..(112): n is a, c, g, or t
tctctgctcccagattcaaggttagtgttccattttcagccctgaaataaacatgaattagattactagactattcactgatcaataatgtgnnnnnnnnnnnnnnnnnnnnctatgagtcagaagaggaaaaatagtgactcatcagacagagggcgtctctattctattaatttcaactgcacagtctataataaccagtgtgtgagagtttcagccttcatccaaataacgtatgtgaaaccacaaaggaattcaagctgcagacaacaaggcacatttaagaggttacaatgttagtgttgagcttggggacatagaatagagcattgatttctgataaattattgtgtgcattgacattttcggcacaggcatttctttctatattatggttccataaaaaagtcagtttgggtccattaattgcctcagagggaagg

SEQ ID NO: 426522 - DNA, 459 bp, Homo Sapiens
tcctgccccagattccctgttttaggaaatggtgccatctttctctcaagatgcctaaggaagaaacttaccagtccgcctttctcctatcacacctacaaatctctgtgcacacctcctcctcctccatactagtctcgtaaattctccctgcttaaatacttcttttcattccctcttccctaatcctactgcagagacagctcatttcagtagcctcctgtaagtcttcctgccctgtcttacctgctcttatttaaggctattttgcactttttctatgtaaatagtatcacttggttgtgtgacacagcaacctgaaactattctcctctaaggcgatctccaacaaacacagatgtcatccactcctgcttacaattcttcagtggcttcccatgaatgctcttcccaaagatgctatatgatgctctttcccctgaagaaagtgatggagga

SEQ ID NO: 426523 - DNA, 462 bp, Homo Sapiens
tctctgctccagattccatccacccctacaaccacagcagtccacttccactcctgctagagtctctacctgcttccttgctgctaatttcaagggaattaagttaaattccctgtctgtcctcatctggcttgatctctctacatcacttaatgctgtcaacctgttcttcctgaaattctcttccctctcttccctcttgtatctgtaatcactggactcctctcctcatttctttcctatctctctgtccagtcctgtttggtcccttgcatgtaagtggggaggaaacagaagcctattaatagagaagggccagtgggaacaggagagaggaggtcttgttgaaggaggataaagacagcacaggtggaggcagtggcttcaaaaagcaaaataccatgctaaactccctgcgagactgaagcaagaaggtaagaaaggcagaatgtgactaagacc

SEQ ID NO: 426524 - DNA, 506 bp, Homo Sapiens
acactctctgcccattcactgggtaatgggtgtgtcttaaggcaacgcaaccacccagcaacacgtcttttttaggaagccctggcagccaggtatctctaggttgtcctggtttagcattgcctcctagccggagacttcttgaggctgactaaaggttgctggaagctttcttgcttcttcatccctcctacttcctcaggttctgcagccaggctccagtgcaggagaaattcagcttccctcgctcaacatcctgcttcctctctccaatcattaggtcaggtctggggagatgaaggatgtaggacacaagttggggtcaattaggggaagtcaaggagagtatggggcatgaggaatgcacaatagggatattggggagagctggaaacaaaagaccaccagattgagtagcctagtctcccagtgctgactgagctagaaggcaaggctcaactggcagtgggaagagaagtgagttcagacatgccaggctgtgctta

SEQ ID NO: 426525 - DNA, 279 bp, Homo Sapiens
tgcccggcctggattaactttttagcatcagctgctacttgagtagcattttctgaaagaagagtggctccaagtatttccagctcttgggtaccttggattgtgtgtggaactaggaattttgagcacagtgattgatcatggtaatagaacctcactttctttcttcgtgtttcctgtggaggaggtaggattttcttacataggaggtttgctctgaaggaggctgcattgtttttcatgtctctgtgacagttcagagggctgggccttttccct

SEQ ID NO: 426526 - DNA, 414 bp, Homo Sapiens
tctctgcctccattcggaaataactgagatagttgggcaatgttagttggtgaatgaggcagggatattcacggggaatgaggaagccttggggctgcttttctccttgccactcaattgccttgcagtgtcccctgggagccgggtaggacagggtcgtgctaaccctgtaccaatagtcagaaccctccaaagacccatccttttcgttgtcaaaagccagctcctccaagaagtcctctgcgatcggatccagcagcaacgtctttcttgtcctgcctcatctctgtggaatttacaaggttcaaatgctgctgattatgtgaggtggatgctgcatcttaagtgtatactttctgctgttccttctctattttgcatattgcattagattaggagtcctttaagaataaa

SEQ ID NO: 426527 - DNA, 157 bp, Homo Sapiens
aggctcagagatgactcaacaaagggcgcaagcattaagtttcaccatcagtatagggcaactcccatgtgctaggtgagtaaacaggcatgtccctatcataatggagtgagcagttgaagaggagtagatgagtaaaaatcaaggagaattgctt

SEQ ID NO: 426528 - DNA, 261 bp, Homo Sapiens
atctagaggatcactctctgcccagattcccttccaaggacaatacattctagtcacacttgtaaaggtctccaggtttctgattcctgtacctttatttatgcttttccctgtctaagaggccttttacaatcccatatttatccttcaaagcttaactcaacagctatctcttttctcctaagactttatatatactaactgtgctccccttaataggcagcaagtgaagggcaaaacacttaactattcccaccactt

SEQ ID NO: 426529 - DNA, 412 bp, Homo Sapiens
tctctgccccagattcgcatgtaattaaaagtggtataaatagaactgcaaaactgccctgagctgcttctctctgctgaggggttggccctactctgcaggagcagtcaaggagctgcaacatcaccagggctataacactgcctctttcataaagctgttttcttctacctctagcttgcccttgaattattttctggggaaagctaagaactctcatggggtaagctccactttgggggtcacctgccctgcatcactactaatttggtcactcctgacatggcatgacttactggggagaagggtttcccgctagggccttgctctatcattaacactcagaagaagagttttcaaagaccccaaggaacacctcatggcacaggcttaacgtgacacttcccctcct

SEQ ID NO: 426530 - DNA, 116 bp, Homo Sapiens
ggtgaataatagtgtgtaagcctcgagacggtgcgagatctcaaagagagtgagggtaagtatgaggaaacatctgaggatggaggcttgagacagctctcgtatgagaggttatg

SEQ ID NO: 426531 - DNA, 129 bp, Homo Sapiens
tctctgcccagattcccaaataccaatgtctgtaccagattcttggtacatggaccagatacttgaacacttaaagcactgttggtgttgtactttgagagacacagtgtaagagctggcaaacaaatg

SEQ ID NO: 426532 - DNA, 235 bp, Homo Sapiens
  misc_feature (110)..(150): n is a, c, g, or t
caaaagaatccacatcaaagcacattgctcagtgcttcctataacacattattgcactttattgtttacttgtttaactccctctactgaagtgtcctgaaggcaggacnnnnnnnnnnnnnnnnnnnnnnnnnnnnnnnnnnnnnnnnnggcaaatgacttgagaaatgaatgaatgagctcaaaatacaacatcaggtttccactgctaggtgccaattgaatgtgtgataca

SEQ ID NO: 426533 - DNA, 447 bp, Homo Sapiens
  misc_feature (42)..(51): n is a, c, g, or t
gatagctgattcctagagtatcactctctgcccagattcctnnnnnnnnnnttgcttgtgtgttccacccattgatacagatgggcaaagacaagtgattctgattccaagatggatttggaaaggtatgtctactggggaaaaatgcccaaatgacctgctaattggtttcctggctaattcaccttctggctttcatagaggggcaggttggaaatcagaatgactctaaattagccaaggtttctcagtgtgattgtagacttcatagactggctgacgggccccagagcccctgggtgagttattcttagggcaattccctgatggtcctgctcatagattttgtactgacaagttgggccaatggcattgctaagataaaaggggaaaattaaaacatgcccctgggatttccacacattggatgaggcagggtgagctcag

SEQ ID NO: 426534 - DNA, 285 bp, Homo Sapiens
agctgactcctagaggatccctctctgcccagattccctgagacctgaatgggtcagccactcccctcactaagagcctgggcgcaactttggtggaggtgataagtgccatggtaaaggtacactgtgcagagtgagttagggtgagaccacccaccttgggaagggggccacggtgagaaagccatggatctagaccaggagtacaagaattttagaatggagagagcccttagaggccagctaatgcatcacttatccagctcaaagacttgcaagatgcag

SEQ ID NO: 426535 - DNA, 572 bp, Homo Sapiens
tgaggtcggcttcgctatgacagctcttctactgctccttcattttttagtccataattggaggagtgtgtagatgcaagggccgtgtacggatctaatattctttcgatttctctaaatcttcactccttctatcagcctctgttgagccctcattctggactgggccctgccttcccagtggcatgcacaaggaaacatggtcctcacttctgctggggcttctaggttagtggggagaagcatctatgaaatattcgtatgtatagaggtaaacctgcacctgtgggctgtggaagggggcctgtgaggttgtcaggtgcaacaccagaaaaacattctttgctgcaaatccattgctttagaaaggaccctcctgggtagtgatttgggatttagagtaggtttgcacagtggaggagagcagttagggtggcgacttttcatctaccagttgctatgaaagcttagggggctgttgatatcactcgggtgtaaagagaattatttcattgttcagttggttgagtgtagattttgttgtcacatatctttttctctttcctcttttt

SEQ ID NO: 426536 - DNA, 545 bp, Homo Sapiens
  misc_feature (386)..(399): n is a, c, g, or t
cccccagaggtcagctcgctcagacaaaaatactttaatgtgtgatgttgaatctcttaagcgatcagcagctgggctgaacccagtgttttaaaaatgcaataagtaggacatggaactcttaataacctcaaaccttgcttgttagtgaggcaccaacatttcagggaagaaatcatgtttgagagcaggtgcatgataaatgttacaggcaccattgccactcactgatgaccaggagctggacagaaaggaaccaagctaagccttacttcccctggggtttcatgaaatgggagggagctgacaattgcctgagattgaattagctagataagacattgagccccttgctttgcaaaccagactgtttatattccatgtannnnnnnnnnnnnngtttatttctcttttgttctttctcagtgtttggaagtgttagaagttccagtctgtctctgctgtattcacgggtgccagaggaaaggctttttgtctagggctttgcttgactgcgtttaaggggaggaacgcgctgtggtggc

SEQ ID NO: 426537 - DNA, 409 bp, Homo Sapiens
atgaggctggaggcggaatatctatgcacggtcccatctgggaaacagaaaacaagaaattgatttaaggaggaattgtggacactggtgatgagaggagacaaacgacagaagatgttgagccaggattaccacagagttttacgcctaagtgaaagatatagggaattcagaagtgagacttaatcttgacagatggtgagtttgctttttgatatgttaagacactttagatgacgcaagctgagtagactagacactgcaggattaagttcaagagaggcctgagctagacttgtagatgtgctggtcactacgttaagttctttaaacttcaagagactatacgctaaagttacggacgacgtgacacatgacttagggaaaattggagagagaccagactcaa

SEQ ID NO: 426538 - DNA, 118 bp, Homo Sapiens
atgtgtctgaactgctacaagtgaaggaggaagttccacagtgtctctgtttgcctcctcctccataaacccacggcataaggccccggcataaggtgggcccacggcataacggtgg

SEQ ID NO: 426539 - DNA, 286 bp, Homo Sapiens
tagacaggagctggggagaggcagaggcgctgggaaggaaagggcgagcggctgcgagagggtggccactactgggtggagggataaggatcccacttgggtatgactctgaatagctacaagtgttcgggacagggcaagagactgaacaggaccaaggacgccctggggtgaatccaggcaccttctgccacactggacctgcagcaaggtgtacctgctcctctggcaagagaaaaagacaaagatgccagcagggtcattagtttacacacgttccttttac

SEQ ID NO: 426540 - DNA, 437 bp, Homo Sapiens
ggacaacggcagtgtaaggcctgacacaaagcaccatagacattggttctttgagctcttccccattatccagtgagaggggttggtcgtcaccactgtcctgagggggaatacaatgcagcaagcttccctgctaacagggagggggcctggagtctcagctccagccttccttcctctgcaccattcctccacctggatccaaactccagttctatcagcaacagtaatgtcaataacaagggctaatatttactgagcgatagcgacgctggccaggctgctctcagtggtccatgtgtccaacactccaacaacatcgaaggacatgctcttgtctccactgttagtggcaaaccattaattggcaaccaacatctattccctttgctacaacagtaacagaactccaaatatatctggtcagggcgacccaa

SEQ ID NO: 426541 - DNA, 445 bp, Homo Sapiens
tgatagccgcgcattcctcctacactgggtagatgtgcaatacactgtggataagatttggagagtgaaaatgaaataacgcaagatcacaatttctaaatcaagttgtagcttggtctcatacacaattgcattctgaggaattatggtggtacagacttagggagattcggtgtagtctgctgtgatagaaaagatttctttttcctggctttccctgaggaaaggaaagatggaaagagggaagccatacagatatccctctattttgcagtgtagaaactgaatgtgtttctacagggtcaagagacatcagagaaaatttttttgtttagaacagaagatcatttcttacatcttcattaagtaaaagaataaatagctcatctctcaagttgaaagaaactgggcttggtattacaaaagcaaaattaagatggccata

SEQ ID NO: 426542 - DNA, 387 bp, Homo Sapiens
gaacagaaggaacctacctccatatataggaccaccattaaaagctcattattttgtaaccggggcaacgactagaagcacagacacccacctattggcctcattatccaccagctcgaactttggattcccctaatttctcatgcaagttctgcagaatattaaccatcctaagagtaaactaccctgatacctttgtaaagcagcaacattattaacaattaaaaagctgccaccacacatacacaataactttcttatattttaatatgcatatccatagtctgattataacagcgtggagagattgacaggaaatgactgagtgtaatggctccaaaggagacagtacatagatcagtaaataatacacgtccctagagtctt

SEQ ID NO: 426543 - DNA, 293 bp, Homo Sapiens
attgaaagacacagaagtgaatctactgcgagaagggaaaagaccactgagtgacttccatcctctcccctatgctctggcacaatggcttgtacataagccatacaaagtagcagtggcctcacagtgactagcagacacagaagagctaggagaaagctggagctgccgactccttgtgcctctggatgacctccagaggccagcaacacctctcatcttacctcctatagccttccccagccctgggctgtatgtcacactgtgtgctccgtattacaacgtactgaatg

SEQ ID NO: 426544 - DNA, 450 bp, Homo Sapiens
gtgatttatacgggagtatgtattcaatgggtgtacattattatcacgtgtatactagcatatgctcgggcacagggaggcaacgagatagagacccaaactaggaacacttatttagtatccttcgggttgaagttggggcagaaaaagggctgaaaggagatactgtctgtgggatacggatgctcctggtgagcttgaatctctgcgtgcaaatgtagccagtatcatttcagtaattaaacatagaataagcaaaacaagccgaactggtgctatgttttttgaacctggagttaagaaggtaagaaagaagcattgtcagtatctgcattccaagctgttaccaaagaatggagctgttaattgtctcctgctgtctcaataacaaaaatctggatgagagaattcttcttcagggaggatcattcaaaggtcaagcagcccatt

SEQ ID NO: 426545 - DNA, 218 bp, Homo Sapiens
tcattgtacgggagaaagtatttatcgtgcatgaatgttgcacctgcccagtgattggctatgagggaagtacattagtttaattagcttaacgttctctctgactggactattccccgtacttctagttacttgggacagtttttatgcaaggagactaatttccaaagttatttaggcaatgacaggtaggaagattggtctgtgctggtgggaag

SEQ ID NO: 426546 - DNA, 465 bp, Homo Sapiens
caatcccaagtaacgggggacactccccaaagaccctcacgggcccatactctgacataattgaacccacagagcttgagctgctgctcagaggtctcatgtttaaactatgcttggaatgtctgataggaacatgcatttatttttaggcaagaaagttgtctcctaagctaaccctgtggccccagagcaggccgtatttggcaagaactgctttgtgcttgtttattaaagaggcccaaaactttctcaactctaaggtagctgctaagagaactcggtgcgctgtgagtcttacatttttatggtcaaagtttgcttcctgtgaatctctgaggtgtttctacaaggctaataggagtcaagtgtcaccccttaccttccacagcttcaagccacaatctattaaccaatcatccctcaattggctcacagctctcaatggattcaattctatcctatggc

SEQ ID NO: 426547 - DNA, 511 bp, Homo Sapiens
gggtgcacaagagcagatgcctggggtgtgtgtggcgaggaagaagaggacacagagatcacaggcagtgcagggatgggaccatctccgctgagcactcgccttccatggggaccagtgtggccagccctgtgctcccgggagggaattcacagaaacacgggtcatggtgtgtgagtgctacccacattttcctactgagcttaataaaaacagcaaagaaatgaaataacgatgaaaacccttgcttatggatgatgagaccatagttctataagagggtttttcttggctttggttattgaaaagatcaaaaaaatggagtgctccaagtttgttttgttcttattagtaaggatgccctgagtatttttacctcaaggcttaagatctgaatgtttttctttctgctacagaaagtctatagaggaagtgggcaggcagcagctgtccagcccatcataccccacagcagaggggaggctggggcgtgggcactggtccgcctacc

SEQ ID NO: 426548 - DNA, 479 bp, Homo Sapiens
  misc_feature (258)..(270): n is a, c, g, or t
tcaataagacgtaaaggttattatcgtaaaggttagtttagaataattacttttctagattatttgtatctcttaaaaacttaagaagggacatatatacttggttttattattgaatatttgctaaggatatacctcactgatataataatttcatgggtatgtacagtgttcagcacatttaccacaggcaacataggagagatgctggaacaaattatgaggtcagtgagacttatttttcgtgttctcatatcnnnnnnnnnnnnncctttaaagtgacctctctggtgggggtccataacaacctaagggctcggaacttccttcggggggatctcaggcaaggattcgggcttttcccttcctctacagtttcttccggtcaacatttacttaggcagtatcatacgccgtgagctcggcttcccatctccggctacagtaaataacccggcactaaagtatgggtagtggat

SEQ ID NO: 426549 - DNA, 477 bp, Homo Sapiens
aggcatgaaaacattaatctcccgatacctctccgtcagagctctgggtgattaagttatgtcaatgtgcaataatattctgaaagaaatcttttttctgagcagctaggtcttaacactgggcctaaaatattggtataccgtgctatcatctaggctgtgtcattccatttataaagcataggcagagtagattttgcacaattcttaagggtcatagggattttggaatggcaaataagtatgggcttcaattagaagttactagctgcattagcccctaagaatcacatcagcctgtcctctgaagctttgaaaccagacattgacttctctcttactatgaaagtcctagatgatatcttctttcaatataggttgttttgtctacattgaaaatctgttgcttaatgtagccatcttcatcagttatcttagctagatcttctggataactcactcctgcttctacactag

SEQ ID NO: 426550 - DNA, 184 bp, Homo Sapiens
cgcgcggctgaagtgatcctgcatgacatccagcatgagcgtctgctgtcgttcgatctacaggagggagcatatgcggtcaccatacatgcagaagcagaaagacgagctctgggttaggaactactcaagctggcggacaaacagacctgagccacttgtgcagacgcgtgcgtagaacttc

SEQ ID NO: 426551 - DNA, 133 bp, Homo Sapiens
ccaatcacccgttaaatggcagttctgaggcatgagagtccgctgcggtagcagctgcgcgagctgtggcggagagcatggtgacagcctctgaggttgcaccaccacctcccactgtggaggtgcctatacg

SEQ ID NO: 426552 - DNA, 295 bp, Homo Sapiens
tgagctaagccgctcgagacccccagagtggaagaagctggcatggccctgcagactcttgaagtgctgaatagcactactgctgctgctccaaagaataatcctattaatctaacacatgtaatatcagccactgtcaccacaagcccgaagaactcaagccaagatgacctttctcccacaagcgatactccaagagcaaatgtattgaaagtagaataagtcagtgatacttcatacctgctacctcatgcctgatagcagcaggatgcatgtcagtcttacagcgagaaaa

SEQ ID NO: 426553 - DNA, 200 bp, Homo Sapiens
cggcatgcggtctgtactacaataacaagaaagggctggactggacgggaaagagagactccagagatgaaggacttctccagaggctcagggatgtgctgtggggagctacacagccctctatgtcccctgacttggagtatccagcctcaagtccccccagagccctggctattggcttccaccacccttggagccca

SEQ ID NO: 426554 - DNA, 400 bp, Homo Sapiens
  misc_feature (312)..(312): n is a, c, g, or t
  misc_feature (380)..(380): n is a, c, g, or t
gagggcacacaggcaggcaagcatgggcagcgagaccagccgcatgtgaatccccaacaagcaaggaagagaaaaacaagctctgaccaaagtcagagccagcatgtcccgcctggcaggaccccttcgttcttcctgaggcccttgctcagatgtggttctgggcgctcctgctccaagggggcgatcagggcaaaactcatgggtttgaccagcccaaccctatcccagccaggtcccctctgtggggctgcgacatggggcccagaagacaggcaaggacgccaagtcctgtaagtttcacagggctgngcatgtgtaagaggctgggtgtccacatctggacatcagaatgggcataagctccggactgagaactnccaggcaggaggacacagat

SEQ ID NO: 426555 - DNA, 301 bp, Homo Sapiens
cacacgagcaggctgtggaccaggtatgttatcaaaaatgttaagaggatctttatgagcgtaaacacaagcccgtgggatatcggcactagggagcaaaacttgcttagctatattagtgcaaccttaggaagaaaacctagaggggggagcacaaaacgtgaggctatgagttagagaaactagctcggtgctttctaggtcgggatgggcacagggatcaacgtactgagacacaaaagcacgcccacggatcgactggcggtagtggtagcataccatactgacctgctaaacactg

SEQ ID NO: 426556 - DNA, 134 bp, Homo Sapiens
caggtgtggctataaagcctgggctttggcccgtgggccatatctttacagactcacaaccatcccttcctgctgctcgaatcttcattcttgaggcatgagcagcgcctgcaagcccctgctgggatgctttg

SEQ ID NO: 426557 - DNA, 515 bp, Homo Sapiens
  misc_feature (276)..(435): n is a, c, g, or t
cggcatggtgtctgtagatagggaagagtgtgcttctggggcataaccagcaggagcccaagcacaaacgtgcacacctgcatggcatggagaggcgcagagaaaccaacgctggggccttccggagaggcaggggccagccaaagagagccacccaactgggcttctactgcaacatggctttgccacatctacttgctgggtgactttagggccataactttacctctctgaaactcttttgtcaaccgtagctcctttaagaattcttaggannnnnnnnnnnnnnnnnnnnnnnnnnnnnnnnnnnnnnnnnnnnnnnnnnnnnnnnnnnnnnnnnnnnnnnnnnnnnnnnnnnnnnnnnnnnnnnnnnnnnnnnnnnnnnnnnnnnnnnnnnnnnnnnnnnnnnnnnnnnnnnnnnnnnnnnnnnnnnnnagcttagaagtcagtgactaatgtttgagatgtccctagcggtgtgctactgctcaatagacatttctgagaaagctttg

SEQ ID NO: 426558 - DNA, 193 bp, Homo Sapiens
  misc_feature (168)..(168): n is a, c, g, or t
  misc_feature (172)..(172): n is a, c, g, or t
acatttctgggagagatgccagcaggggataggataagaataatcagctcatccttttccttttttgctgtggcttcttggaacctcagacacttattttgtgacctaattatgccaatgactctatctttaaatcctgacaaaatgggtttctgtcttttctctatnggtntaaactttcttctatatcttg

SEQ ID NO: 426559 - DNA, 162 bp, Homo Sapiens
agggagcccgactgaggatatggatcctggccggcgcaagatctacaccctctgcaggggagttttgaggcccagcgagagctcacagggcgccggcggaaccgcgacgctttccgcggcacggccccctctgtcgcgacgaacactattccaggacgccct

SEQ ID NO: 426560 - DNA, 265 bp, Homo Sapiens
caggctataactggcacatgccaggtagacctgcaatgacaaagctcacacactaaaggtgcgaccatcactggattaatccagaaaggcttccagataaggagagcatattctatcttttctttaatctccctactgttttctttaagcgtttaccgcgcagattatagcccttgactcacattttttcaatcccagggcctgaaggtcttatcctagaacataagcttcagaccgtacctaactccaggggttgggcgcaggt

SEQ ID NO: 426561 - DNA, 350 bp, Homo Sapiens
cctgagcagaagggaactgctctgaaagaaaatcccagcttctggggttgcagggctttgctgattcattcagtcaattgacaagcagcacccacagacagccagatgttaccccgtgtttatctacccggatgttcacaccaggtctatatggcacgggggatccttccatttctctgataggggaaaactgagacttccaaaagtgaagatagtctcccaaggcccacagctttgaagaggtagcagagcctggatttgaattcaggtgaccagctctaagcctggagtttgacctaaggctgatttctcctctgagagctgacagaatcttaatggccaaagcaaca

SEQ ID NO: 426562 - DNA, 226 bp, Homo Sapiens
tgcataattaggatatatggcagggctaaatatttcaaattgcgattgatagggtgaatgttggaaatactggatcagcagattatctttgcctataacaaatgcattagcctacctgctagaagaggagtagttaactaggaaaataactattagaaggaaatattatgtgtgaatagcaacaagcatagctatagatgccaatattaactgagcacttactttg

SEQ ID NO: 426563 - DNA, 202 bp, Homo Sapiens
gagaaatcccactgcataataaacccagagcatctcgaaggcacgcgctggctaaggactcgacttgatatctacccaatgctttcaatgtcaaactatagaaatgcgaagaagccccactaaatgggcggagcacctattgctctgcttgagctatgcaaatgcctaggcagctaattacagacgcgcatgagttgatgaa

SEQ ID NO: 426564 - DNA, 179 bp, Homo Sapiens
acatgacagggacgatcaggcgctcgaacggagagatgggcatcaagctctgcacgatgcgacactcgtgaaacaagaagcgaggcccacgctggctcactctgaacagcaggcagaggaagccatcctggccctcccggatgaagaacctgacatggaagagctcgactatgatactc

SEQ ID NO: 426565 - DNA, 317 bp, Homo Sapiens
  misc_feature (258)..(259): n is a, c, g, or t
gacagctactgcattggttccgctgatcttggctgtactgcctcccatgtctgggttccgggctggaatggtgatcttggctccacgtggcctccacctctcattctccaggaggctaatgcagacttgttcatatagtggcaacagggttgcaaaagagggtagaagcctccacagcctcttgaagtacaggccagaacctgttaaatgtcatttctgccatactatgttggccaacataaatcaaaggctatctgnngagattcaggaatcctggccattgaagagaaagtggtctacacaacttagttctcttc

SEQ ID NO: 426566 - DNA, 373 bp, Homo Sapiens
  misc_feature (315)..(315): n is a, c, g, or t
ggaggggcggagggaagtaggcaggtgccagaaccacggtaaaggaagagttccatgagaatgcttacacagcagtggcaatcgagggctgcatccgcaagggcagatgacacagcacagtggttcccaacgctcacaagaagcaccctggtttcccgccttcctctgttcctattggcaccataatctctgtataatctgggccaaacgtgttacctctctgggtccacagatgagatactgtgccctgcctcgaaggctgcccgtgcgaagctcttgccatctttaaagcatgcaggctgcctggcacccggngctaaacaaaggccactgctctccttcaccgcgcagcccccaggcctacagaccccat

SEQ ID NO: 426567 - DNA, 122 bp, Homo Sapiens
agggatggctttctgggagaatcaaaacttgaggggaaccttgaaggatggggaatagtcaataaaccaggagaaaatagtgatggtgcagggcatttcaggatggcttctccaagattggg

SEQ ID NO: 426568 - DNA, 308 bp, Homo Sapiens
cggcatgggggtgatgacggaatcaagggggggtgacgacggaatcaggggggacatctgtgctttagatcctgaccccatggagtcggagcctgcctgtgcccgcaggatcatgccagggcctcagtgcttgggtgggggccatgcatccagttcagaggccagcatccagggagggtgccaggtcgctcggctgttcggatgttgtcacaggggaacctgctggcttccgtccctgtgaatgaggcttcatgtcaggtacagtcttttggccaggaatgagggcatgagcgagtgagctgccaggt

SEQ ID NO: 426569 - DNA, 301 bp, Homo Sapiens
  misc_feature (287)..(287): n is a, c, g, or t
gacatggtattctaatggttatgtattgctttacccacagtggagctttaccttacaaacgcaaaacagctgtagctgaatgatgaggtcaccgtcataaggccgcatttatgtgaaatggtataccctgtgccactctcaagcaccttcctgtgagccccttcccatgagattaggccttttataaaaatgcagacacctggcttcaggacttaggagagctggcccttaatgagagggaaccctattttcttgtcagttaactgcatgtgtaacaatgcgcattngtctggtaggtgaa

SEQ ID NO: 426570 - DNA, 183 bp, Homo Sapiens
cagaaccaaggctggggctaagccttacatttcacatcagaatagatccaacggaaccagacacagacacaagagaaaaataaaagcatgagctcatttgtaaacatatgtgcttcagggagagatctcaggatggcactaaactgagagtcttttaaagaaagatggatacatctgcttatg

SEQ ID NO: 426571 - DNA, 315 bp, Homo Sapiens
  misc_feature (209)..(231): n is a, c, g, or t
  misc_feature (291)..(291): n is a, c, g, or t
ctcaggtctgcccaggcctcattcccacgcacccatcagacttccttcagtcactgccccagtgactgtccacacaccatccaggaacggcgttctgagtgtggaagcagaagtcggtgtggatgaattttgctggaggcctccagaatctgaactgatgctccaactattattgctcccaagtgtgtgactgcgagagcccatgtcannnnnnnnnnnnnnnnnnnnnnncgcgcgctgaggtggagggagggtgatctggattccaaattgcagtttccaacattagangtatgctgtaatgcttctgattca

SEQ ID NO: 426572 - DNA, 286 bp, Homo Sapiens
tggcaggggggcttctggactgggggctcggcaccgacccaggaaggggagctgtgagcagggacatctggccctagtctcagagcaacatccctcgaaatgccatctggccctggaaggtgcaagggaggcaggatgagtctgctcatgctaccgcgggccgcccagcaaggaagcaggctgcccgccaggctggcacgcgcctcttgcagtggagggtttgctcttcaggaacggacagagaacctccagactccctcggctgcacgcctggggcgagcccagg

SEQ ID NO: 426573 - DNA, 291 bp, Homo Sapiens
gcgcttactctggttactgctgctgctgccaggagtcctcggctcccttcaggcgccgttcaaaccaggccttggctccatccatggtatgtacctgacctggaagcgctgccactggctgcaggagagtcttcaactaccgggtgcgcaccttgtgcttcgggatctgcctacagagctgctcctgctgacgctgcttggcttcacacacctatcgtagctaacactcatagcgggcacgcaccgccagcatctccttctaatgccgtagacgaactgctcccagctcta

SEQ ID NO: 426574 - DNA, 131 bp, Homo Sapiens
cgcgagaatcgcacggaggcagaccccccacaaggagcggctggcgccgcatggagacgatgcccactagcggcatgaggcgatcttggagagcttccacgtgaatctgcagaagagtgctggccgacgcc

SEQ ID NO: 426575 - DNA, 235 bp, Homo Sapiens
gcctcagcccagttgcccaggcagctgacccatctctccaaagacctccttggtcccctcgctcctcagatcacacctttgtgcccctccacagcctgactgcattcattcagacctcagacctcacctgcctggtgttggggctgtcaacaaccagccccacccgtgtcccaccagcctgagtcgctccctgcgtcctccttgcctttgtcttgcgctatgcttgcaccgccac

SEQ ID NO: 426576 - DNA, 245 bp, Homo Sapiens
cggcatggggaaagtgaggctcagtttgggatagggcgaaggagctagcccaaggccatagaagtctgacgaggtggaatcaagtctggagctcaaatctcctctcagtcccaactgtgacctcagccatggccaccggctccctgccatgacgctggccgatggctgcaggtgaacccatagcacgtgagctggtttgtggacacaggatgggaccagcaatcagggtctgactgtatagaaat

SEQ ID NO: 426577 - DNA, 189 bp, Homo Sapiens
tcggacgcatttatgccagcttatagaagcaggtgcaacagcatttagagtgttctgtgctccacttgactgcctcattgaatctttggaaaatcgatgcaacgagctgagctgacgtggtcttgagaggcctgacagtgcgccggttgccagcggttcaagtgctgagaagcctgatgcccctcagag

SEQ ID NO: 426578 - DNA, 222 bp, Homo Sapiens
cggctggggtctgtactcctaggtctgagggaggaggggctgaggtctggactcctgggtctgaggaagtagggcctgggggcctggactccggggtctgagggaggaggtgctaggggtctggacctctgggtctgagggaggaagggccaaggtgagggctgagggaccgtcactcaccatccttgtcgcagataaccactcgggccccgcttgtcactg

SEQ ID NO: 426579 - DNA, 151 bp, Homo Sapiens
cgatggggtctcatcttcacagtatccaactgcagcatttaaatgcacttcatcttccctggaacaacaggaaaatacagtgaaagctcaaaatgaggcaggtgacagggactgggaagaagggcttgtactaagcgtggaacaggtgaga

SEQ ID NO: 426580 - DNA, 198 bp, Homo Sapiens
ggggtttttgacacagtgttctacttctcaaaccaagtggcaattacataaatattgctttgctttttaaaaaaagattgtggctttcttcttcctagaagactgtgtgttgtcctcttgtctggcgtgctttgttgatagaagctgcaccatgggaaagcctacatggctgggagctgagggtgcctctgcccaaca

SEQ ID NO: 426581 - DNA, 183 bp, Homo Sapiens
caaaggacgtccatactcagctgacactgcatgtgggcacttactgtgctcatgcccacacacacttgcacaacatgcagaaggccagcacagttggatccactctcactagagaagacagtcgagaatacgctggaaaacctgacgatgagcagctacacgatctgcctctatacaaagact

SEQ ID NO: 426582 - DNA, 158 bp, Homo Sapiens
  misc_feature (89)..(99): n is a, c, g, or t
cacaatttaagttaatggaaccctcggcttccgggttaaagggaattttttgcctaaccctccttaaaagtggaaatggggggcttttnnnnnnnnnnnaagttatttttggttttttaagaaaaaagggcccactggaaaaaccccctttttttctc

SEQ ID NO: 426583 - DNA, 421 bp, Homo Sapiens
cggcatggggtgtaggcgggagggagccgggttaggcccgcggcgttccggtagcgtggctgctgctcgcgcccggagggtcacgccggtctcagctcagatttgccctgggctgaggcagcagctttcgatgggtgtggcaggcggcaggagggcggcagagggcgaccgggcacacagattctctgtccagctgttccgggggccagtggtgggagcatgtgagccgcggcctctacctcccgcccccagtttcctttggcctccagcccggtcttggcgcctctggccaagggattttccgtttctcctgcctggagcagtgattcataagacctaggggatttgcccggaatcccctttttttccaggcctggactgtggatgcaggctctttgggaacagtgatcctcaggacagc

SEQ ID NO: 426584 - DNA, 246 bp, Homo Sapiens
ggagttcaggtgggggacgttgcgccaatgcaacctacatcaagagcaccatgacttaccatgctacattcgtggctaaaccatttggctccgcgaggcttgaggtggcaggactgctcgctggagagctgctgcaggaaagaacattcagaggtgtccagcactacaaagctgactgcatactgtctaacacagatcacctacctctgatgcgacccgctcccacactcgatggaacactgactc

SEQ ID NO: 426585 - DNA, 304 bp, Homo Sapiens
aagaatctaagccccaaagaaagggaatctttaattaagggaaatcaaaaaaatatttttaactatttaactgaaaaacactatgggtaaaagcaaaccaccttctttatcagatacttttgttttttaaaatttaaatattttgacttattttaggttcaggggtacatgcacaggtttgctatacaggtcaactcacgactaaagggtttgaagtatggattatttcattacccgcgtagtaagcatagtacttggcaggtatctgtcttttttgtcctgagcctctacctcctccttctac

SEQ ID NO: 426586 - DNA, 100 bp, Homo Sapiens
cggcatgagttcagttctgaaaaaggaaactggtgcttgccaggaagaaggaagtcttcctcttaagactctagcagattctcttagaccagtggtttgc

SEQ ID NO: 426587 - DNA, 392 bp, Homo Sapiens
ctgtgtctgctcagcatcagggcctcccactgaagccctcccacaccctcacacccttgcctgcaccctgtgccctgaacctgccatgcacagccctggccaccccagcacatggggtccagtctgaagcagttgcccatgagggctgccccaggctgaagcccaggcccacgccacagctgaggtgagcgggatcttccaccaggaagccccagccttccagaagggaggtcttggagctccaggacagcaacccaggactgccagcactcacaaagcagcaagggggaggagctcactgggttcccaagggctgcgggagggtgaagaggtgacccagttgtggggcagggggagtttggctggcatggccacctcaggccctgcaggcc

SEQ ID NO: 426588 - DNA, 339 bp, Homo Sapiens
ccctgtgatttatttatatggggttgaagtactgcaggggtcccgtgctgctgtgtcaggattgggcccacgtagcgcgcagaccatttgccttgcatgaaaaatgcatgatggcgtcgggaagccgctgggaagtttcgcgacgcccgtgcaggggtcctcgcacggccgactggctgtcagcgccccggtcctgccgcccatgttgccaatggatgagccaaatgtccctcgtgcgaggggccttgtagatcctgcagacaccgcgcctctcaccagggagtaagggaatggtcttcccctgggacccacgagttcatcctcagctccaccttcacc

SEQ ID NO: 426589 - DNA, 453 bp, Homo Sapiens
  misc_feature (129)..(208): n is a, c, g, or t
cgccatggggtctgtagtaggggcagtcttgtgggactgggcccttaacttgtggggtctgcactaactccaggaagaagttagtatcagaatggaatttcacttctcagttggtgttggagaattggnnnnnnnnnnnnnnnnnnnnnnnnnnnnnnnnnnnnnnnnnnnnnnnnnnnnnnnnnnnnnnnnnnnnnnnnnnnnnnnnccatgcaagggacagcgtagggcatggagctagcagcagtgactgcaaagcaagcaagcagtgcgatgcattccctctgcatgggtccccagggcacaaaagtctaaagtgagaaggcacagaagatacagtgctagagacactccccatgtttcacctgctacttgccagagtccctgcaccaggcccagccaggaaactgcagccatcccactgccaggacccacctaccttctgcaggattg

SEQ ID NO: 426590 - DNA, 421 bp, Homo Sapiens
  misc_feature (41)..(214): n is a, c, g, or t
  misc_feature (223)..(254): n is a, c, g, or t
gtcagacagctcatcactgtgcttgcatttcttccaatcannnnnnnnnnnnnnnnnnnnnnnnnnnnnnnnnnnnnnnnnnnnnnnnnnnnnnnnnnnnnnnnnnnnnnnnnnnnnnnnnnnnnnnnnnnnnnnnnnnnnnnnnnnnnnnnnnnnnnnnnnnnnnnnnnnnnnnnnnnnnnnnnnnnnnnnnnnnnnnnnnnnnnnnnnnnnncggctgctnnnnnnnnnnnnnnnnnnnnnnnnnnnnnnnntagtagtaacagtaggagtatttaggatgaatagcggtaggatgaggaagatgttgagccagcagggaaagttgtgcatttttctagaagcatcgtactatgttggcattgcacataagtccatgacaacctatttcttatggaccagaagcacactgtgaacacca

SEQ ID NO: 426591 - DNA, 460 bp, Homo Sapiens
  misc_feature (400)..(400): n is a, c, g, or t
ggggggctctgattcccccctggcttgcgccaaccgcatgtggagaaggggaagatgcctggggttggggagcaggaggccaggccagggggcagcagctgggatgctgggacttgtcagatcctggataaacctcaaaggtgaaggtgatgggatgtgctgagagtcatcagtgggatgtgcataagagggagtcaaagatgtctgagcagagagaaggacctcgctggcatctacagtgaagggagggacctcgctggcatctatagtgaagggaagggtcacgctggcatctacagtaaagggagggacctagctggcatctacagtgacgggagggacctcgctcacatctacagtaaagggaggggccacactggcatctacagtaaagggaggngcccccactggcatcaacagtgaagggaagaaccaccctggcatcaacagtgatggcgga

SEQ ID NO: 426592 - DNA, 434 bp, Homo Sapiens
catggggtctgtacctgtcctcagggtgcagggccaatgcctccagcctcaggactcccctctcatagcccagactctgaccagctccctgccttgagccagagctggactgagaataaggctttgtttcctgagcatctgagaactggggctctgcaaggcagccagggctggagagaatgagggcgcacaccccagacagcttgtgggtgcaggaatagcctcaggcagacaggagtggagccaagggtagatttaaaacaaaacacaaaattactgatgcctgcaaacaaagtggcttctctcagagaacaatttggaaatggttaagatcatcttggaatagtccacataagataattcttctgaagacctttaggggtgcagctgaatttgtgtgatagaagtaactacacacttggattattttccca

SEQ ID NO: 426593 - DNA, 320 bp, Homo Sapiens
  misc_feature (292)..(292): n is a, c, g, or t
gatggaggacagccagagggacgaccggaccctacttctggtcccgccttcagacgatgaccatgccgttggcgacattggaggcgacatggttatcagcgcagttgacgctgacatcaagcacaggcgcactgtggccctgcagcatcgctgacagcagccttggtcgcccgatccacatcagagaagcgcacgcgacagcgttctcactgacagacaccacgcaggccccctggcggaaggcatgaggcagccaagatgctgcgcacaggatgtgagctctgcttagggnggaaactctctccagcgttgcgagcgca

SEQ ID NO: 426594 - DNA, 225 bp, Homo Sapiens
gaactggtgcggaccgtgggaatccgactgatcaatttgtacacagcattgagaaggtccgtggcgcttgctgacgctatggacgctctgccctgtgctctcagtgttacagtgattaaattcaatgaagcgcgtgtaagcggcggaagctactatgactctcttaaggctgccaaatgcctcggatctaattagtgacgcgcatgactcgctgaacgagattac

SEQ ID NO: 426595 - DNA, 202 bp, Homo Sapiens
cgacctgggggctgtacacacaagagctgagggcccgggccctcaatactggcgagggccggggctgaaaacatgggcggagcggccctgcccacccatagagtgcgagcacgaccggaagcagagcagccggccagggctgagaggctcaggcggacgacaggcagctcaggatccggtccacccactgatgggccgaggg

SEQ ID NO: 426596 - DNA, 374 bp, Homo Sapiens
  misc_feature (302)..(302): n is a, c, g, or t
  misc_feature (309)..(309): n is a, c, g, or t
  misc_feature (359)..(359): n is a, c, g, or t
ctccagcaaccctactccaattgtgaccatcaaaactgttcacagacactgcctggcgtcccctagtgggggagtaaaatcgcccatggcggagaagccctgctccagagggaatgttcatacccccactcatccaggacaaggaggggcttctggtgttactgggaagggacacaacctggccttggggttggctggaggtggctgcatctctgcagtggcactatttttgggtctgtctgccgagctcctctggatgtgagccctggcccttcctttccagttgcttaagacccatgagntgggtgngtgcgagggacgtcagctccatggactcagcacctggaactgcgccaggnggagtatgtgtccaa

SEQ ID NO: 426597 - DNA, 311 bp, Homo Sapiens
atgagactgctaaaaaaggcgggaggtttttgtaaatgagactctgttaagaggatcgaagcaatcataagagacacacttttcccttctattaataaaaaattatacattgtgatcatataaatgccagcaattcatagagaagaacggtaaaactctccatgacctcacgaccaagagataggctagggatactatcttgatatctgcgagaggcatttaaccttttgagagtcacagatatctgtgcgaatctaatgaaagttatagggctccctgagcccataacatgaccacaattttattttttg

SEQ ID NO: 426598 - DNA, 317 bp, Homo Sapiens
cagaccagacccctcatcaggttcacgctggccccttgccagtctttcactaaaagcacgttctttgttgtctgcacacctgagaagcatcacctcccccagccccatagctcaggcaaccagcagggctggtagggtgatggtcaggaacagttttcaggggctgagaacttgataatggatttctttctgaagcttgagaagttgtttctagatgggacctgcagtattctctggatctcactatttagacttcacctaaggatgccaggaaacttggaaagatttgacattggtcactccagcggttgcgcgca

SEQ ID NO: 426599 - DNA, 431 bp, Homo Sapiens
  misc_feature (48)..(134): n is a, c, g, or t
gctcgcgcgtgtgtgcagggagtctataggataccctgtgaccgcaannnnnnnnnnnnnnnnnnnnnnnnnnnnnnnnnnnnnnnnnnnnnnnnnnnnnnnnnnnnnnnnnnnnnnnnnnnnnnnnnnnnnnntaaataaagaaataaaagagaactctggggcaccatgtgaggggaactccaaggagagtcttgggtagagacggagcgaggagcacaggcaggatgctgcgccttccaggaaaggtcagtaagatgtccccactggcaatgtgattctgggaccatcgagaatgggttatttgctttgctgcgtgcaaactcctctcatcgctccaatcttctagggaagctgctcacacaaaggccttcttgcagaatcaaggagaaggtgacgcattcctctggcactcttctctgcccccagcc

SEQ ID NO: 426600 - DNA, 248 bp, Homo Sapiens
agagggacgcaccctgtctgactacagcatgcacacagagtccacactgcacctggcgctccgtgtcagaggtgggatgcacatcttgctgaagaccctgactgcaaagaccatcaccctcgaggtggggcccagggacacgatggtgcatgacaaggcaaagatccatgatacggaaggcatccctcctgagcagcacatgaggatctctgctgctaaacagctgaaagatggacgcaccctgtctg

SEQ ID NO: 426601 - DNA, 215 bp, Homo Sapiens
tgccaacgctgcgcttaaggagaagatccggctctagaggaacacccactacgaggaagttcgaaggctccacgagcgcttaccccgagaggaggtacatgtgaagcttgacaaggcccggccacatctcacggcacgaatccatgagaggccgacgcggcctgaacaaagaacagacaactctcgcgcggctcccgccgacttctacagcgtag

SEQ ID NO: 426602 - DNA, 135 bp, Homo Sapiens
gggttgcagccctaaggaaatgtgtacttaggatgtgtgcccctcattgagttctccatgccacatcaccctaagggaagagcatggagtgtctctatgcctctccacaccttggcagtaggaccagaaaacaac

SEQ ID NO: 426603 - DNA, 260 bp, Homo Sapiens
ctaagaccgagcgaggaggattgagacgaggagcaagtagcttccacctgtttgtaaaggaagcgggagacctggaatcacttttgattcctcctcacctggcacatctcattggtcatcttattgaatcttcctgcctttgcaatgccatgcacttctgatctctccttattcagtatcttaaattgagccctgaataccagttgtctggactacttgtcttcctgtactccagtccttccaccccttctgccaggccg

SEQ ID NO: 426604 - DNA, 451 bp, Homo Sapiens
  misc_feature (429)..(429): n is a, c, g, or t
taacatcgagcgaggaggcatgacagcactgtgatcttcatatactctgaagcacttcttcaaactttggtacttgtgtcatagatacctgcagtaggctgacaatgtggagaaactccaaaatgatatgtaactactactaggattactatctacgccaagtcgatcataactcatgatgcctacacacacaatccagaactcattatatagcctgtaagtcgctatactccacaggagataatgaacgagtactccagagtcttggcaaaatgacctagcatagctggatacatacagtggtagtcttgtactcatacctcagtggacttaaccaaaattgtgttagtctcaattcctaccacactgagggagcctcccaaataactattttcttatctgcagtattcctccagaagagctaaccanggcagggctgcatgagaagtgc

SEQ ID NO: 426605 - DNA, 402 bp, Homo Sapiens
gttctacgagtagcgcaggagggaggcgaggcaggcaccgcagagcttccagctgcctcagggccgacttccatttggcactttgagtccaaggtgcctgtgcaccttgtccagatgctctggaggtggatgctcgggtatgtgggtctgagactccaaacagctcggccaaagccgacatggagatccatcagttcacaagtagtgaatgagccttctcaggtgggtggcagtcccagggtggccaagggtccagggagtgcaccctcactctgcaggtgagtcagaatcaggcaccacagagccagggttgcacccctgctggtgggaacaggagcaccttttactctccccgacacacagcgacaaagttatcatgctctatgagcgccactgggagca

SEQ ID NO: 426606 - DNA, 179 bp, Homo Sapiens
agagtcaacagagtaaaggaatgctctatgatttttatattggtcaggaagaacataaaaatgtcagttaatattagtctttgatgagtgaagtatacatgtgtaatgcctagaacaactactaaaagattagtaaaagagatgtaaaagacatgaaagagcacattccaaatgaacag

SEQ ID NO: 426607 - DNA, 411 bp, Homo Sapiens
  misc_feature (387)..(387): n is a, c, g, or t
tgctaacattcagtgggagaggctaacattgcaggggagaaactgacatttcagggcagggctgacactctccatccttcagattctacagcctctgcctccttgctataccctgtccctacaagtattggctgagctcatagtaggtgcaaatctctgccaccctggggatttgaacatgcctgaatagaatggagtctgccctcatagagctcgcagcctgggggcagacagttctgaacggaatgattacacagaaagacattcacctcccaggcaggagaggtaatcacgcgctcttaatcactacctccgtttctctcaggcaatacgggaggggaggcggcacccccatcgtggcctggtttgagatgttcccagccgtangagacagactgtcatcaagtgtcg

SEQ ID NO: 426608 - DNA, 412 bp, Homo Sapiens
  misc_feature (365)..(366): n is a, c, g, or t
cttgctcaagtatttttaagtgagatggtaacagctatcgccaatcgctctgtctgtccccgagcaaggaatgaaaccgactgtgtagggtcctgttggacacctgggccactgttctctgagggctcctcctgagaaaatctggccaaagatttcagccctatgggcagttagaatctgatctctgaataaagtgactaatgggttgtccaccagcatcttggctagatttgacatggaggcttacaaggcactatgaataacacatgttcctttcagaagggcttcagattgctacgtcctaacacgtagtcacctggtttgaaactggaacagaaatacacctgccgaaccacctgatgcannagtccttcactgaaccaacattcactagacagacacattctgtgag

SEQ ID NO: 426609 - DNA, 480 bp, Homo Sapiens
gggtgtgccacactcagaagcctctaagctgagcctcaggaatgatgactaaggcagcccaaagactctgcagggcccttcagtgaaagcaaaatgccaggcagggtgtctctgcaaccccaaaggacagaaggagggagcaacaggatcccttttactggagaggacactgatgcccagaaagggcacagccttatcgaaggctgcacagctgccaatggcagaataccacagtggcagaacacccaggttgctgggtttttgaagccaatgccaagaggaagctactgaagggggacagaagggtccttagcagctgcaatcacacccaagctcatggccttccccacgaggctttcacagacacacccctcagccattatcctaaattcccagtcaggagagaaactagcaggcttcaacctcttgtaaggcccttgaggtcacctggtggctgccaaaagtcagggcaccagtcaa

SEQ ID NO: 426610 - DNA, 212 bp, Homo Sapiens
atgcttgtgttccgggggcctgttgtgcaggccaaagccctcagagctcagtctctgtgggccatctcaccagggagcagggcggcctcccatccctgtgacctgccctggccatacccacctcctaatggtgggcgaggtgcagctttcggtccattggagacatctgcctaggtgcccacgagactcaccatcagctggcgaagaagttg

SEQ ID NO: 426611 - DNA, 479 bp, Homo Sapiens
  misc_feature (448)..(448): n is a, c, g, or t
  misc_feature (465)..(465): n is a, c, g, or t
taagatccagcgaggaggtatggataatctgggtaagtgccatggaaaaataaatatcatgattgaacttgaggcaaatggaaacagttcaaattggcttcatacactactctgtggaacatatgatgtccatatgtccattaccaacaaactgaaacatggaaaataacaaaagccgatgctatgatggctataagaacacacccaatgccagtctctaccacaccgcagcagcataacttactacagctgccaggtaagttggctaagaagtcagaagcaataagaaaaaaaggagaaagaactaactataaactgttctctttccctacagaagacaaagttgggatctatactagaaagtagaatgtagcaacgataaaggctgaaagtaaagcacaattttttctctgtagacagtttctaaaagtataaactactttggaantaaagagggcaacattntatccaaaactaca

SEQ ID NO: 426612 - DNA, 462 bp, Homo Sapiens
  misc_feature (384)..(384): n is a, c, g, or t
agctctccatcagggatggggtggtcccggtgctgtgccttctcagttgccgcttctagggaggccgcctaggagccagcgagggaagggcgggcatcggtgtgcccagaaggcagcgcgctgctctgcgggcccttctcgaggctgccgccgtgggtgctgtgcgtgcgaagcattctgcagggcaggccggggtccacggcgcccgggcctgagtgggagccgaggggcgaggatgggtggcccacaggacaaggatgaacgcacaatcgcccttgtgaggccgtggccttggggggccaccaggccctggatccagcatatggcctggacacgatgcacccaagcaggcgcagcctccccttccctctgaactgtcagctngcaagggttggaactgctgattatggaaagtcctcggatcagagtgatcacagctgactgtgcttggacctaatgagg

SEQ ID NO: 426613 - DNA, 147 bp, Homo Sapiens
ctctctggtgtttattaaacttaacccaggcagattgagtctcagccatgttagagattttcctggattagctgccttgtagtacaatctagaatttttagtgttcaatttatttcttgaactaatcattcaagtagattgaaggaa

SEQ ID NO: 426614 - DNA, 291 bp, Homo Sapiens
atgggtgggcgcggccctgtgggatggtgctctgtggcagggctggcagtttctgggtgtgtggcctgtgggtagcctttgtactgggcgcacagtccccggctcctcccttccaacaccttcgccctgagcggcctcggaaatggggcttctggcggctctgcaggcaccgtcagagtcagagggagggcgagcggcttttggtttctgtttaaacagcgtcctgtcgctccctcctctcctgtgcggattggcgctgcggcttctgtgttgagagggaaacttgaaacc

SEQ ID NO: 426615 - DNA, 302 bp, Homo Sapiens
cggtgcccaggcaggtggcctggggcttacctgtctgcccctccacaccgcagcaggagtgctgtctcaccctcgtgaccccttgccccgccgatcgtggacaggttaaacccggcttggggggacccagtgagtccccgcccctccccctgtcgctcgccacccactgtgggcttcgcgggcttccatgttggatcctcggcctggtcgtgcttgctagcttcgccaggttcttctttccagtcctgggacttccctggagaaggggttcctgcacagccctctctgagaaggcggaagcc

SEQ ID NO: 426616 - DNA, 429 bp, Homo Sapiens
  misc_feature (401)..(401): n is a, c, g, or t
agaacccgcaagagatgagcgcgaggagcgagagcaggcttctgctccacctgagctggttagggagctcaggacgaaactctgagcggggcagtgtggtatgtgatgatcccagagtctgaggaagagtgtcctaagttcctcacactctatctccaggaggaactacgatcgcagtccagctgcaaccaaacatgcatgtcttcccgccgtggctggctgctttctgtctgcccctccaggcctcttggtgttgcagaggagggggtaggagagggaaagggaacggttccaggtcacctctaaaccctctagaaatgaaatgggaatgaagcaggtcacaaactcagcatgcagggctggcttcccgggaggtagatggaagtgggacgggatagcangtgtggagaggacaggaagggaaacagg

SEQ ID NO: 426617 - DNA, 246 bp, Homo Sapiens
  misc_feature (212)..(212): n is a, c, g, or t
aaaaagatatcattcatttcttttcaatggcacgcattgttatttgatggaaggaagaactcttgtgcatttggatacataaagaagttcacatttttgctcttagaaggagtctggctttgagtcagacagtcctctaccatttgacgttgacgtctaataagatgataactcagctttataaacagtgctcttgttttgagacacaaggnacaatacaggaaaaacgcggaagtccagctcaca

SEQ ID NO: 426618 - DNA, 142 bp, Homo Sapiens
atcgagcgaggagagagacttactactgcagtgtgactagaaactgaatgggctaactgcacgccggcagcaactaaacggattcctctggcctaggggctcctatatgtcaggagtctgacgaccacttcagcgatctgga

SEQ ID NO: 426619 - DNA, 136 bp, Homo Sapiens
gtagtgaagggagacagaaaatgggagatggcggcaattcactttcttggttttttcatcttttctgttttgttatggggggatagccgcccgttttttcgtttctcgaagaaaacaacatttgagggggtgactt

SEQ ID NO: 426620 - DNA, 261 bp, Homo Sapiens
catttcctggccactgtgctagctcacatcaagttagccttctttcttgattttttagccaaggactatgtgacatgaagttaatatttagaattcaccacggcaaccatttttaaacaccaagattatctaaactgtatggacaaactgctgaaaaagtttggaagtattccctaccctccagtctcccaaatattagtcaactcgtacccaagtttcactctcaaaacgtgtcgaagcagaaccaagcaagacttttta

SEQ ID NO: 426621 - DNA, 289 bp, Homo Sapiens
ctcccagtgtttctacctggagtgttacctcacctcacactgctccatgcatagtgaagtggattcaaatgaatgaaacacccacatcacactcagctgaagaggaagggccaggaattcacacggagttggcggtccgacattacttacctgctctgttctgtggctacctgtggagattgtgcagcctgatgcctcaagggtccaagaggaaagagggaagcctgcctgcctgacctcacagggcctggtggaacctagaggtctgaggaaatatttgaggatcatg

SEQ ID NO: 426622 - DNA, 103 bp, Homo Sapiens
ataaaagaatctaagacagctcactgcacttcattgtaaccgatgaattgctctcccaggaagcctggggttctgtggagagagcattgtatagcctgtcaca

SEQ ID NO: 426623 - DNA, 551 bp, Homo Sapiens
  misc_feature (461)..(461): n is a, c, g, or t
  misc_feature (493)..(493): n is a, c, g, or t
aaagatcgagcgaggaggtggagttgggaagtggacctctttcctcagacccagtatcggctagaaggatctgcaccactagatctctaaacattccaccataattgctacgatctgataaatgaaaaccgccattaacagacgcgaggcacacttgcgcacttatacaacagacccaacaggagcactgctgagagctcattgactcgtgaggctggcatcaccttgatcgccgctcatgagcaactgataagaaatatctgatgacttgtgaaatagcaatccagtggacacactttgactttcactgcattccacgccagcgctgaatctccctatgagtgttcttgcaaaagcacagagaattagatggggtgatagtgaactacacacagctctggacggcatccaattatcttcttcctgatttttaccagaaaactaggctcacggagagcggngtgaagggtgactgtcaattaagccgcctggngtagctagagaccaataaacctactttctaaatcagaggcaatttcctttccacagcg

SEQ ID NO: 426624 - DNA, 358 bp, Homo Sapiens
ttgaatgatgatgtaaaggttttccggcttggctagttaggtgattgtgacctcccaaccaagacagggagtataagagaatgagaaggtttgagagaaaagattagaattattttgaccattctggggttgagatttctgtgggtggtgacatatgatagcaagtttactgggccaaggccccatccagaggcagtcacagacctgagggctcttaagtatagaaggggcactagaggcatgggtctggacaagctcacctgggaaccaaggcagaggcaggatgagaagaagaaaatatgggaaatgatagcatttaaggaatggctagaagaagataattcagcaaatgacacac

SEQ ID NO: 426625 - DNA, 173 bp, Homo Sapiens
aggtggcgaaagtagagagcagccttccagttaaagatcagccctgagctaagaggcagcttgccgcagtctggctctcaggcggagtctgtatcagagggaggagcagcagcacagggggactgaggcgctctacatctcattcaggtcaagcagggtctggtccagcatgc

SEQ ID NO: 426626 - DNA, 192 bp, Homo Sapiens
ccagaggcaccaaggaggagccgcgatttacacgctgctagcccacatggggctgtcttcgctgcgactgctcacggcagacagagaacccgcttgagcagtgcacccactgtggctagctcctgtgacccctacaccctcacgacacagggtgtgctcagaggatgcagcactgctgagggccacagcagg

SEQ ID NO: 426627 - DNA, 192 bp, Homo Sapiens
agagtacaggctgcagggagcctcggtcctcctctcaccaggcacagagggggtgtccctgggtgggactgagtgagttctggcatgtgtgaggaggtagctagcatccacataacctccctcacagaccacggtcgagggggccttttaggggtaagaaaagggcatcccgtgcctgtcctgaccaggagc

SEQ ID NO: 426628 - DNA, 159 bp, Homo Sapiens
  misc_feature (82)..(82): n is a, c, g, or t
  misc_feature (103)..(103): n is a, c, g, or t
caggggactcatgtcctggccccacctggtgaaaaagggagagtcatgctcaacacgttgaggagaacctttccagcaacangccctgccttgggattctctntctctgatttgactctgctcctggaatcactgcttgtggtgccggcccttgagtgg

SEQ ID NO: 426629 - DNA, 164 bp, Homo Sapiens
aatcacccacacagtccaacttccttttcgtgtaggaaatgttttctttatcattaattgatcagttctcccctttccaaacttctggcaatttgggaaatggaatctttatgttgctgggtattttctccttcacacctccttctccttgctggacaggaggg

SEQ ID NO: 426630 - DNA, 215 bp, Homo Sapiens
caccaggcagcgaggactcagcctggacgaggtggagaactaggtgctgtgctcatccccctgttagactaccaggcagcctaggcctgtggactccggggccctctctcatgcccactgctccaggctgccttgtcctgtcgctcaaggccaccctgggcctccttgcctcctgtatacccacaaatccgtgtgattccattgcaggtccacag

SEQ ID NO: 426631 - DNA, 322 bp, Homo Sapiens
ccagagacaccaaggaggtataataagagagtgttcatggctgattttcttatgttcttttgggttcctcagggaacaggaacctggagagtagggctctgaggatgcgactttttccctcagggatcggtactgagatatggaagccgagctgtgggtgggggtgagccctgggtggcggagctgctggcgcttctttgttgcttggcctttctcgataacttttcatattcgcctttcttttctgtttctgttgacttctccctacccagacctccctcctcttttctacccaaatatctgtcccctccttggtgcctct

SEQ ID NO: 426632 - DNA, 295 bp, Homo Sapiens
  misc_feature (162)..(223): n is a, c, g, or t
gaccagagccgcggagcccaatacctattgcatgaaccgcactaggaagagtggtagtatgcgaagagctagcagtcttcaggacatgaaggcggggtcaaagataaaggggttcatcttgtgtttcaggagcagtgagttgcagagtcttcctctggaagnnnnnnnnnnnnnnnnnnnnnnnnnnnnnnnnnnnnnnnnnnnnnnnnnnnnnnnnnnnnnnctgattaactctttacagaacattaaatatgataatgccaaaataattctaatgattgaaatgctttgagtc

SEQ ID NO: 426633 - DNA, 356 bp, Homo Sapiens
agtcatccaaagaatttctatgtgccaaatcaaatgactcatgggcagggtgagcgtgggatataccaagtaagccatggtggccgggtgggcttatactccaccaggggagtataagtggagtgaaatgttccgaacaggccaagtggcctgggttatagcaagcgggccataaggcggcatgggtgggtgttgtaaagtctcccccagaggagttgcatatcgtcaggagctctgaccctggttcagatcatctgggtctgagtcctggtgcttccgtcttgagcacacctgtctcagatctgagtatcaatcacaagccctcctcccatgcgaccttggccaagtgacttcac

SEQ ID NO: 426634 - DNA, 286 bp, Homo Sapiens
tgaaacagactttatgccgaagaaagagctcgccacgtagttatctatgacatttagactagagagagagagtaaaatgtaagttaaacaaagtcatgcaaggtatttcaaagactggcttatacagtaagtaaaactgtgttttaggcacttcatatgtatcaaattacttacttctccccacaacccaatgagtaacatagaaaagtaaataacttccttaggtttacactgagggagcagaatttgaatccaaattcaaacccctacaatatcctgcctctgg

SEQ ID NO: 426635 - DNA, 205 bp, Homo Sapiens
ggccattctaagagaccacttccctatttgtcagaaatgtgattgtgtttactccaatttaaaacagggtctttacatacgttcctaatacaagtgctgcttgctactactactcacagcgctctgtgcccaactcttaacttcctccctcaagtccctctggaaagaagagaggagatgccttccttctgacgatgggacccct

SEQ ID NO: 426636 - DNA, 351 bp, Homo Sapiens
agggccactggcagcagacaagaaacagatcttagttctcacatccaaataaatgttggctttcaccctcctgtcccatcatcaccagtctgggtcccagaccaagcacctcttccctgccactctggcaagagttggtttcctgactctgttttttgccactctagtccactatgcacattcttcccagattgttcttcataaatcctccactcacaagcttgcagcctttcctatcacagtcatatccaatctcaattcccctgcccagtataatgggactcgactctagacacctgacctaatttctctccactccatgcacgcttccttggtgcctctgggggtacc

SEQ ID NO: 426637 - DNA, 391 bp, Homo Sapiens
  misc_feature (51)..(77): n is a, c, g, or t
  misc_feature (84)..(184): n is a, c, g, or t
  misc_feature (207)..(318): n is a, c, g, or t
ccagaggcacagaacatagcactccctacccttggaagctgtgtgcattgnnnnnnnnnnnnnnnnnnnnnnnnnnngagatgnnnnnnnnnnnnnnnnnnnnnnnnnnnnnnnnnnnnnnnnnnnnnnnnnnnnnnnnnnnnnnnnnnnnnnnnnnnnnnnnnnnnnnnnnnnnnnnnnnnnncggcaccaacacgcccagccaannnnnnnnnnnnnnnnnnnnnnnnnnnnnnnnnnnnnnnnnnnnnnnnnnnnnnnnnnnnnnnnnnnnnnnnnnnnnnnnnnnnnnnnnnnnnnnnnnnnnnnnnnnnnnnngtgtgagctgacgtgcccggccagaagctgtgtgctttgaataagccacttcgcctcgttggtgcctctgggg

SEQ ID NO: 426638 - DNA, 139 bp, Homo Sapiens
cctgaacgattctgccaaaccttgctgggcggagaggcgggcctagctcgccaagacagcgcttttggagctgccttccatgtggactgcccaacatcaagagagctgagaatgacagtgccaaatatgactacacccc

SEQ ID NO: 426639 - DNA, 256 bp, Homo Sapiens
catggtgccggctatctttaggacctcaagcggcagtgcctggaggcgggagtacactagcagacgcaggagacataccagcagctcagcagaaacctgtgcggatcccactgagagcacgccgcacgcgaagagccttgaccgtgtcagaatactgccgcgacacgatgacacgatcgacgcgcattagaaacggctctatgacgagacgcgcggcatggatctacacctatactgcagacacacactgtaagga

SEQ ID NO: 426640 - DNA, 310 bp, Homo Sapiens
ccagaggcaccaaggaggccagaggcaccaaggagcatgattgttagatcgtgtggtgaacaatatgtttagttttataagaaactgctgaattgtcttctaaagtagctgtaccattttgcattcccaccagcagtgaatgagcgttcccgttgctccacatcttcaccggcatttggtgttgtcagtgttttggattttggccattctaacgggtgtgtagtggtatctcattgctgctttaatttgcagttccctaaggactattgatgttgaatgtcttttcatatgcttatttgtcatctgtata

SEQ ID NO: 426641 - DNA, 281 bp, Homo Sapiens
cggcgatcaggtgttggctcagacactcacacaaacccacctgtattctttcacgccgtaaatcctctttggaaaaaggcgacattcaataaataaacatcaattgattggtctgctatttctttgtgtgacagtcataaaccagaactggccagcaacgtcctcatggacccaggcccagctgtaactgcccatgtgcttatgtgaccagctgtgaggactgcaggcagcctgcctcccggctcctctctcccgtgcatgctcttcatgacgcacttctt

SEQ ID NO: 426642 - DNA, 340 bp, Homo Sapiens
  misc_feature (315)..(315): n is a, c, g, or t
gtagtgtctgggagggtagcagtgagtgtggtgaagagggatcaattttgcaacatattggcaaagatgtgcaactgaatatgagtgtgagggaaagaaaggagtgaaggatgactcttaggtttttagtttgaacaactgggcaggtgttgctgccactgacaaagatgcagaagactaagggagaaacagtctgtgagatgaacttgagaaaccaagagttccagtttgggcatgaccagtttgagatgattagacatcaaatggagacatttatatatacattcatgcaagatgcacgcacatataacatanagaatgatgatgtcactgatgctat

SEQ ID NO: 426643 - DNA, 185 bp, Homo Sapiens
gccttggggacaggggaagggaatgtcagtgtccttttgaaggctgtactggataaggggagaggagtcctacccccagcaggcccaagggcacaagatcagcagaggactcagacagttttttctttcctcataggatgagcaatacccacagcactccgttcaaggtcacctccttggtgcct

SEQ ID NO: 426644 - DNA, 181 bp, Homo Sapiens
gcaccacagatcaaaacagcacagactcccatatcttaaatgcatggagctcaactcttgagtattttcagaaacgtttacacatagaagatctgcggattgagaaactgttgacgtataaacgagaacacctacaaggatgtcatcacacccaagattactctgagcgcgaatctataac

SEQ ID NO: 426645 - DNA, 275 bp, Homo Sapiens
ctgggggctgctatgtgccggatgatggagtcctctgggcctgtacaaggggcaggacctgggccctgggatcaggccaacctgagtcacactcagctgtgtcctgaaggcccccttgagctacagcaaaatctctcaaacacaccagccctgggtcctcacctgtccgtcaggaccacggcaagggacgagaacgccaaggacactccaggtatgcgcacaggcctcagccggtggagaggaaccactgcctcaggcagccacgctctgccttt

SEQ ID NO: 426646 - DNA, 313 bp, Homo Sapiens
ccagaggcaccaaggaggagaagcccctggaatagggggaggggccacagcactccaagcctcccccatggactccatatcaggggttagactggatgactcaaaatggaccattttatacactcttcccatcttctgtgggtacaagaatggccttggaggaagccctgttggggcttagaccatattccctatcccttccagcatgatgctggtgggtaataccctgggtatcagaaatggggagcagttgattattattctcactgaggtgaaagtgcaggatctcccagaggaggtcaacattctccaa

SEQ ID NO: 426647 - DNA, 241 bp, Homo Sapiens
ccagaggcaccaaggagtgccagaggcaccaaggaggccagaggcaccaaggaggcagggacccttgcctccttgcagcctctgggccccaggctgagcctcagtctccctccctcgaggcccatgcagaggctcacaacacacagaacagagctcagccctgcggccagagagagagggatgtagctgtgcagatagagaggcatggcaacgtaagactcggtagtagtacacacttgat

SEQ ID NO: 426648 - DNA, 153 bp, Homo Sapiens
ctcatgtccactggaaccgccacagctgcttctaacacaggattttgaggttgcttcagcctgacgctttttttgtgctatctcctaatagcaaaagaccctccagcgacaaccagtatgccaagctccgtgtgcacaccgacttcgaccttg

SEQ ID NO: 426649 - DNA, 232 bp, Homo Sapiens
gtgagaaggatgagaaaagcgagagtgatgatgagaagcgtgagcacgatgaggatgctaagaaggacttcgtaaagatggagaagagtggcgtgacccacgctgccgatgtgcggaatcagactgagcaccagccctactacacatcgtctcctaacaggactgtctaggaatggcatcagactatacactgtcatgagcaggatcacactgccgtgcccacagaccagac

SEQ ID NO: 426650 - DNA, 172 bp, Homo Sapiens
ccagaggcaccaagcaggtcagatgaacacagccctaagtggctgtcctccccaccagtcaatatagtcttaaccaccttctctcctgagtctgctgctcacctggaccttggctgtccttcggtcactctgcatgtcaggctgactgtcccttcctccttggagcctctgg

SEQ ID NO: 426651 - DNA, 286 bp, Homo Sapiens
  misc_feature (88)..(165): n is a, c, g, or t
gataggccagaatgactctggaagtataactcggaccctgatagagtgtaaacctggaaatctgcactcacaatgtgcctaagctcannnnnnnnnnnnnnnnnnnnnnnnnnnnnnnnnnnnnnnnnnnnnnnnnnnnnnnnnnnnnnnnnnnnnnnnnnnnnngtttctgattgaggggtctgagggaagacccaagaatctgcatttcaaacaagttcccaaggaatgccgatgctgccggttctgagaccacactttgagaaccactgacgtaaccaaagtc

SEQ ID NO: 426652 - DNA, 245 bp, Homo Sapiens
aaatcaagttccgggacccttcccacaggggggttaaaaaattccttgtgcccagagaaacctaccgttttattgggaggagcacactgaattgtaaaacacaggacccagacttttccggggaaggggggcaccaccagggagggccttgaaagaggtgttggttgtttaagcagccacgccttcggtttctttggagccagagcctttgtttaattgggttttttggccttggcctctttggg

SEQ ID NO: 426653 - DNA, 291 bp, Homo Sapiens
tggttagagaaagaatagaaacaagacatttaacttcaaagaggaaggggcctatcactttgaattagaataaaagtaaataagctggtgatgtggtccctcactcacagctgtcacctgctcagtatagtttcaaattcattagaattcagaacatgaagcagctgaaacttctaagggagttcaacttgaggctaattcaatgagatagcactccagacacccagaggcattagaggttctcatcacaagacacttggttgacagtactctggccagagccctccttgt

SEQ ID NO: 426654 - DNA, 399 bp, Homo Sapiens
  misc_feature (73)..(172): n is a, c, g, or t
caccaaggaggggcagatatattattctcctgtatactggatcgaatagtgtctctgaaaatgaatgtccatnnnnnnnnnnnnnnnnnnnnnnnnnnnnnnnnnnnnnnnnnnnnnnnnnnnnnnnnnnnnnnnnnnnnnnnnnnnnnnnnnnnnnnnnnnnnnnnnnnnngacagacatggcaaagtctaggagtccccacagttactctcttgtaggtgctatcagtgctactcaactttttatgtttctctcttcacgatccccatcactactgcctttgttccaggtctccttggcttgtgcctggaccatcgcctaacttctaacggcctctgtgtttcctctggcctctcctcactcaaacccattgtaatcagatcacagtcccagaacca

SEQ ID NO: 426655 - DNA, 302 bp, Homo Sapiens
gaaggggactttacgtaatcaaatttactttcaccttgttttctacaaatggcttatgcataaagcataaaacaacagtgggttttaaaaattgatacatgatattttacatattcatggggtacatgtggtgttttgttacatggatagaatgtataatgatctagttgggttatttggggtatccatgacattgagtacttatcatttctgtgtttggtgaacattttgagttgtcttgtagctactttgaaatacacaaaacattgttgttaactatagtccctccactctgctatcag

SEQ ID NO: 426656 - DNA, 165 bp, Homo Sapiens
ccagagacatcacggaggcagcgtcacaccgagacgagggtctgcctgggagcccaactctcgacctgccatcattctgcgccactgcgacgcctcactggcccgggctgggaagaggctgcgaacccgctctagctgaccttgggaagacagcctggaaggtgc

SEQ ID NO: 426657 - DNA, 261 bp, Homo Sapiens
gttggcctagtcatcctagtcggagtcctcatgcttaccatggcctttggccaagagtagttactgagcaaatgattgttaactgactagtagtaactcaggttactgtggaacttgatttctacttctatcctgtatcttgagcatataggaggcgtctagtcaacacttgatggattcagatttatctcgtgaattaaccatcttttgcagccaggacggggccctttgattctctctcctgagaagtgacctagtcgg

SEQ ID NO: 426658 - DNA, 261 bp, Homo Sapiens
acagccggggggcccagagcctctgttgagccacacggacgagccaagggactgcatgcccttagcgtgacccaggctagtgaccaaaagcacacagccccatgggcgctatacaacgcctctgcatggaagacctccgaggacaggacacaccctctgcagctcccatgatacaggaagggcagctgaggcacgtgtgtgaagctcagcttgccgtgacaggctgctgtagaccatgcggattcacatgagtgacctatg

SEQ ID NO: 426659 - DNA, 220 bp, Homo Sapiens
atttgaggtattatattacacattaaatacgtttaagttgtagggaagtgagtgctcaatacacactcatttcttcattggcaagtctttcataccaggccccttgaaaacttattttctgggctgtttttcaggaactccaaattggctacaactgctctcttttgactctgtactagaggcaactatcagtctcacactcagcttcagcccatgttcc

SEQ ID NO: 426660 - DNA, 170 bp, Homo Sapiens
ggaaagaaacaaacctcagaggtggtggacactcacactgcaagtgggccaaagcctgctggaaggggtaggatggttgtggagctcaggaatccaggctcctgagggcctggtgtggggagagtaaaggacaaagaggaggagaaaccctggccactgatcgcagcacc

SEQ ID NO: 426661 - DNA, 237 bp, Homo Sapiens
cagagccaccaaggaggccagaggcaccaggaggaaccaggtagggggacacgatgaggaccattgaggctcatcgagactgagtgccaggcttgtgagctactatgtggagaggtccacatgccagggatatgcagctgtggaactagagtgaagcacactctgaaggggcaactctagcaggcaccagacacaaggagtgcctgcgcagagacaggctagcagaagaggaccaag

SEQ ID NO: 426662 - DNA, 276 bp, Homo Sapiens
ggctcctcacgcctgttctcatgatcatctgcgtagcagaagcctatggagttccgacgagaaaggcaactggaaatccctttgagtaaacaagtccccagaagagggagagcataggtgtgaaaaataataattctaccatctaaattccatttctcagccttagttaacacaggtcagaagatctgtcatttgattaaagtcacttccctgggactgagaaaagattgctactgtactcttgaagggtgactctactccactctgtagtaaatg

SEQ ID NO: 426663 - DNA, 108 bp, Homo Sapiens
aagaaaggaagtggaatcatacagaatttgtctttttatgactggcttatttcactctatgtaatgtcctcaagacttattcatgttgtagcatgtgtctgaatttcc

SEQ ID NO: 426664 - DNA, 314 bp, Homo Sapiens
  misc_feature (290)..(291): n is a, c, g, or t
gcttgtataggaagaagtagagggtgaaaagagaggacaaccaaaggattcccaaaacacacagatagcttgggagcagcctgaaggaggtggccacgagaattgaagggctggcccgaagattaatgagggagtctggagaggaaagcttcccgtagcagatgagcttggagggccacgcagtggggccgaccagcccggagagcccgaatataggaggaggggaggtgggctctggtggttcagaggttaacggctatcttcccagaaccttttcaggggagcagtgnngagagattcgtttaattagcaga

SEQ ID NO: 426665 - DNA, 338 bp, Homo Sapiens
  misc_feature (84)..(296): n is a, c, g, or t
ttggaggctccttagtttaacctgactggctctattatagaaggaaagttggacacacatgagacgacacaagctaagcatgtnnnnnnnnnnnnnnnnnnnnnnnnnnnnnnnnnnnnnnnnnnnnnnnnnnnnnnnnnnnnnnnnnnnnnnnnnnnnnnnnnnnnnnnnnnnnnnnnnnnnnnnnnnnnnnnnnnnnnnnnnnnnnnnnnnnnnnnnnnnnnnnnnnnnnnnnnnnnnnnnnnnnnnnnnnnnnnnnnnnnnnnnnnnnnnnnnnnnnnnnnnnnnnnnnnnnnctgggtcaagaaattcagaggcccagagaatggggctgagta

SEQ ID NO: 426666 - DNA, 212 bp, Homo Sapiens
gatagaactcaaagaataaagccatgaggaatcgcaaaatgtttttgaacaaaggaaaatatatgtaaagtggtgtgttaggaagaattatcctctgtaggatgggtcagtggcgtcgagtcaggatcagatgggaaactcttatctagggttggccgatgggcatttttaaaatgttgaaaatactaataatgctttcttgtgcatcagtt

SEQ ID NO: 426667 - DNA, 167 bp, Homo Sapiens
ctgagcatacgcacccagcctagagacattacttgctttcttttcgactgcgtctgacactgagtttggctcttgacgccccacgctgcactgcagacctgcgaactcgcgtcactccaaactcagccttccgggcacaagacatcctgcgactccagcctaccgag

SEQ ID NO: 426668 - DNA, 445 bp, Homo Sapiens
  misc_feature (365)..(365): n is a, c, g, or t
  misc_feature (413)..(413): n is a, c, g, or t
gcgccatcagctggtgctcagagcccggaggaaggaactccccccggagttggggggggcggccctagggatgcctcaccggccccatctctccacggagctacgggtagcatcgcccatcgctcctacaccccacgcgccctggcccagaaccggcgctaggctcgggcagggatcacctcgaggccggggctaccccaattttagggcctgaagttacctgttgctttcagggactccgagccctgtatttctccgtctgactcagctcctagaccacacgggagcctctgctcttttcccgacatctccggatttcagcatctggctcagcttcctgggcatcggtacctgcaccatcatcntgccacacatctgcaagcttcagttcctcctagatgcccggctaaccnccacccacaagatctacacccgtcgatctagc

SEQ ID NO: 426669 - DNA, 184 bp, Homo Sapiens
aaggaggagtgaagttcagatccggctccagcagagcccctccacccactcaccacataccccttaggcagcaggttccctgcaagtgctggggcagccattcacacacacacagtctgactcagagatttcatcttcccacctgttcacctttgcacaggaagcctctgcccacaccccattc

SEQ ID NO: 426670 - DNA, 159 bp, Homo Sapiens
aagggcaggtgggagcagtatagtatatgcatgctcaggcagggctagagtttgacctcaccacctcaccagtcatatcagagtagctgtccagacaaggtgtggacacaatttcttatcagaccaacaacctgcaaagcagtcctcagtcctcatttc

SEQ ID NO: 426671 - DNA, 294 bp, Homo Sapiens
caccaaggaggaggcgaatacgaggcggagggagaaactcgaggcggaaagtgaatttgacccagaccttgacctggtagtacagagagtggctgcgaggatgtgtcctgaccatgggcttgatttgagtacctatcgtcaggaggatagccagctcatctgtgtcctgagcccatgtcattgaggctcacctgggccaccaactctacaccctacacgaagcctgtgacgaatgacgacgcagagactcaggtgtactgacagccgttatgatcgaatgggtggacaggctga

SEQ ID NO: 426672 - DNA, 100 bp, Homo Sapiens
ccagaggcaccaggggggccgagccgctatggcctttcctcgtctgctccccagctctatctcagatctgacatatgagtcccgaagcctactcgttcca

SEQ ID NO: 426673 - DNA, 310 bp, Homo Sapiens
  misc_feature (283)..(283): n is a, c, g, or t
gagttaagaggcatcatggagatggaggaggcaggattgatgcaggactggggagcgtgtggtttctgcctggagcagatataggtggtgatgccctttacaaggcaagatgagcgggggtgagtggggatagccttcttgggcaggtgagggagaacagtaccatggtccaatcaacccttgcccttttgaacacatgaagctggaaatgtttgtcagatgtcacaggggcagttagaacctcgagttggaacacatgggacatgtctgggctcaaaaaaanttgtgagtcaccaacacatggatgcat

SEQ ID NO: 426674 - DNA, 219 bp, Homo Sapiens
ggctcaacagctggaggtttagtccacttaattatagcactggaaggactcatcgtcgcattgattgagaagacacgtgcggaggagggcttctgtcaccgagcagatatctgagttggcacgaggacgcgacgatcttcaaagtaacccttcttctgatggccaacagtccgtggaatgcgtatgctggcgctgcgatatggtacaccagcagaaagt

SEQ ID NO: 426675 - DNA, 159 bp, Homo Sapiens
agaataagtggttcctacatatttcaatgaacggatgaatttaggcagtttaccgaagtgcctgtgacagcaccagtcacaggcacttttgtgtgcgcgatgaaatgagacgagaacgagtagtgatacattgtggtgtctaaaacagcatgaatcaga

SEQ ID NO: 426676 - DNA, 358 bp, Homo Sapiens
ccagagccaccaaggaggcatgagaatgtaacatagagccgtggatcactaaagtctaacaactactgatatactcaaaaggcagacaaatctattgtcatatcagacagacaaaggttatggtggaagaggctgttacaacaataatgagatggtgaccatccggcatggagcaacaggtgccaaccaggatacccagtattccaactcctagtccaataaactttccaccctgcgtgaagatgcattcatcccgtgcacacttagaacacgttacagcatttactagcttatatccagaaggaaggtaaacttttcaaggcaaagctaaaatacaatagtcttgagtccctccttg

SEQ ID NO: 426677 - DNA, 397 bp, Homo Sapiens
caccaaggagggaagagtagtagggctgtgggtgaaaggctcgtgaacaaccccctgatgagcattttctttcctccttgaaaccctgtggcatgagattaggactgcaaagtaacccaaccctttccatgcaaagtaacccaactctgataatttgccaggctggtaactggtgaatgtagggcttggatcttctgcttctcactcaggtctttctgtctcattacaccctgtgggagagtcaggtcccccagttcagggcccagggccatagcaagatgcctctgggggccagggtccggagctaggcaggcccctggtttcctggaaattaggaccctgagcctcccttttcatggcaacttggtcttagccttcaagagccatatctgagctg

SEQ ID NO: 426678 - DNA, 369 bp, Homo Sapiens
  misc_feature (295)..(295): n is a, c, g, or t
tcacaggcccatcatatccctgcacatgatgtgggaagcgaagtgcccatctgttgacaaaaatcacaaatcagggcacaatcaagatactacaagcttttcaggtgctcaatgggtataaatgataccaagttataaattcttctttgcaatgaaaatatcaaccacaagaataaattaagataaaaatgtgccctgttactcctgctcccacttcccctcccaaaaaaatgcacacagcacacatctcaatgtttagaggcattttggcatatccagttgcctttcttgtggnggctggccaaagactgactcagctggtatgaaacaaatcagcaagtgacctcagtagtgacccctattttccaa

SEQ ID NO: 426679 - DNA, 351 bp, Homo Sapiens
ggacatcaacagcgtcttcccaactcaggcaccagagacagacagtcccaggtttgagtccagctctactcttttccagctgagtgaccctgggcagccttactcatccgttcagtttccttttctgttaaattgtgggaacagcaagggctgcatggtgacccacgtagagcagtggacaacctcctgaacgcagcacagcagaggcagcaggaccacaaaacaggggcctcagaggggcaggccctggcctcggtctccatgggaagtgagcaagttcacaggagttggcccagggagcagcaccctgtggtacaagcaggaggatggtggtgcctccttggtgcctct

SEQ ID NO: 426680 - DNA, 280 bp, Homo Sapiens
ggaccacggtgagggctttcacttttactctaagtgaaatgggagccactggaaggttgtaagccacagaggaacagctaatttacattttatttatttattagaaacagagtctctgtggcccgggatggagtgcagtgccacaatcagagctcactgagccttgaattcctgagctcaagcaatcttcctagctcagtctcccaaatagctgtgaccacagatgcataccattgtgcccgactaattttttttgtgagacggattcgctcttgttgat

SEQ ID NO: 426681 - DNA, 237 bp, Homo Sapiens
acgagggacaggaggagccgccgctgaatcaccagggggctgctcgcacagaggtcaatctacggaagggcacatgggacaagtgcaacttcctggccagacagatccgggagcaccgcgagccggccacactgtgatgaggaagaggatgaggagcagttgaggtcaaccatgacatgcaaccagcacaggagatgcccatgtacatgcgtattcggaggttagagagacgtccac

SEQ ID NO: 426682 - DNA, 137 bp, Homo Sapiens
aaggagggaattttagggacggactggacagcacgtgttcttgctagctctgccttacaaggaatctggcgctcaatctcccagatgtctcagtgtgaagcatctgcgggataggtaaatatatatcagctctatgt

SEQ ID NO: 426683 - DNA, 182 bp, Homo Sapiens
aacatagagacctggctaggaagggaatattcatggtaacgagcaacaggggcgcgactgaagcatccttaggtgttcagctcttgggagctaggctatatgctcaacaaacgacagagctgaggctgatagagagtcaatgagcatcccaagagtacttattgcgtgaggtgagtcctgcg

SEQ ID NO: 426684 - DNA, 287 bp, Homo Sapiens
ccagaggcaccaagaagcaggagcttactatcatccccatttttcagacaaggtaatactgtcaaggacattaacgaactcgactaaggggactgacctcgacaagaccaatgcgtaatgctgggacatgtattgccatatctgatggcagacagatttgcgggatatgtaacatatgcacaatgccatatcagcgacattgtgtgaggctgactaagagtgttgcccttggagcccggctccaggttgactctcggaggtcatgcaatccatagctagtcacatac

SEQ ID NO: 426685 - DNA, 373 bp, Homo Sapiens
ggactttaacagtgattatcaagtgccttccaagagacagcagcacttccgtgcatcacggaacattgactgttcctctccatccttttcccaggtcattccagagtagcgcagtttttgactgaaccatgtagaaatttgcttcagttctacacaaagatctggaacagtactttatttttgagcagatggagcctttttggtacctcctggcaagttggtgttggtgtctaccagaaaaataaggtcactcctaacctggatgactgggttgaagtagctgtttggactgagtaaagggagacttcaactgaattaaacttaactttcatatgatgtttttctgaggctgtgtgaaaatagaaaccaggaa

SEQ ID NO: 426686 - DNA, 165 bp, Homo Sapiens
gtacattacccattgataatgtctcagtggcctctcaatgaaatggagtgtgacagagtgccacactctgaaacggctcatccccggtgatggtgctgggactagaacccgggcaacctcgcagtgccatgccctactgcatcactacgtccacctcgagggccc

SEQ ID NO: 426687 - DNA, 246 bp, Homo Sapiens
  misc_feature (97)..(160): n is a, c, g, or t
gctgcttgctgtgtattgaataaaggaggcttcttggggtcggggcagggtctctgtaagcacagggagaattgatttcgctggggcttggatcacnnnnnnnnnnnnnnnnnnnnnnnnnnnnnnnnnnnnnnnnnnnnnnnnnnnnnnnnnnnnnnnncagaggtggacactcttgttcttggagatcctgtatagaaggtgccagtgttggagtcttggcgcggcgctgtctagaggatacct

SEQ ID NO: 426688 - DNA, 116 bp, Homo Sapiens
ggatctccttggagatttggtgaaatcagctcaattgtgtcacccagcctgcagtcccaagtcctcgtgactgcggatggaccaggaatgcggcttcacatacagacatctagtta

SEQ ID NO: 426689 - DNA, 158 bp, Homo Sapiens
ccagaggcaccaaggaggccagaggcaccaaggaggcaacccaggctgtgtgcagcatcgccccttccctccaaggcaggctgggggccagatctttccctggctttggaggagcggagtgcctaaatcatatactaaatcagagattccaaagaggg

SEQ ID NO: 426690 - DNA, 272 bp, Homo Sapiens
atttctaattttgagtaggtctttgccgaatacaagcattttgaattagccagaaaaaaatattcagaatatgacgtaaaattgagctctgatatttcattcttccaaaagttcttttactgtttgatagttttctggacttaactgaaagtgtagtttgtgtcagagtctttagtgattgatgacaggtaaaagttggcagcatgacctggaattttaatggatcatggaggattgactccttgagagaaaaattgtcagatgatgctcag

SEQ ID NO: 426691 - DNA, 230 bp, Homo Sapiens
agatcctttgagggcaccatgtgcccaaattgaaaaaactccaggcatgtggcatctgtattatattttttactatgccctgttatcttgctagacttatgtgactgtcacttatctggcaaaagccattacatctcagctacttggtaggtacccacattgcatcattcacctatttcgtattctagaagtatattttggttgtctcccattcacgagagatttttttt

SEQ ID NO: 426692 - DNA, 237 bp, Homo Sapiens
ccagaggcatcaaggaggaccacagcacgaggaagaagcctaacgcaacaaggtccacgtgatgcgaaaagggatcgtctctcttccatgataaacgaagattgacacacatcacagcagaggtgctgcaaactcagacagaaagctcagctcccccgcaggaggtagcacgcatcggcgaagcccatctggtggctctaagccagtcagactcgccacacctgagctttctcatct

SEQ ID NO: 426693 - DNA, 277 bp, Homo Sapiens
  misc_feature (245)..(245): n is a, c, g, or t
tgaggaagaaggggacggctggccacaggaggtctggactgagatgtcgtaggaggggacagaagaaaattgtaggtggaagaagagttcaagggatcagagggcagaatgaggatacttgatggagaaagtaaagggatctgggtgtgagacagaaaggaaaagaggaagcaacatcatagtaaagggaggttgagcagagaagacagaggagatggaaaagagaggaaatggaaagtagtggngcgcaagacttgctatagtaactgattaccat

SEQ ID NO: 426694 - DNA, 321 bp, Homo Sapiens
ggacgactgggttacttaactgttggggagcaatctgaggagttggttaccagagaaactggcgatggcgatcccgtgagcaacatctctcagacccattttaaatgccgggggatacttaatcatgctgaaaaacagcagagccctgaggttttggactacatgttgcagaaagaagagaaatatatacgtcaacaaaaagcacatacgatatcgcaacagtgcatatcatctagtctgttgttagatgatgcacaaaatcagaaccaaccgaaggctgacaaagatgagtccaccatgatcaatggaatcaccctagca

SEQ ID NO: 426695 - DNA, 327 bp, Homo Sapiens
  misc_feature (305)..(305): n is a, c, g, or t
ccaggatcctccgttgccagacttcccgggaacacttggaatgcctcctccacctcggactagcagtggcctttggcctcagtctccccagttgacaaaggggggtaatctgcacctccaggatcactttgtgaattacttaaggagcgggcttgaggccagcactcccctgcactgctacatctccatccccatagcaaaggctacattttatttactagcatttatatttgccttgtgtttttcccagatctaggtgcaaacagcacctgaaaagcgtttgtttatttcatgagagaaaaggngtccttactctctcctcctctc

SEQ ID NO: 426696 - DNA, 171 bp, Homo Sapiens
ccgtgatctacaacactctatacgccggcttctattgacttggattaatcgtgtgaccgcgccgcctggcacaaaattgaccaaccctgtgcctagtatagcttacataaactttcaatcattgctcaaggttaatcactgctgcttaccgctacacagtgactacactaa

SEQ ID NO: 426697 - DNA, 142 bp, Homo Sapiens
  misc_feature (114)..(114): n is a, c, g, or t
ataaataaataatttccccttattaaattatcatagacacaggacatttcctccgaaactctctttctttccattcctggctgttttttcctcttatttttctttgcactttanaagtaaatttttattcagaaataatttt

SEQ ID NO: 426698 - DNA, 164 bp, Homo Sapiens
ccagaggcaccaacaaggggcagaggaagacctgctgcacttgcaccgtgccctgcgctgctatggggactgaacaatgctccagagccatcgtctgcatgagaccgcccagatgatgctgtacggtgcctccttcaccctgtatgatttctgacagcatgagg

SEQ ID NO: 426699 - DNA, 163 bp, Homo Sapiens
atcccgggattctattttgctgaatcaggattcaggatcccatgattctgttttgctgaatcaggattcaggaccttttttcaaaacaagtaaaacagaaaaataaagtgcaagtaccaacagaagcagcctccagaacttttaattgttatactcttacctc

SEQ ID NO: 426700 - DNA, 391 bp, Homo Sapiens
  misc_feature (318)..(318): n is a, c, g, or t
ccagggcaccaaggaggcacaataagtattctcttgtatagaactttgtgtagcccccagttattttcttataagtaatttattccaagaagtggtcatgttgggttaagaagtgtgtacattctaacggagtttaatatgtactgtcaagttaaagattgtatcacttatcctctcatgccaagcccagtgatttcattttatggtgaggcaattacagtccagagaaaagagtggttttgtcgataattacaggactgtcaaggctggactccacagacaggcttcctgagttcaacactgtctcattatcctctntgcactcccttccaggcagagccacatttccctttcagtttctctgttctagatgccaatcttccatatacct

SEQ ID NO: 426701 - DNA, 222 bp, Homo Sapiens
ccagacgcaccaaggagggactgaatgattcactttggcattcgactttcatttatgctttcatttcatgtaacatgtagctattccaggctccaggctgaagcaaccatgagcctctgcctacgagtagctcacagtggtctgggcggacacagacatagagatgcatcgagagcaagcccagaaggactggctgacaaggcttcctgtaggaggagactg

SEQ ID NO: 426702 - DNA, 152 bp, Homo Sapiens
gcttgtcgatggcacagcacctacagcggctggcatgagtgctgcccagcttaaccttcgacaggactcagcaggtctcatcacacacctaggtcccaactccagaatcggttttgactgactgggtaagggagccctgcagtgttttgtat

SEQ ID NO: 426703 - DNA, 225 bp, Homo Sapiens
taccacaaagggttacgacagctcatgaggtagacacagaccaccacttggaagctttctcactgctacgaatcagtaccattcgcaatgcttcagcagttcagagaggtctaaggcaaattcccatactaaatggaaagtggcccaatgacagaatttcttcttcacatggtagctccaagaaggtgacaggacactgcagtatcatttatatgaaagagactg

SEQ ID NO: 426704 - DNA, 172 bp, Homo Sapiens
tgcatgtgtgtgtgaataaatacatcacttgttttcaaataaagagaaacatacattatgtctccatgtcaatgccactcaactgagggcttgcatttcaatattggtagcaatgccttagatttaaaaagatcatgaaataccttattagaacacaccacgggggtaccga

SEQ ID NO: 426705 - DNA, 260 bp, Homo Sapiens
tctcgctgagatggatgacccaggctgagtgatggaactaaaagactaaaatagtacccagttaacccagaaatgcatagtttgcacgacagtattgaggacatgaaagacttggagcagagagtggggtggtggaagggaaggtacagttgatagtattagcacagaattttcaacactaataaacaaatagctcacaataagaagtgatcaagttaggacagaagttcttagggggaaacacagaattcatagaagga

SEQ ID NO: 426706 - DNA, 423 bp, Homo Sapiens
  misc_feature (179)..(250): n is a, c, g, or t
  misc_feature (403)..(403): n is a, c, g, or t
aaagagaagcccttaaatgatatgaaaaaagagagaaaggcctagtgtcctagtggcccagcggagcccagttccccaaccaattctctagcagaatgaagccttatgagtaaccactgaccagatgagcagaacaaccacccagccaggcctagcccaaaccccagaatcatggacannnnnnnnnnnnnnnnnnnnnnnnnnnnnnnnnnnnnnnnnnnnnnnnnnnnnnnnnnnnnnnnnnnnnnnncttccacgaggccatgggttgtgctggagtgccctggtgatccatgccaacaatgggatcatgcaaagctttgtgcacaggcaaatatatgtctatccttggtgatgggtagtgtgaacataaagagaagcatacagagccactgcatctgcngtgctccctcagctactgtg

SEQ ID NO: 426707 - DNA, 153 bp, Homo Sapiens
ccgggtgtgttcatgcagagaaagaccatcaatcctgggttttaggttcagggtcagttaccagcctcaggatcccggtcagttccgtgctctgtaaaaccgatacctgctttacctaccttccaaggttattttgaaaaggaagtaagatta

SEQ ID NO: 426708 - DNA, 435 bp, Homo Sapiens
  misc_feature (137)..(234): n is a, c, g, or t
tttatagacacctttatgatcgattcctgtcccacctttttctaggggttcgtaattacactccttcttgaaagactattttggtactggctgttagtaattcctggatttcctttaaagatataagaaatactggnnnnnnnnnnnnnnnnnnnnnnnnnnnnnnnnnnnnnnnnnnnnnnnnnnnnnnnnnnnnnnnnnnnnnnnnnnnnnnnnnnnnnnnnnnnnnnnnnnttcaccttccctcaatgggactgattaggtggttggcatgacccatggagagtgaggaaaagcagggtggagcgacagcccacctgggagctgcaaagggcaaggtgagctcccaccccaagccaagggaggtggtgagtgattgttctaccctgccaggaaatcatgctttttccaaggatctgtgcaacctgtgattag

SEQ ID NO: 426709 - DNA, 551 bp, Homo Sapiens
actttaaaagatccccgacccaggctgagcaagtcggaggaggtggggatctgtgcggatctgtgccaggggctagcagggagggcagggccttcccagatcctctggaattctaagccaaccggacaatcgagttagcgtaagggatggttttggaagaggccggtgatgggagccgatgatgggagcctgccggaggttccacaagagcctagaggaagcctagagacgctggcacaattcagtcctcaccgaaatcatttcctctttctacagttcttgtacccccatattgacagatcagttcgcacaagaatgcgaccctttcgctgcccttttttaggaaatggttttcatgagaccagctttgccaatgacacgggggggtacaccagatgctaatggctgctgaaaacgcccttagaaccggctcttcttttagaagaaggaattctggaacgcggagtggggcccccgaaaggaagcgaccctacgtttatctgaattcccaggggcggttcgccagcggctccctgcgtcctcagccgggt

SEQ ID NO: 426710 - DNA, 276 bp, Homo Sapiens
catatacttgcatttgttcaagaagttgatgaggaacatgaggagagtgttacaacttagcccaagctctatgactacgggtggctctggactgatgagaccacttcctctcatctatccatagcccctacagacgccactccagctgccctccctactctacctcagccacagaacaagcccagcccacccacgtagctacccttggtcaccacattactgccaccttgtctaaataatccgcggcgcgggtggggcaggctccggtctcctttc

SEQ ID NO: 426711 - DNA, 174 bp, Homo Sapiens
agagcagaggcccaggctggagtgcagtgccactataacgtcttacagaaggcttgaactcttgtgctcaagggatgtcccacctcagactaccaggtagccaggacttcaggtacacgccaccatgcctagctaagcttatgacttttgtagacacaaggtctccgctgatgc

SEQ ID NO: 426712 - DNA, 120 bp, Homo Sapiens
gcgtgtagtagtgtaagctagagtaatgtgacgactagtgtagtacgcaggtgtgtgcactgtaggggctgagtaacgtgagatgtgtgtaagcaggtgtgtagcgtgcaagtagtgtgt

SEQ ID NO: 426713 - DNA, 342 bp, Homo Sapiens
aataactggacactctgtgaaccaaatgtttctacataaggggactccctccactcgcatattttacggtgacgtcccacctgaattggacactgcgcttctcttactgtcgaagcagtctttgatctatgataacagatgaagtacacgtggcaacctgtgtttacattgcacttggtatatactgatcctttgtatgcactaatttcgtatcccctaaggttctatcacacggacaaagagaacgagactaacggaaccgggactctatcatcgttatcttcgcgtgtgtctgatgggaacaataaaaaggcaccaaataaaaaggacacgatacgcata

SEQ ID NO: 426714 - DNA, 221 bp, Homo Sapiens
tttgtagtaccatagtcttaaggaaaggagactggacaacaccaattaactttttttgggtgctctcctggaccagatgccaacagagcttttgcacatatgatcagctcatcaggcactgttggcttccttttctctttcccgcagaggctgggatggttctgagcactgagttaattacatgatgctgcagtacggtgggctccatcctctctgccctg

SEQ ID NO: 426715 - DNA, 321 bp, Homo Sapiens
gtaacgctgtggagggacagaacagaggaacagcacagacaagtggggcggaggtgcagatcctatcccaagagctgttgtcttggcagtgggatgctgtgggtgacccacaacgggagactaacttcagaaccaggagcagcctcccaaaacccaccatttgcctagcttctgaagtcacatgtgcgaggaaggctttggtggaaaggcccaggagagttacgtttggcatcacctgatagggcaagaggagacctcattagcctgtgggcatacaacctgctcacagaacagataacccaaagaagaggctacctgctc

SEQ ID NO: 426716 - DNA, 418 bp, Homo Sapiens
cgatccctcggtgtgtcatgcagatgggactcaggaattacaatgagactgggaagagggattgtccttgctagcctggacatccagtgatgatgataagctggccaggcctgagcacggaggtttgtgctgtaacggtggctgcaccttttaaaatagaatctctacttttggcagcacctcactgtggtttccaggactcactcgtgttttttggcaaaatgcacaacacggtttaaattgccagtgcttcttatttatagatttctgcaacatcacgtttatttacatctaaatcgccttgcagtcgtttcaacagtcccacacagtgcattataaaattattcgaagatcatcattcttccatgtttattagcctcgaggcaaagtcagcctagaggccagaactcacaccacg

SEQ ID NO: 426717 - DNA, 170 bp, Homo Sapiens
ctggacagtatctacactgctaacaggagcataagtaagcgcgaccagtttagaaaacaacttgtcattacctagcagaggtgatgatgtacatagtaagtacttctgcttctagatggaaaccccagaggagtagcaaacatgactataaaatatgtataagaatgttt

SEQ ID NO: 426718 - DNA, 213 bp, Homo Sapiens
ttcagctgggaaacttgtgatgacaatcacatctgcagggagaggactgctcagagacccaacaagcagacatgccccctcaccacaacacagtgttccgcaggtgtcagcgtgcacctgactccctgctcttgggtcccaagactcaggttgtgacaagagggacacagacccaaaaggggtgggtttggggccacatacacagatgggcac

SEQ ID NO: 426719 - DNA, 126 bp, Homo Sapiens
gtaaattggtaaaagaaattgttcgcgaaactctagtaaagtcaaaactttgtatatgctgtgtgacccaactgagtataatcctatcagaaatgtgttcatatgttcatcaaaaacattaactgg

SEQ ID NO: 426720 - DNA, 451 bp, Homo Sapiens
  misc_feature (305)..(316): n is a, c, g, or t
aagtagattagcagcctggatcaggtactgctaagtcaacctcgttctgggactctccttgctttgtgaatgcaacatgcaggccttgagatgtcattattccgacgttatgataaggcactcacttatgctgctttacaggagaaagaaccagagtttaaaagccatagccaccgatttatattatgctactgtaacactcttgaacagaatctcattttaaaagacagttcctgcaagagaaaatcttcactggcttaatccatgattatgaatttggtggtcatttgaaaggtgtctcttcnnnnnnnnnnnnctgtaatttggttttaccatcaatagtttaattttcattagaaatcacagtcttggtactaagtcagcaccaatttatttgtagctcaaagcgcaaaggtgatcttctttttttggttggcttgtagttggttgg

SEQ ID NO: 426721 - DNA, 461 bp, Homo Sapiens
ggctgtatagacattaatgaacagcaagctaaaaatttggattctgagatacagcatttggaatactgcaatagcagtttaggttaatgtagcatagaaacaagacaagaggagatggggacaattgtagagtagaacctctagataatgctgtctttgtagttttcaaaggcatagaatgaaagggaggagtataaacaagaggtattggagatagggcagttgtattctctttccctagggctttgccattgcagtttttcatcagactgacaaggttttttgaagtacacccagatgtgaccagccatgccaacaggaggagctagacacaggcactgtgaacctgtgtcctctcctcactgccagtaccagggagcttagcatctactctcccagtaaccttgctatggctttccatggtttttcactgtgcacacattcaaagcactctctctgtc

SEQ ID NO: 426722 - DNA, 360 bp, Homo Sapiens
aggagaggtgtaggaccagctgggacatctgctttcgagactctgctttcgtccccagcggcaatcaaagatgcacccctctgccaaccacagcagtctgtgattagatgtaatggaggcttcaggatcagaatgatccagcaacctggctctgtttctctctgatttccttaatcacatcctcttctggggctgtctttgttgtcaggctgcctccttcctgatagccaaatggttcttgaagtttcagttcccatatctgcttgccactctggaggagaatgagggctcttctggtagttctttccttaaagaacaggagcacgtttcttccccagaagtctccaaacttatcctcat

SEQ ID NO: 426723 - DNA, 487 bp, Homo Sapiens
taaggtttaagcagagatgggtgacgtgatcagatttgtgtttcagcaagattaccctggccacgggatggagaaagcactggactgggaagagactgggcagactctagaaacattcccaaaatagaattcgcaggactgggtgtcccactggagataggaggaaaaggagataatagaaacagccttctcacttgggcttgaggggccctcgtccaatataggagatcagtaagaaagccttgcccaaggtcacctcaagttacttgatggctaactcgaatcaagaagctcaagttccttctggtagaaacctcttagtctgcctcattcacattgatcagcaaataaatttaaccatcatctgccagactttccttgttttccactttatacatgtgcactttttgtcctatggagattattaagatcattagggcaaaattccttttgacctcccataaggcctctcacagtacaagacaat

SEQ ID NO: 426724 - DNA, 228 bp, Homo Sapiens
cttctgagcttcaccatgaaaagaaatacacggagaatccttctcttggattaaaaaaactgtgttggatgaagaataaaggcagacaaaaacagatttgatttctttttttctctgaaggcgtctccaggaatgctctcatggcctggcatttatggaacctaacactctgaactttaaaaacagaaactcacagttttctctccaacaattccatcccctccccgc

SEQ ID NO: 426725 - DNA, 386 bp, Homo Sapiens
atttatccaatccttgacgcagcagtatctgcatgaggagggatcaatttgagcatctaccttagggtttaaattttttcttcgaggacccaaatttgagtcctcctgttcccccttctgtctctaggatcagtgtcctgccttgaccttgcttatcagatcaggtaggaaaccgagggcctccttaccacatgtggtcattacatttcccatggcatttttcacaagaggctcgggctgcttccctggctgttctccaggtaggtaattatcttgcctcctgttctaactcccttgtggtttcagttgtaggagagagccttcttcgttcccacatgattggctgctggtactgaaaggcttcattccggaaatctgttaccttc

SEQ ID NO: 426726 - DNA, 423 bp, Homo Sapiens
ttcaggtgaggcactagaatagtctcttgtacagcaacagagcctcttactacagtgagcttctcctggggctttcagagtacgtccgagctccacaccaagaagagagccaacccacgtggatgcagctcggttcttagggctgacttgaaacttgataagactgcctcacgcatgtgtcacaaacccagatcttgctaacccccacatgagctcttgataaatccctcttgtggtcctattggggtgagatatagaataagtcatgagatcatggctgaattcttgtgcttctacatgctcgcacttcccagcctgcgaggtctggtgattgttgtatgagtataggtcaggaagttcagcactctccatcttaacagaaaagcgttatgtgtccgtacccggacccggcctcacgtttac

SEQ ID NO: 426727 - DNA, 441 bp, Homo Sapiens
tccagtttctcatgacggttactcgagcatttataaggcagttgtgacataaccaagacattctgtgtgttgtgctactgatgctcctcctgtcaccgaactcctctccaaatgaggcctgcctttttgtcctatggtagtaggcagtccacagtgtaaccagctacaggggaagtatttactttgatagccacttgaccttgatccagtcaggtgactcatttctggataacatttttgagagtatactgagccagggaccttgaggatacgaaagtggattatagtttccaatctggagaaactcacagtccagtaagttaaacaatcacaagaacaagtatccagcaatgagagtgattacagccactgagtggtgaaatctgaaaaatgcaaagcctgccgcctataaatacctacatatatacgcctggggatata

SEQ ID NO: 426728 - DNA, 250 bp, Homo Sapiens
tccctaataggcagtcgggtaggggtgtctgggggtctgaagaaggcagcacagagacaggcgtagggccagggtcggggccacggcctggatgagggccacatggcaggctggctgatgagatggtgctgccccccctgctgacacgaggtgcaccaacatatccttatgcagccggggcctggggcttgcccccaacaaggcaaagccttggcgcaaccctttgggcaaaccaggtacaaaggtcagg

SEQ ID NO: 426729 - DNA, 370 bp, Homo Sapiens
ttatagaagcagatctgcactagtcttattagtctcatccatttggaagctggtagcacactcaatcccatgtgcctgctgttaatggtgcctgtgagtcctagagatgcagtggctgctcccagctcccttgggtgacctattgagaggacactaggcctgctacactgaccatcaggcagcctagccccttctcactgcttgggggtagggggtggttagcctgggtgtagtgtggcagccaagaaagaacacaaggctttgttcactagacttagtaacctctcctaagggagtggacgtggtgttgacttacagtatatccctccccttaaaatcagaaaataagacctccctctgaagctcgtgc

SEQ ID NO: 426730 - DNA, 285 bp, Homo Sapiens
tttatcgagtccgggtaggaaagacggaagggtctttgctgccccaaggagtccagtcctgaggcatcagtgttcagtgggacggaggaggagctgaccctcccaagggcaggggccacgcgctggctgggaagcaaggacaaaggaagcccttggtacctgcctctcggggagtcacagctgagggcccaggaccctcctggctgtcttctcatcttgcccttcatcctgtgatgagacaagagggaggttgccaggttggggggccaaccttgcattcgggtc

SEQ ID NO: 426731 - DNA, 363 bp, Homo Sapiens
gcaggacttggacggtaactttaccctcctagaacgactgacactctgacccaggtgaccaatgaagaaggacatgtgaacttccacgtagagacttcataggagcaatttcatgagagaaggataaagggtacttggcttgacaattggtttgaaagagatctgggctcttatactttcctagggtgcctacctttgggacaagacatccattacctcctgaaggtggctgctcaccttctctatgaccctacaatttcttccttaggtacacacccaaaacgcaacactggttgcacacaggacagcatgcataacggtgtacccccgcacgtgtcgctcgccaaaacgcaccccttgaca

SEQ ID NO: 426732 - DNA, 488 bp, Homo Sapiens
  misc_feature (136)..(181): n is a, c, g, or t
aggtactttagcgatcccagtttagagagaaagaggaaataaaagagcattctatcctgcaagacctagaacatgagtgcctcttctgatgaggctcagtggtcctggaaagctcctattggacaaatcttggagnnnnnnnnnnnnnnnnnnnnnnnnnnnnnnnnnnnnnnnnnnnnnntcttcattgacagctgactttatttttcgatttgtcagagcacgccaaagcccagtgccctgtgaccaggacaaaaggggaagtggctgcatttcgacatgtcccagcttcactagagaaagcccactggtttctgactttccagtgcgggcaaaagctggcagatccaacacctgtgctcttgatgaccagcatctagggagctttgctattctgagtgtatctgaggaagccatatggatggtgctcaactggattcaactacttagagggctttatgacattcaatggtagaggtcgtgccttc

SEQ ID NO: 426733 - DNA, 462 bp, Homo Sapiens
gggtaggacggagcagtcacatatgagacagtcacagggcaggcgcagagtcagtcacaggcgaggacagagtcacaggcgggatggactcagttgcaggaagggacagactcagtcgcaggcaggggcagagtctgtcacaggcaggaagaagtcagttgcaggtgggacagagtcagtcacaggaaggaatcagtcacaaacgggacagactcagtcacaggcagggccacagtgagtcgcaggcagggaccaagtccgttgcaggcgggagcccgagtgagtcacaggcaggaactcagtgagtcgcaggtgggacagagctccaggaagtgctgcactcgacagctaaacagccccactgaggcctcggtggagacaagatgccttgcgccttttcaccccggcctccagtatcccggaccacagggccagagttggctccgtcgccccgcgcccctc

SEQ ID NO: 426734 - DNA, 167 bp, Homo Sapiens
aactccgattacgagtcgggtaggagggccgcatcatatggctgacccatcactcagatcccaggcccagcatctccctagcatggatttaggaataaaattgactgagatcactggggccacttcaccttcccccaaatggagccacattccctaggatttctccc

SEQ ID NO: 426735 - DNA, 133 bp, Homo Sapiens
ggtaacgagccgggtacagcaagcatgctccagttataaatcttctcttgccttgtgtttatttattcttctctgtatctccctgatctggccttttcagattcagaatcacgtgggttgttgagcagtttcc

SEQ ID NO: 426736 - DNA, 162 bp, Homo Sapiens
gtatctagaggatccctattggcgagtcgggtagcaacaacaggccctcttgggaagttctcaacccaaactcagcccctcatccttccccgctcctgcctctaggaggctgccatgttagtatgacagaccctagggaacattctagctgtgaaatttgct

SEQ ID NO: 426737 - DNA, 254 bp, Homo Sapiens
ccaaccacgtgtggtctggaggcggtgttgtacctctgccaggtctgaggtcttggagcttagtgactcagtaatagcagctctcttcccttgcatatttgaagtgaccagcagaaatgttacaatgataggagtccagttgcttctggcctaggggcaacctttgtgcacgtatcctggccccatcccctgcaagcaggggccacgctcagaatcacgccggtttatcccgagtcccttcaatacttcccaca

SEQ ID NO: 426738 - DNA, 460 bp, Homo Sapiens
ggagtcgggtacttgtgcgcctctctacttggagactcttccgttccatttttagaaattgcctttaatttgttgcattgatgacaaccttctctctttctaaaacacctgccagttggatgctgggccttgagaattaatcctcgtcttttatctatttcccactttttggtctttttgatctattttctgagagatttcctctactccagcccttcctgttggatttttaatgttatattttcttaccatagttgtgtccctggccttctttcatagcatgctgcatcccagtcttcccgtacgttcatttttctgctatttctggtctccctcatgctggaggctgctcatctgtactgaagtgtgaggcaccaggaagctaacaggcagctctgtgtgcatggaaagggcttatccacccaggtgcggggagagcaggcagccaactgacttttct

SEQ ID NO: 426739 - DNA, 171 bp, Homo Sapiens
  misc_feature (95)..(95): n is a, c, g, or t
  misc_feature (115)..(115): n is a, c, g, or t
ggtgaagcgaacgtgtgcttattttgcctgaaggttgctagaggcttctgtgccttggaagctggaaggacacacactaggctgcaaggccaggntgggagcagctacccaagtngaggcttccagtatggtccatcgcttccatggggagactacacgtgtcatggccac

SEQ ID NO: 426740 - DNA, 250 bp, Homo Sapiens
ccgcactctctgatgggagggtgtgtcgctcacagaatgcaaataccctttgaccccctaatctttcttctaggagttctcctacagataaacttagaagggtgctcaaataagtaagttcaaggatatcctctgaagcattgccgtagtataaaaaaagcacagataccctcaaaggacatcattaggggcctggtaaaataaattccacacagtgaaaaaacgtgtagctcttctagaacgaataaac

SEQ ID NO: 426741 - DNA, 349 bp, Homo Sapiens
cacagcaggtacctaatatgtgcgtgtgtcacggcactgttttaaccagccagggtgcattgattgaatagtgcaggagcagctcacaaagtcagaatccctgggtacaaatttgggttctgggaccccagcagagcacttcccctcgctcctccctcctgtggagctcagtgtcaccgtctgtagaatgtgcctaacagtccctgattccattctacctggtccttgtggcactcctcgagaagccatcaggacagctgtgaccttctgtgacatgaggataaggaccctgtgttgcctcccaccactccagacacccacaagcaggaaggtttagcaaaataggtaa

SEQ ID NO: 426742 - DNA, 482 bp, Homo Sapiens
gaggatgacagcgtaaacaattgggactgacagtaaacggtgagtgtaagtgatagcaacgatgttaccctaaatctagaggcgggcaggtccttggcaatcactattgccaaagaaggtgaaggctatcctccaattaggccccgtacaccaccaccctggcacaaggattgagagtgactcaggaccttagtactcaaggtcctgtgtcccaaccctcaccttgagaagcaggcagggcagcacaaaaggaaggtacacgccaggattgtcatgggagtgggggctgggggagggcataggttccctcaaggatagagctccccatctggcacaagagggttctgccagatggcagaacctcttccttggcaggatgaaggccatcgttaagtggtctggtgtgtgtgtctggggtagcgatggggtcttatggagagatttgggggggacatgggaggcgttgacacggatggtggcaa

SEQ ID NO: 426743 - DNA, 170 bp, Homo Sapiens
gcttataaacaacagacacttatttctctcagttctagagactggaagtccatgatcaaggcgccagcaagattcggcgtctggtgaggcatctctggttcacagatgacaccttctgagtcctcacacgatggaaagggcgatggatccttcttttcctcaacttccca

SEQ ID NO: 426744 - DNA, 260 bp, Homo Sapiens
ccaatggtgataagagcttcaaaagtgttatgtgccaattgctacagaggattctgttcttagatgcatcagcttgtaactcagttacttaaggatatgttagctgtatctcagtttgcatgtggtcagtaaatttagagatgctccttggtcacaatcatgttactttgtatcatggcagtagggtaacattattatttgtttttgtaaatgtttttcttagacagagtcctccctcttttacccgggactcgccttta

SEQ ID NO: 426745 - DNA, 112 bp, Homo Sapiens
atactttggtataatccagtctcttagctaacacccactacttgagagctgaaacctcaaaattcattatgggtgaattcaacagctactatggaacctaatggacccccag

SEQ ID NO: 426746 - DNA, 238 bp, Homo Sapiens
ctcaaaaggcgagtcgggtatcttcataatttcatgaagacatggcacagagggtccggctaccttctactttccgtgtttataaaagactgtggattcccttgcagttcttcctgtaagaggtgtatgacgctgacatcatcactctcctccacccgcctcctgcccttttctgaatcagtgaattataggaatctgagaatgagctcctgtttcctgcacatggttggggaacatt

SEQ ID NO: 426747 - DNA, 223 bp, Homo Sapiens
tataaaaatttttatatgtggctgcatctggtgaggaggctgggcaggaggacggcagagagatgacacctttccttatacctctcctccatagctcccaaggccctggtcagactgaagcctgaaacaccagcctgcttcccacagccctactactttccacacccatcaacacattaatggacccttggtgcctggccttgatccccaaagactatctgag

SEQ ID NO: 426748 - DNA, 480 bp, Homo Sapiens
tggcatctagttcaggatacagtagacataacttgctgacggcctgcatatgggaggggcactggtaagggagaggtaatcaagactggtccttggtttctgcttgaatgaatgatgagtggtagaaccatttactgacctgggaggaaggattcttggggtggggcaggaggacagtcacgagttacgtttttgtctgtggacactggtgagtctggggcctcagaaggagatataaacgtggtcaccctcagcatatagccctcttattcttcccctagtagctttcaatcctagagcagcaagtccctaaccttctgggtaccggggaccagttttgtggaagacaatttttccatgggccagtggggagggggtatggtttcgggatgaaactgttccacctcagaccatcagacactagttagatggttctcataaggagcgtgcaacgtagatcctcgcatgcgcagttcacaa

SEQ ID NO: 426749 - DNA, 104 bp, Homo Sapiens
aaaagtcctttttctcagatattgctgaagtattcaggggcgacgtgacgtgtgtagatatataacatataaacaaatgtgacaaactattaattgctttgaaa

SEQ ID NO: 426750 - DNA, 127 bp, Homo Sapiens
cgaaattctactgtgtttgaacagatggttaaatgataccttgaagaagacactatgcaaaacaaaaagttatgtagaaataacattctcagcaaagtgtgaaacagacagtgaatttataacctca

SEQ ID NO: 426751 - DNA, 142 bp, Homo Sapiens
ggccagtgtcatggctgcccagtgcacataggataatagatagatactcccccacaggtacgaacctactagacatgggtaggctatagctactatgccatgactatcactagaggctagtcatatgctagcctatgcgccc

SEQ ID NO: 426752 - DNA, 229 bp, Homo Sapiens
ggcaggaagtgcattcctcagcagagatcatatctaaaggaaggcagcagttccgagggaaatggggaaatggctctgggccccggcggatgtcagcaatgggcattgccatccttcccagccagcccacccttggcaagagcagtgcagaaaaagattctgcaatccaaaacaataaactctgaccatggagaaataaaactggggtcggggggacagtagtgatgct

SEQ ID NO: 426753 - DNA, 351 bp, Homo Sapiens
cattataccatgacagagggatctttctaaaacataagccaatgcaagtcactctccttaaacccttcagtgacttttcactgcccttagagcccgggttcctccaaatctgtacctgtacctctgaactctttcccaccagtgttctcacagctcttgggcagcaatgacacctgctctgtagaagccttccctggctgacccatctaaaattgcctcaacccccaactttctgtctgtcataagagtcaacttcattttactcatatcacttatctccatctgatatttatttatttatgtagtctctctgtcttcccatcccctcagcttatattctgagctcaatgt

SEQ ID NO: 426754 - DNA, 266 bp, Homo Sapiens
ggttgggccaccatgcctggcctgttctatttcattattgctattaatcttttattgtgtctaatttataaattaaaattacaggtaaaatcatagtatatatagggtttggtactattcgtggcttcagggggttttggaatgtatcccccttgtataagagggactactgtactatggatttagaagttggtcatcagtcttctcagagggtctgtaattaggatttcttagtttaagtattgctgtataaaccttttccaaag

SEQ ID NO: 426755 - DNA, 404 bp, Homo Sapiens
ttaattccaagttaacaaaagctgaggagttattttttcccaacttcaggctgcagccctgctaggtttgcaaggaaatgggaaatttaaggataactctgaaggttgtataattcatgccactggttctaaaaagcaaagttgccttccccaccaaaatccttcatctttcagacaaaggcagggttttcttgccgtttccaacacctgacagtgtgaactaccggagtaagagagcaaggaccagggcccgctgctcctcagcctgaaaggcggggcagccaatcagaactaatctctgtgctggaagtaaattcagtgttctcttccctgatctggtgcggcggggggctctgacggcaggggtgggcttgcttcccttggtgcccccattccatatccta

SEQ ID NO: 426756 - DNA, 143 bp, Homo Sapiens
taggctaactgtcgaccaggctggagtacagtaggcgcgatccctgtacactgcaacttccccctccgagttcaggcactctatctcagcctcccgaatagctagtacagcaggtcgcagccaccacacctttttgtatttaa

SEQ ID NO: 426757 - DNA, 299 bp, Homo Sapiens
cgggatcgcgtggctctgccccagtgacgaatttccagcacactccagtatataaaatttcttttcctaaagcatggtagaatgaatgctgtctgggccccaccctatcccctttaccatctgagtgttggctgataacactcacagctgtctgctctctctggagaactggactgtaaccacccagctcctccacagcagacctgggtcaatgactaactggcagaggggtatgaagagctggtgcctttgccttgaggtgggactaatgttggtgcagtttatgctacagagcttct

SEQ ID NO: 426758 - DNA, 163 bp, Homo Sapiens
  misc_feature (57)..(95): n is a, c, g, or t
gacgtggggtgagtggacactctgtggatgcactaaacaccacgggactacacacgnnnnnnnnnnnnnnnnnnnnnnnnnnnnnnnnnnnnnnnaacacccctgacatccaagatctccaacttctccctcagtatgttccattcaaccttctcgacagtct

SEQ ID NO: 426759 - DNA, 313 bp, Homo Sapiens
cactcttctcaaccagcgtgtcgacgtttcacaatcatccttaatgccaaccagcgtgttgatgtttcacaatcatccttaatctcaaccaccgtgtcgaggtttcacaatcatccttaatgtcaaccagcgtgtcgtttcacaatcatccttaatctcaaccagcgtgtcgacgtttcacaatcatccttaatctcaaccagcgtgtcgacgtttcacaatcatccttaatctcaaccaccgtgtcgaggtttcacaatcatcctaaatgtcaaccagcgtgtcgacgtttcacaatcatccttaatctcaa

SEQ ID NO: 426760 - DNA, 300 bp, Homo Sapiens
  misc_feature (16)..(16): n is a, c, g, or t
  misc_feature (108)..(108): n is a, c, g, or t
  misc_feature (138)..(138): n is a, c, g, or t
  misc_feature (172)..(172): n is a, c, g, or t
  misc_feature (208)..(209): n is a, c, g, or t
  misc_feature (228)..(229): n is a, c, g, or t
  misc_feature (280)..(280): n is a, c, g, or t
tgtcattgactcaggnctgtgtgcggcttatagggtcctcgtccctgaagagtgtgaggttgtgcttttggatgtgtcccagcagcaccgtgtcctctgctgctccangggtctggaggacactgcttacagccccantgggctccgccttggcttttcccagtaacactgnggtccatactgcgagcgagcattcagcagctatgtnntctgcagacaccctgtatnngcgagaaccttctactggcagactcaggaaaccgcgatctatgccctcctnagcagccgaaagttcagctt

SEQ ID NO: 426761 - DNA, 338 bp, Homo Sapiens
tgagggtggagtgatggaaagacataggagttgggctgccaggtcagactgatcctgtttcttcttagctgggtaactcttgggagtcacatttgtcttagaacctcttagtaccttcatctgtaaaaagaatagtcgtgtgtatctcagagggtcattgtgaagaccagctgagatagcgtcatggctaaggagagtgctttgtagtcatgacggtatcattagtaatatggtgtcaactattcttcattgctactcattagattctaggcactattctaatatttcacatcaggacttttcaacagcagcactatgacattttttcggggatcctc

SEQ ID NO: 426762 - DNA, 343 bp, Homo Sapiens
gggagtggccttcggtgcacgttcacgcatggtaagtagcggatactagcgagcctggcctctgtcgactctcggtgtggtaacctggggattcaactctgtgagatgtgggcctgttaacaggaacctctcttgctttgctgagtcttttccttttcacccaataaaccctgtcctatcctcacccttcaaattgtctgtgagcctaatttttcgtggttgtgtgtctttagtctgacctaagaaacaagtcctacaataataatattgctcaaatgatgtgttctaggcagattatattagaaggaatactttatgacttgatttgttcttcatgtcaact

SEQ ID NO: 426763 - DNA, 140 bp, Homo Sapiens
ggtggcaccagattgtgacaggttggagtgagcatggctcatggatcagtgcagctctgaactcctgggcataagcgatcctcttgcctcagcctcccaaggtgttgggatcataggcataagccaccatccccagccca

SEQ ID NO: 426764 - DNA, 271 bp, Homo Sapiens
caacgtggatgcctataaaagtcttctgcaacgatggagatttggtgagacctgcgtgttcccggactcagcccattgtgggccagaagaactgttacatcagcgagaaccccctggacaagaggcgtttctggttcggtgagagcatgagcgatggattccagttctgagtatggcggacagtgactcgatccttccgatgtgtgcatccatctgagcttcttgcgctcttgattgtcaccgagggctcccagaagatcacctaacgact

SEQ ID NO: 426765 - DNA, 204 bp, Homo Sapiens
gttgcacagttattgtgtttatagcatatataacagtaaaaacatgacaactatgtcacaaaagacggaagtaaaggaactgtaaactacactgttaagttctgacattatacattaacggaataatattttaacagtggaatgtgattaaataaaggtatatcttgtagaactaggacaacctaatattaaaaattttcggtt

SEQ ID NO: 426766 - DNA, 209 bp, Homo Sapiens
  misc_feature (70)..(136): n is a, c, g, or t
atctagcaggattccccaatctgtgtcgaccaggttgagactgtcgaccatggttgagatcatatctggnnnnnnnnnnnnnnnnnnnnnnnnnnnnnnnnnnnnnnnnnnnnnnnnnnnnnnnnnnnnnnnnnnnagcgataaatgccactgtgacggcatttaccgtggagttgtacgccacatactaagcacagagggtagcacca

SEQ ID NO: 426767 - DNA, 432 bp, Homo Sapiens
acgactgttcgaccagggttgtacgagatatcgccctcagtctgatctagtctaattgctggtatagggacaatgatggaggatgggttcggcgagacaggtaggactggccatctcccatctatccgatctagttgcaggacggaaggatggcttcagccgaaggtggaatggttgtcctcctctggcgcatgctgacctctgggcggcgttccctcgagcagagatccctccttatttattgctagctcattcattcccggatctttgtctttttctttatgatctatcttttcactcgcagttctctttgggtggacagttgtcttgtttgggttgtgtgttcattgtgtgtctgttccgtcggcatgtccgctccaagttactcattttctgctattctgatacctcctttctttgtgcattccagag

SEQ ID NO: 426768 - DNA, 136 bp, Homo Sapiens
agactgtcgaaccagggttgctacaaagcacatctgtcagccaggaggctataggcccatatgggctagacctgctttcttggccaccgctgtcctaacagcagaatgcagaacttcaggaacttggtagaactca

SEQ ID NO: 426769 - DNA, 305 bp, Homo Sapiens
agactgtcgacaggttgagcatgaggagaaaatcagcaatagatcgcttagagaatgccagcagctctgcaagtctggggacgtgatggagacgtggttccggggttttgtggtcgtggctctaagtgtgatcacgatgcacgaagcacttacacgagtggcctggctttctttactcagacccctgggtgtagatttccacgcccctccattgtttcgtcccttgtgctggtccctgcgtagagtggatgctggtctgatgtactctgtaggatggaggccgcgtacgaaggacgcgtcgcccc

SEQ ID NO: 426770 - DNA, 336 bp, Homo Sapiens
agactgtcgacaggttgcggaccagtctgggctgctaagagaaggcatcacaaagaaaatcaacagattagggaaagtagcagtagaaatgacaactaataaactcccttcttatgtaatagaatctctaatatctctgcaattttataaacttggacttttaaaccttatgtatattcaacgaaggacttgcagcaactgagctacttgacttttaaaagctatttgtcaaactagcagatcaagaaaaataataacactgatcctagaagcaagaacaaatgttattctgcttttctaaaggagactacatattgtgtttgagaaatactttct

SEQ ID NO: 426771 - DNA, 433 bp, Homo Sapiens
aaagacccatgacttggtggagcagtaagccagagactatgtgagttcaagctaagacaactcttgagcctagacaagggaggtcactgaaagcccagataggtcttcctggtggatccttccccgataagtgtcctacttgcttctcatccaccaaggaatgagctctcttatacagcagtagaagcttacatgagacactgggaatgctggtgaaccgcacgcggttctaggacaaccgtggagggttttaattgtctagtgttgtcatttttgtttccttgggtctacttttatacattcaggtttgagttttgctttcacattatggtacactcctggtgtaatttttccagtttttgcccaagtctgtgtaagtttccagttctgtctcctggacctgggtgtttctgactctgggacgtcatacgtg

SEQ ID NO: 426772 - DNA, 269 bp, Homo Sapiens
atcgccggtgccaccgcagtccctctcgtccagcttatccctgcttcttgagagcacatggggggcacgtgtccacaccgtcctgaattctccagcatgcccagctcattctggacttttccaagagatcctgagaggtgcccagaaatgtacgcatgagcccctgaactcttggtcacactcaggaatatgacgacaagccgggtccgttcccaggtgtgtctatgtggccgtgaaccggtacgacagcaacgaggtgcagataccca

SEQ ID NO: 426773 - DNA, 297 bp, Homo Sapiens
caatatgggtcgatcggagtagtatggaggcaagaacaacgacaatgtgggtcaccaattcatttaagaaataaaatgtttcctctggctatctccatgcacagctgcccagatactatggccacaatgtacaccacgcaagttagggctatattgtttggacacagatatctattacgaaacatcctacttattttatcattttgaacgcataggcttggcatgagtggctcacacctctgtcatctcagcatcgtttgggatggctgagtgtggagtggatcatccctgagctca

SEQ ID NO: 426774 - DNA, 230 bp, Homo Sapiens
tagacgtatttactcatgcctcagatgctgaagtaccttcctagagatacactcctcatagttgataatccctgttgcagccagccacattattcacatgaggaaccacgcccatggtaatgttcctcaggtatggagagcaggataagaggttaattaccgttagagcccctcaaattttaaacctcgacctgtacctttttaaaatcacacctagtatagagcatctg

SEQ ID NO: 426775 - DNA, 165 bp, Homo Sapiens
gcagtgtaacaattcctcacaggactacagaactaaatagcagagcttaccattatgacccagtcaacctctagttacttgtgttatattaccctatagtaaatatagagttagttcgtcttaaataaggacacacacggtgctacatgcattattatattgcag

SEQ ID NO: 426776 - DNA, 138 bp, Homo Sapiens
tagtgcagtggcgtggtcattgcttattgcagctccgactcctggactcaggagatccttccgcgtttggcctctggagtacctttgtacttgttggcttgttgccaccatgaccttgcttattttctgtagtatttt

SEQ ID NO: 426777 - DNA, 331 bp, Homo Sapiens
acatgtatccctatcagtgacacctattcctctataatcaaactagtgaatagtaggactggatttcaagatgacatcttactgcttgtatgacatgaagaatgctcagggcagctctcacctgcatttactttcagagactatacggcaaaaggaaatcgttgcaaggcaaaacataaagtatattgcttagtggtactttggagtttagttcgctactaaccatcatttgtttaagaactgccgtaatgcttccatgatttctatggggattctaggctcatctcgattcatccccactcccgtcacttacgtgcaacatctcttacct

SEQ ID NO: 426778 - DNA, 189 bp, Homo Sapiens
gaggatccacttttgaaacattcgtcgtggagagtttgccccagtgttgtacatcacgggatagtaggtcattcgtggggtcgcttcccattggttgcagtctttagccaccttttggccggcaaatctttggagaataatactctggggagagcttgaggtccaggggaaggttttggtgttcttcag

SEQ ID NO: 426779 - DNA, 293 bp, Homo Sapiens
ctcccattgaacggagtcatttggtttggcacaagtggatgcgcactgtgacataaaagcagaataggaagcactcccttctgggggctgtcggagaggatgtgtctggaggaggaaaagactgggattatcggctggctgcgtggatgataccttcgctgagcctctctggccactgttattgcttgtttgtatatcacgctgtactttaccattctcaatattgtgtttatgcagcgagtgtggcaccgctaggggcattaactttctcacgctgtgatacatggacgaaa

SEQ ID NO: 426780 - DNA, 129 bp, Homo Sapiens
tttgtttaaaaccttcagctttcgttccattactcttttaggcttaagacactcgtgttaaataccctgctgaaggtatacacaagtagctttccctcttgagacaaaagccagtattccctatagcct

SEQ ID NO: 426781 - DNA, 335 bp, Homo Sapiens
aaagttttcttgtagtaattgcatagattgaggtcttagatttaatacatttaatacatttttgtttgatttttgtatatggcaagagatggaggcctagtttcattcttctgcatatagatttccagttttctaagcactatctatcgaagagacgtgtcttttccccagtgtatgttcttggcaactttgtcgaaaatgggttcactgcaggtgtgtggatagacttatacggtcagttggttttatggggtcgtgtttgttgaatgactgagtgaaagaaatcaaagatctaaattaagtagagacataccatgcccacaggttggaagctt

SEQ ID NO: 426782 - DNA, 195 bp, Homo Sapiens
cactcacatgctcccagagcatttcatccatccatcgaagctctagacaatgtgtcaaactcatgttatctctctaagagtctagactgcctcattgaatgcgagggaatcctgcgagtaaatacgacagcgttttcccgtctagtgtgtcttcgttggatgccgtagacaagcatacactagtagcagatgtag

SEQ ID NO: 426783 - DNA, 360 bp, Homo Sapiens
gcccggtttgagtgtgttggcgcgattctcgtgtcgcactgctagctccgcctcccgggcttcacgccattctcctgtcctcagtccgcccgagttgctggcacttcaggcctccatccagtcatgcccggctaattttttgtatttatcgtagagaccgggtttcaccattttgcctaaacagttcatcaactcctgtcctccaggtacttctcccatctctgcctccgattagtgttgggatcacgggacttgcgccatcgtgcctggcctttagctagaattttgccctcaatttgtttcactactctttggtctttgcttatgttggccattgtcatgcgggaaacatcgcgaaag

SEQ ID NO: 426784 - DNA, 275 bp, Homo Sapiens
aaacagtcagtataatattctactatttgtgttgataaagataactggcagaatggaactctcacatgggatgtacctctgctggcttctttgggagttgctaccatgctgtttgggtagggcctggtgacagcagttgcagggactacagccgtgatactctatactccattctacgtgacgtgatctggcttcccacgttcatctatttatctactcttaacagtctcgttctccattttccgaatggggaaaccgaagtatggggctggaac

SEQ ID NO: 426785 - DNA, 192 bp, Homo Sapiens
  misc_feature (165)..(165): n is a, c, g, or t
atgagccaccgcttcctggccaagatgaacagttttgatgcctcttcaaacaggttttctgtaataggggcctgtagaaatatggtggtcattagtggaagtgcatggacgacgagtaggtgtttctaaatgatgggagacaatgacagctgtgcattgtgtgcncgatggagagtcaccccattagagaag

SEQ ID NO: 426786 - DNA, 172 bp, Homo Sapiens
gtgctgagtgatctagaggatcccgcatgtttcccctcaggctcagcgttccctcaggttcaccccaccaccaccacttcagatcagcttccatcctcccttgtatcagcgatgtgaaaatctttccactctagggtttccctcatggtcaccccacgaatccagtgacacc

SEQ ID NO: 426787 - DNA, 173 bp, Homo Sapiens
  misc_feature (64)..(127): n is a, c, g, or t
tttcgccatgttcccaacacctagaaatggtcaatgagatgacggatgtgccgatcacgagtcnnnnnnnnnnnnnnnnnnnnnnnnnnnnnnnnnnnnnnnnnnnnnnnnnnnnnnnnnnnnnnnnacagtagtgagaggcctggagtgggaggggaaagatggggaaaccg

SEQ ID NO: 426788 - DNA, 332 bp, Homo Sapiens
cgtctctacaggatcccggttgcgccatgtttcccccacagcctgcaatggtcaggcacagtcaggtcccactatggcctgcccaggtccatgtcgtcacagctctgtgctgagtccttcgagccaggctggcctggttgctcgtccagctgtccgtatgctgctgtcaccatcccttctgtctacagcgctcttgccctgatgcctagtgcgctagttgctgcgcctccttgtgttcgcatgttttatttcatcttttgagacctccctgtccattgcacttatatactgggttctgccccgtggtgctatacatggtctacttagtcttc

SEQ ID NO: 426789 - DNA, 208 bp, Homo Sapiens
gtctagaggatcccggttgcgccatgtttccccactcacatgctcccagagcatttcatccatccatcaagctcagcaatgtgtcaagtcatgtaatctctcaaaagtctagctgcctcttgaattggagggaatcctggagtaaatacgacagcttttccctcttagttgtcttcgttgatgccttatgcacgataccttcgtacag

SEQ ID NO: 426790 - DNA, 160 bp, Homo Sapiens
ctgtcttagaggaggagggagatgcacacctcatttctttctgtgcacctttgatcccactcgttcctgcctctttgggggccttccaccatccattgccactccctactttcatctcttcttttccgactagattcttctcttgagtctgtaattaggg

SEQ ID NO: 426791 - DNA, 182 bp, Homo Sapiens
tatgcctctggatatcattgacctgagctcaggcttgaatagggctttatcccctccatcggctataatttgcccgggaagtgtctaggaccagtccacatttggcccatcatgaagttttccaaatatacccaagagtccactatgggatcctagaaattcaacagacatgtgtcttgctt

SEQ ID NO: 426792 - DNA, 297 bp, Homo Sapiens
gatgagcatgaatgtgctgagaccagtgctcgctgtccttccatttggaaacagaaaattggccaacctttgccctagccagcctcagcattttggaggcagtatggttttgagctaagatgggtgcgtctgcagtcccaggccacgttcctgtcagactccgcttctgagtgacagctggcaagccctgacttgggggccacgctgcggagaacaaaacatgtgcagacagtctagggcaccaaggtggcctcattcatgccccctggcattgggagctcttccctcatacacaca

SEQ ID NO: 426793 - DNA, 179 bp, Homo Sapiens
aaagcctctgtgatcgtgtaccacggtcatatatgtctcgtgtagatttttactggatggccagaaaggtgtcccacacaccctcaagaccctaggccctctctgcagagctggggcttcagtacatgtatttttgttttagtgacatgcaactcccttattctcttagacaccctaaa

SEQ ID NO: 426794 - DNA, 257 bp, Homo Sapiens
ctctctggatgtgctgtcttggcttcagcgcatgctcagcttagcagcagctgcctcaggctggtccctgccagctctgagggctccaggtctcagccctgctttgcttccagagactgaggacagatagctgtattatgtctctccatagtcagtggtcaacatcggaactggaggtccagcatccctactgagcatcttcctatcccagctctcctcatccaaatgccattaggcttgcagcatccagtactgaa

SEQ ID NO: 426795 - DNA, 169 bp, Homo Sapiens
gcaggactcattttaagacaaagaaaatcactattaaagggattctctctcttctcacactctcccacatgcccagctaacccagccaccctcattctctaccctacctgtactcccaccctccatgcccactttggctcagggagatggtccagctgaggaacagcct

SEQ ID NO: 426796 - DNA, 278 bp, Homo Sapiens
gcgtgatgagcatgcacacccagcacctggtgacactccaggctcacccactgccacgcctgctcgtgctgcctggcaaccatcctcccgcctagcaggacagccctcccagtataattgtcccctgatgagcaccagagtccccgcacctgcactgtcaacccctggccagcgttactctcccctgcccaaatgtactgtctccatggggatcattatcccccagccagcactactgtcacccccaccagcatcactctcgccctgccatcacgcgg

SEQ ID NO: 426797 - DNA, 270 bp, Homo Sapiens
ttgatgtcacattccgaggcagtgtccattcctttaaatgcacaggggccaggtagacatagagtctgattatttgttctctctctatcaggtagagtacagttcttctctgtggctagccttgaaatcatttcaggctatctgatgtgtgtgagagatagaatgacattaaaatagcaaaacattatcagctcttatagaaagcgttttctttgtcctttagacagattttttaaagcctttcagtaggcaatgaggaaaaaccccaaa

SEQ ID NO: 426798 - DNA, 332 bp, Homo Sapiens
tgatgcattgtgtgtgtgcataacacgatggagctgccttggtattgggccccggatgctccagagttcaagatgtgcttgtgatccctgtggcatatctctggagggggcatctatctgtcacgggaaggacgctgaagcctcccatttccgtgggtgggagctaacagaacacacctcacccgtgccaaggacagttgacgctggctctgcgtagaggaacaggggagtgataatggggagtgcacagctggagtcaggtgggacccaagagaaaagctcagggctacatagtgggaataagttggcttgtgcaggcatttaggagctcc

SEQ ID NO: 426799 - DNA, 121 bp, Homo Sapiens
gttcatctaagtcagtaatgtggtctatgaaacctgtctacttgactgctctctgtctctgtcatgtccatcacccaagctactgatcagagtcatgcgcgtgatcgaagactcgtcataa

SEQ ID NO: 426800 - DNA, 254 bp, Homo Sapiens
ggtgcgggccggcgacgacgggccctggggcgcccttgtaggggctggcggctatgagcgtgtgtctcttccctgcctcagctgttgcaggcgcccctgggggcaggagtgaggttcactggccaggaggcttgtttcctgtgggcctgttccctcctggctgtcttgttggtttgtaggcatctgccgtctgccttccctgaagcctcagtagagaactgacctcccccggtacccccaccaatgcctcgtga

SEQ ID NO: 426801 - DNA, 147 bp, Homo Sapiens
gaacggaatctctgagctgactggttctctgtgtgcgcctatctcctaggacacatcagtcaaacaggcttggagcctgtcagagactagaaggtgccttagggagccactaatccaacctccttacgctatgcaggaggaaggaaa

SEQ ID NO: 426802 - DNA, 133 bp, Homo Sapiens
ctgttgccagcttggggatagtgacacaagccaggaatgggcctggcattgtggaaggggcattgtgagtgagccctgcccagccagaagctggggcagtatcggtggcaggtgctgagtggctggagccact

SEQ ID NO: 426803 - DNA, 146 bp, Homo Sapiens
  misc_feature (39)..(39): n is a, c, g, or t
tccggtttctcctgtgacactctctgtctccaaaccctnctgaggatgtgtctcattagcagtttcttctcccactactattttaactgtctggtttttactgcgtcttctccttcaacctacaaacagacttaagtctcttccat

SEQ ID NO: 426804 - DNA, 149 bp, Homo Sapiens
  misc_feature (38)..(38): n is a, c, g, or t
gccaccgtgcagccctattttcatttggatctataganatccttggagtgaactagcagtagaaattcattaaaatagaaaggggttatttgcttgtcttagagccagtcttttggatggaagtgggggaacctgtcccatgctactga

SEQ ID NO: 426805 - DNA, 246 bp, Homo Sapiens
gcccccaaattctttccctttacccgaagttggtatgcattgacttacctgtggacaacagtgatttttgtctcctgtccttacttctctctgtctccaactctcagggactcattcatcacctctccctgcaccccaccccctgacccgtgctagtttggtatctatgcctgtagctttgctttggggcatcatctgaatctcatactgcacggcctttcagatctggcttcctgcactcaatgt

SEQ ID NO: 426806 - DNA, 310 bp, Homo Sapiens
agagttggaacttctctgcccaagaagagatgcgtgaggttatttagtcagattccccagcagacagcctagtgagagggcccttgtagatggtcacagtgcacaggcttcaggtcccagtcagctcttagtcttccactcttcaaatgggacaaccaaggagtcccagatacctgaggaattcctgccggctgagagcaggtagagaccaaagcagccgaacagccaaagagcaacttggatgagagagagggaggggtccaggaagaagaagggtccaccaccagctgtgaagagactcagccgtctc

SEQ ID NO: 426807 - DNA, 144 bp, Homo Sapiens
tagaaacgtttttttcctctctacatgcacaacccgcttacagcatttttcacccaggactatagttatcttttgatgcattaatttccttacccatgtcaagctcctaaattgcaggaactgtaggaactgtatcttgtactc

SEQ ID NO: 426808 - DNA, 165 bp, Homo Sapiens
tactcgactctaacaagtatactactaagctagttattgaacttaagacagatcaaaactacagactacacaaattcaatgtagaaactgcatttcacaataaagaacagatacaagctactttgagattaggaaaataaacttttccaatcaaaaacaactgtg

SEQ ID NO: 426809 - DNA, 307 bp, Homo Sapiens
  misc_feature (46)..(46): n is a, c, g, or t
  misc_feature (115)..(153): n is a, c, g, or t
tcagacgttatgtcattcctaatacagagctggtgaggtaggtcancactctcgaggagaacaaagtagtagtttcaactggtctgtggtgcgacccagacattagcccacatgnnnnnnnnnnnnnnnnnnnnnnnnnnnnnnnnnnnnnnncactgccctgtctggtaacatccgccacatagataaaaccttgcgtgttctcatttaaaaagctcatcacttcctactcccaagacttgttcaaaatcccattagtcccagcatcctccatgggatgaaggggggcggagaagctgtggcggcc

SEQ ID NO: 426810 - DNA, 152 bp, Homo Sapiens
tatgagatagggttggtgcttgctcaggctggtctcaaacttctgaggcttaagcaatccatttgcattggcctccaaagtgttaggattacaggcatgagccactgctcctggctccttttacatttctcctttccttgtcctactctctg

SEQ ID NO: 426811 - DNA, 318 bp, Homo Sapiens
cagtggtgggggcagcacacccgcagcagctgtcaggcctgagccaatgcaaccctgggcgggaaggccagctcaccgtgagcaggtagaagccagccagccacccaggcagggaccttggttctccccacacactcccaggagcagggaacaggggtggagtggcctttcccagagctggagttggctgcagcagctttcgagatcagacctgccaaggtgatgggcgtctgagtttcacatctgggccccccgtgaccccactgagtcctgacagctaaggatgggccacctccacagctccgtcactcgtacttg

SEQ ID NO: 426812 - DNA, 249 bp, Homo Sapiens
cattaattcaatcaaattcattaagttcaggtatgtcatgcagtatgtcctctgtccctttctcaaaggatttgcacctatgctatgaatctggggaagaatttatttcatcatagaaatctggtggctggaacctcctacaaaagcaagtgactgttccttccaagccagataatgcaataaacctagcacagggaaaataatacctggagatattaggtattaggcttgaacagttaaaggttaatc

SEQ ID NO: 426813 - DNA, 296 bp, Homo Sapiens
atgaggctgggctgcgggccctcgcacctcccacaccggctgcccctccagactccgccttttgaggcccctcaccctgaggccatgtcaggcacagaccctctgggctcaccactacacttgagcctcccatcccctgaactgtgcgcccatcccctggacggcagccatcatctgaactgtgcacccatgccctgaactgtgcacccatacgctgaactgcacccatacgctgagccgcacccatcccttggactgcagccatcatctgaactacacccatcccctgcactgca

SEQ ID NO: 426814 - DNA, 167 bp, Homo Sapiens
gaggcagatagctggttttgtccctcctgacaaaggtttcctcctccttctagacgacctgagtctgttagccagctccaagacgcccttctccttgtgtagaaccccaccgagtctgatttgggtggcaagttagagcttggtctacgcctggggtttctaaagcc

SEQ ID NO: 426815 - DNA, 302 bp, Homo Sapiens
ggtgaagatgagggatatccagggcccttgtcctctgctgcaggatgtgtgacttggggcaaccaaccatttaggacaactgctcagcagtgtctcctaaagctgaacacacgctcatcctgcgagctaaaccctcagctccttggcacgcacctaagaaaaacaagcgcattcgccaatagataggcaaggaggctcctggggcctgacggatcccagccccacactgaaagcagtcccaaagtccacggctgggagaaaggatctgtgagccggcagcaggcacacaccacagtgacaaa

SEQ ID NO: 426816 - DNA, 195 bp, Homo Sapiens
gtccatcatcaatgcttacccttctccctatgtaacaccctagcaaaccttcaagggctagttcaaggtcagttctctgccttccagcaccaacatatgatatctgctctgaaaatcccaaaccataatgatttcttccttccctagactctttcagctaaatcacatggttcatgaaacacaccattctctaaa

SEQ ID NO: 426817 - DNA, 441 bp, Homo Sapiens
gcccgcgtcgtcatgagtcatgacacccaggtcattcacagaacacagcatcccaggagcgctcgtgcctgctccttcctccttgacacccagggtcattcacacaacacagcatcccaggagcgctcgtgcctgctccttcctccatctttcacttggagacggactttctccctgggatttaaccctcctctttgctctgacctaagaccaacggcctattttaccacaataatgtaaatcccagacaagccgcttccaatcccagcaggactttttaatggccctggcatctttttatccacccctcgggttcatgcaaaacttccctaaagaagctgaaagcctcaagttactatcctaaagctgttctattccattcagttctcactgttcctgcgcctcttcaaagaatccttgcaaatgtcacgtttttatccc

SEQ ID NO: 426818 - DNA, 192 bp, Homo Sapiens
gacctccttagtggaaattttccaccaccctgagtggaaatgtttcacaattcacagagcatagagtagagtgcttctcagtaggctgttagtcctaggactaagatgctgctctgctcccatctcagaaaacttaaaaacaagtcctgaaagaactaaatggtttccaagtaacttaaatgtgtcacagag

SEQ ID NO: 426819 - DNA, 211 bp, Homo Sapiens
tgttataaacaagtggttctgcagcgctgacctggaggtcccctaagtggccctacatctccacccagctccaaaggtgacctgcggggtaaaggaaggagagaagactccgggctttgttaggtggaagggctttctgcaggaggccaggccagagaagccagcctgatgaggctttgagaggacctgaaactggagatgggatttagtg

SEQ ID NO: 426820 - DNA, 414 bp, Homo Sapiens
ttctagccctatattcgggcaaagagagatcaggtagaattgtgtaactaactacactgtacggagacagttacttaaggttctgacatctgaggcactaccagatatttgagaattaacgcactgttgcacacttatgagtctagtgaaccatcttagctgatctctttttgcgtgtctctagttttattataggtgctcacttgtgctctgtcctgtttctcccggtgctgcgaccattgtatctgaagtcacatatattcttgtcgtaccaggttctcttccttctatatttgagattttatggacctgcaaagttttacaaacacatgaattatgtcaaattttgtaatgtctttcgaaaaaaagggggaaaagtgtaagaaatttagaccatgtaggtctgaaagtatg

SEQ ID NO: 426821 - DNA, 334 bp, Homo Sapiens
gtttggctgtcgtgcacaccaacagccaggagcaatgcaagtattaataactgttttaattgtatgcgagtctcggtatatttccccgtggtacctcaaaagccatttattttggtacctcatagcagggatggtactatccaccagaggcccagccaggctggtggtgactaatagagacctcttcattcagaggaacactggaaaagcgtttccatttcccttgtgcgcattaggtgggtggcgaaggcagtgagctaagtggagtgctgtcaaggtacgagtgtgcgccccggatgtgtgtgtggtgcaaagactctgcgtacccacgccg

SEQ ID NO: 426822 - DNA, 546 bp, Homo Sapiens
ttggtcgacttgaggatcccgttttgggctgtcgtgccttggaacctggggctatgtctgtggtgagctctgtgttgtgtcatctctgtgtgtttgatgagctctgtgtctgtgcctattgctgtggtgtggagagttctgtgtctgtcgagcgctctgtggtgtgcatagctctgtgtatgtggagtgttctgtggtgtgaagagatctcgtggagtggacacccctgtgtctgtggagagccctatggtgaggagagcgctgtggtgtgaagagctctgtggtgtggagagttctgtggtgtggaaagctctgtgtatttggagaattctgtggtctggagagctctgtattgtagcgagctctgtgtctgtggagagctaagtggtgtacagagcgctgtgatgtggacagctctgggtatgtggggagttccgtgatgtggggagtcctgtggtctggagagctcggtgtatgtcgagaggtctgtgctgtgaagatctctgaggcatgaagaacttcctatgtggagagctctgtggtgtg

SEQ ID NO: 426823 - DNA, 147 bp, Homo Sapiens
gttgggctgtcgtgcgaggcttcgggatctgatgtctgccggcgaccagtgtcaggctgactctgctttctgggtgccgtccccagtgtccctgatcaggcctggctagtcagagccctgggatgataaggtaagcaggagccaccg

SEQ ID NO: 426824 - DNA, 226 bp, Homo Sapiens
gtttgggctgtcgtgctctcgggtggctgtcttctgccgcacataagctgcccgcttgggcgccatgagttctcttgcgggcctcctggacgctgcttgtggcttgcgtctgaggccttgtcgtggctcactgccggcttgtgtttggctggtttcttggggaccggagggtgtggttccgttctcttccttctctcttctcgctggtctcacatcagctgccagg

SEQ ID NO: 426825 - DNA, 220 bp, Homo Sapiens
gtttggctgtcgtgactgcggaaaagctggcggaggaagtgacagtctcaacaggactccagccagagggcgcaagtcaagggagagttaagtaagcagaaaaagtgataagaaataagctaggtgccaatatcaccagggtgttcaaccaaccaatgagacagagcgcttgacatcaagatggcttttccagtccatctataatcaaaaacagccaggg

SEQ ID NO: 426826 - DNA, 220 bp, Homo Sapiens
  misc_feature (45)..(62): n is a, c, g, or t
agaggactgccgttttggctgtcgtgcctggtatactgtgttttnnnnnnnnnnnnnnnnnnttttttaacagatggggtcttgtcctgtcccctatggttggagcatccgtgctgcaatcacagctcactgccgccttgatctcctgggctcaagcactcttcctgccccagcgtcccaagtagctggactacagacaggcgccaccatgcccagctaa

SEQ ID NO: 426827 - DNA, 194 bp, Homo Sapiens
tgctccctggcaggctgcattgggcaatggctgtgagcgcgaggcttaccggcagcaggatcgagaacggtactggtgttgtcacgattggggtatcgcgaggacccccatcgtgataatcccgccgagagccagcatgatggtgaccccagcgacgacgtcctgcccagaaccgtccggttcaacgaaggatt

SEQ ID NO: 426828 - DNA, 424 bp, Homo Sapiens
gatatgtctccatcatcggtaccctctggggctcgctctgtgaggatcctgcttaggcgtaactctgcagtaataggctgtcaactcggacctgatatatgattatggctacaatacactgtagccaacaatgaggactggtacgctagattggcacgtgaagcaaaggacagaacctcaacattatgatctagtctaggaacacagtatcaatcgccaactggcaatggcaatgaactgaattaggcaacactgatacccatcagattaaagacctacactgggctaatttgttcacatattaggagtccataagatgcaccattctttatcaagtgcttagaaaggtcctaagaccctacagtgcatgtcaggtcagcccctataagcaaactgttaatatttagttcaacttgtcaactgc

SEQ ID NO: 426829 - DNA, 208 bp, Homo Sapiens
ttttgggcgtcgtgcttgaacagacccttcagtattctcacagagaactgaagcaattcattttcaagactaacaagagcacagcatctgcatgcatgtggcaggtatgttagtgaatgttgtgaagtaggtggtcccatcagttgtcatggttcacctctgtccagactgtgattgtgtgactcgcagttggcacgacagcccaaaa

SEQ ID NO: 426830 - DNA, 535 bp, Homo Sapiens
ttttgggctgtcgtgcgatggacgagcctcctcataggtcagttactggcctgcagtctagtctctacatggacttagggatcaggtgtcctaaaaagtcctgtgaggtttagaagatgacagcccagagagacaggcttggactctgagatccttgttcttttccagctgtcggtgtctatgaacagtcctttccaggggctgctgtgggattgttaaccctgtagcatctgacaggcctttgttctcagagttgaaacagaccttagaggaatttagtgtgacctttcttctggtatagggactcccacaacaggcttgtcaggaagccgttcagccttctcttgaacttgagtagaagtgcctagtttgccaccaccatccaaatacctgccccattgttgggcatcttcatggtagtctagcgtgcacatagatgaaagccacacatattatatgcgcgtagcttaagaaaactttttccaagtaagcacacctgtgtaagcagcacgacagcccaaaacggggatcctct

SEQ ID NO: 426831 - DNA, 134 bp, Homo Sapiens
cgtttagggctgtcgtgcggtatggggggaacctcagtgcagtctttagagtgactccatcacttcaatctgaagttttgaattttaattccatcatccaacatcttaatccttttagtcacgacagcccaaaa

SEQ ID NO: 426832 - DNA, 230 bp, Homo Sapiens
ccggtaccgttttgggctgtcgtgctcagtgtccgggtagcgaactacaggcatgtaccaccacacccggctaatttttatattcttggtggggacaggatttgccaggttgctcaggctggtcttcaactactgggatcaggccttggcctcccatcttggcctctgaaagtgctggaattacagctgtgattccacacccagcccagtattaaatatcttataacaac

SEQ ID NO: 426833 - DNA, 121 bp, Homo Sapiens
agccggcccggtttatccatttgagaagcacttgctgacgcctatgggtgctaagcctgagctcagtgtggtggcagatacagagatgaggaaggcctggtccatgcacgacagcccaaaa

SEQ ID NO: 426834 - DNA, 167 bp, Homo Sapiens
gatggtaggtgtggcaggtgggacggatgagtgtgatataagaaccaggcctttttgcagtccggcactcctgagtgcattcttgtctgcagctgtgagcttctgtcttcccatggtgcaaaatgagaggataggagacagtaatgcaccagaatagcttgctcact

SEQ ID NO: 426835 - DNA, 225 bp, Homo Sapiens
tcgtaccgaattcggctctctgggtagcatcaggccaggtgggtctgcgtgctgatccaactcttaccattcaaaggagccgctagggcaagcctcaccactcaatctgaggtctcagcagagagcaaattgtgacctcggtacccctactaccaggtctggcctggtctcacagaacatgcccaggtcactgctggaaacagtggaacagaaggcacctcctcc

SEQ ID NO: 426836 - DNA, 307 bp, Homo Sapiens
ggcgcactaggtaaagatccactgataatatgagtattctgttccagtcttttttctatgcttaatttttcctttttagaaagttaggattagcctattttgtaacctgatatttacacttcatattataaaacaagtattttcccacattattaaaaattgcaaatgatgctgatgttgttgaaagtgatttttggaaccccttcttagaattgctttcagagccaatttatgaggtgcatttatttttgttattttttggacataacttgcttttgaccctgttcagtgttactcaacttcatca

SEQ ID NO: 426837 - DNA, 294 bp, Homo Sapiens
aaagtcctcctttatttgtaagatgggagaagcattgttcctgggtatgtaggggatcagaggattttaaaggcctgcctttaagccagagtgagaaagccaagggcttggcttcaggtactttcaggacttggacctggagttttcactcctcctggggacacatctgggatattcttccctttaaggagaggctaaggtggtgccgaccaaattggttcctctctctgatctgagcagtttggaagagggtaacagacagaccaaagtgggtcaaccatagagcccagagag

SEQ ID NO: 426838 - DNA, 170 bp, Homo Sapiens
tcgtcccggctctgtgacttggaaatgaaaatggatcacccatacctggaggaacagtgaggctggtgtccaagacttgccccttgcctgcacttccagcaaagatttggagacactcagtggaaaccaatcgagcccccagcccacccccgcccagagagccggaattc

SEQ ID NO: 426839 - DNA, 173 bp, Homo Sapiens
agaatactgcctggaggctgtttgtggggtaccagttggggtacatggtaaggatgcttggaagaagaaagtgagagagagggggtcaatggaaagacattggtcagtgggctcacagcctcgtccactgtgccgggtcatccagtcccactcaggctccctccctcctgctg

SEQ ID NO: 426840 - DNA, 398 bp, Homo Sapiens
ctcggtccgaagttcggctctctgggaagggtgcgctgttacaatcattagatgttgtgtagagccaggcaccccactcccatccccaccgaagttaaagagactctgcacttctggctcctctggcaatgccaatgggcaggttttctctgccaccgagtggggccctttcaacccaaagctaaatagcaaggccaccctccgcgtgccagcattgagctctagtgttcaacccacagttcatacctcacaaaagcccttgcgatgtgggcctggtcatccccattttacggatgacggagcagaggctccgagagtttaaggggtacatccacgtgagtcacagagcacggtgggcaggagcggggcgtcccacctggtctgcctgatcccataga

SEQ ID NO: 426841 - DNA, 290 bp, Homo Sapiens
aaatcagctctctggggaatgcacttctcttcttaaagtcctgtaccacttcttcaggcataggcatttggctaaactctgcaatcattgacctgtcctgcgatgtcttaaactggaacttcttccttgtgctgagtagctgggaaactatacctaggcagctggtcgtgacaaagatacagccacagggagaagatgaggcggcccaggcatgaacacgaagagctggacttgatgcctttgactcccgtcatcctgggcccccatgcatgcctatacctctactgcct

SEQ ID NO: 426842 - DNA, 351 bp, Homo Sapiens
aggcaggctggtaggagtatgagaaaaagagaattgggggtagatttaggggtcttgaaggctggcctgagaatttgattaatggcccaatatgctaaaggaggcacggaaggattgtaagtagtggtcaggaggtaacattgaatgccattgcctacacccccatgtccccacctgaaagtaacatccttcgttgcgtggttttctaaacatcgggactcttcatggtttgatggctggccccatgttagttggcacttttcatttttctcccgttcctgccccaccaccatcagaaggcttggacacctccatcatcactgatgagtactgaatgttgggtccctgcgg

SEQ ID NO: 426843 - DNA, 418 bp, Homo Sapiens
ccccgattacggctctctgggacatgctggcttcggtaccagcacagctactggggtcaaaatgccaagtgtgctcttggggtccccagttccaggacttgacccttggatgcatttctggacctgcgctgggccagtgggaagtccactgctctgaagggtgagtcccagaccaggtggcattcactacaagctgacttaagagcctttgggccttaagggaacatcagggctagtctggcagtactcctcatggtctggggtagtggtgattacagggtgaggctcctctgcctttggaaaggggagagaaaactgggaaggactgtattttgtgttttgagtgtcagctcagcagcaataccaggttgatgtctaagacttttgactctagttcctgacccccagatggcacctc

SEQ ID NO: 426844 - DNA, 177 bp, Homo Sapiens
agttattcccgtgtccactctgtgcaaacacgacattgtctggtctgaagatctgtgcgcctggtcccgacctaaacgaatccatcagtgctgggtccagcatcacgaggattgccgcaggacatattttgttacagtgggttcattgtagtaaacattgattctctccacgggtgc

SEQ ID NO: 426845 - DNA, 176 bp, Homo Sapiens
gttgaggtcagttacgtaagtactctatcctagctgtcacgtagcgctaagacacagagggaggggacagaaccaggtcttctggtctgctcactttctgccccattcccctaacagaaagtttgcttagagttgaaaagtctaagaaagcctcccacaatactagagaggccaac

SEQ ID NO: 426846 - DNA, 281 bp, Homo Sapiens
gaagacagctctattcagctggagtcttctatcaccctcacgaacacctgcctattcattccttctcatcaggcccagcctttagtgcccttggtcattgccagagctcccgcctggccagcactcccccagtgagacccaagtccccagaaccaatcctcaagtgacactgaatctttgcaccagctgatgctgactcatggccctagctttgactagacagctgctctgtttcaagccctaaacacccgccgggtgtcccacgctcttatgctacaggg

SEQ ID NO: 426847 - DNA, 105 bp, Homo Sapiens
gtgagtgaataagccgagtgtttggggcacaaggagagctgggagtttatcggacaaaagtggctatgagtggtttgattggatgatgaaaactttgggtcaaag

SEQ ID NO: 426848 - DNA, 534 bp, Homo Sapiens
gagtgtacagctacgggggaggtacagctacgggtgaggtacagctacgggtgaggtacagctgagatatactaacttgaaaaatgtcaactcatatatatcactggtctctggagtaggagctttgggaggtacagagaggaatcggatgtgaatcctgcctctcgagtatcttactggcaagaggaaagagaggcaagtacacaaggaactatactcccaaatggcaagctgctatcttcttaggcaaaggaagatcaagagatggtaccattgacaggatagcacaatctagacagtcactctttgcttcacttagcaaagttcaagggaaatattttatttgagcctaatgactctggacacttcccttaaaatgaccttatgagaatataagtcagtttttctcctggtcgagaggtggcaggctttggaatcaatcaaaaccttgtgaattctctctgggcacaggttacgtttatgctttacattgtcacttaaggtgggtttacccttaattcttgtttacaaggc

SEQ ID NO: 426849 - DNA, 248 bp, Homo Sapiens
gggtgaggttcagctggagattgagatctctctggggttcatcttggagtttctcccactgtaataaggattaacgaaatccagttccaacaggagcacactctataatggttacccttgatgtgctagtgaattgaagagaagcccaaagcagctttgggagtgctagtagtgttccgtttcatatttctaaatgctgattaccgaggtgtattcaatttgcaaaaagttgttcaagctgtacctca

SEQ ID NO: 426850 - DNA, 289 bp, Homo Sapiens
acgggtgaggtacagctgctgagaagtagagcaggtctagaagagctgccctaggagttttaggaggaagctctgcgagctccccatgcttggcagggagccaccaccctttgacaaacccagtgcactgattccttaggtatgcgtcccatgaccccatggtcaaatgggcacaggccagctggggtacacatgtacaggtgtaccagctgttaaaataccaagatgctctgtaccagctggtaaataactgccctccaaagctgtacctcaccgtagctgtacctca

SEQ ID NO: 426851 - DNA, 240 bp, Homo Sapiens
agcagggaacctcccccattcagggaagcagtgagtgaatatgggaccccgggaaccacgcttcttccacagacctttttacaaccctcgggtcaggagactgcctcatgaacccactccaccagggtcttcagtctgacacagagctacatggaatcttggcagagtagtttctcaggcgcaaacagagaccagaaagcctgggtatctaaggctctcgggtctctgtttgcgcctgag

SEQ ID NO: 426852 - DNA, 348 bp, Homo Sapiens
gaggtacagctgtagaagcgagatgggggcggttcgggaggcaaaagcaggaaggcagaaggaagcttggagctcatgagcccctctgtgctggcgcacggcccacgtcctctaaacaaaagggatgggctccttcagtggttccgtgggcccttggcaaagctcgtggaaacaccagctcctccccagcattcattaccaatgcgaagcactagccctttgcttggggcattctagacccccaggtgcctaggctgggagccctgggccaggtggtgggggggtcctggctgtggaatccagatgggacctaccactgcagctgggtattaggcagatttagccagg

SEQ ID NO: 426853 - DNA, 117 bp, Homo Sapiens
acggtgaggtacagttcataaagtccaatgggcagatgcctcatcgagtgatcaggccccataactgatgtcatcgtcaacgaattaggcacatggttggccgggcgcgggtggctc

SEQ ID NO: 426854 - DNA, 278 bp, Homo Sapiens
acgggtgaggtacagcttatgcctgctccacttcctgagacaactgagaaatcgttttctgtcctcctgaaaggggaaggctcaaaagcaaatgcccatcttggagaaaacattttgaatctgccaaaggagaccctgagtaatgagggacaaggctgggggtccaggtccggctgcctggccgcgtggtcggcctgtgctggtggctccactgtgatcctccatctcctcttttggtgccactcgcctcccagagcccctaccaaaactctaagtca

SEQ ID NO: 426855 - DNA, 361 bp, Homo Sapiens
gtctgtcagtcacctaatgagactataaatcagttgtacaactgatacttgagaagcatattttttgagtcaggtacgggcatatagaacatgcagcatgacagtcccctatctcctgctctgggttgcactggtctctttctccgagtccaaagagtcaccttgacaatccttgatggcagtagggagcatttaatccaactgtgaaatactaaattaggtgtggagtcaccaccagaacagggaatcctggctttctgcacctggctagtttgcactccctgtgaaaacatcacggttccttctcattgcagctgagctttctgaatcttttaagaactgacttgatgggatggccagg

SEQ ID NO: 426856 - DNA, 134 bp, Homo Sapiens
agtgtgtgacagttcaacagaagggtagggaaaggtggctgcactgccagtggagcaaacaccaggtggagcgaaatgggcatccagtaagcaaacctgagactgactgggtctccctttgacgtcagcatgga

SEQ ID NO: 426857 - DNA, 280 bp, Homo Sapiens
tacggttaggtacagctacgggtgaggtacagctacggggtgaggtacagctaccggtgaggtacagcttattacgcccgtatttgcctatctcattatctagtatagtaagaatctatgttgcacctagggatcaatgtataatgaattctcttctattactagttatgcttgtctaagatgaatgctggtcttgctctgactggacgttgacagtgaaacatgtttaggtccttcagatgtgcacaaagacacttaaaggtattccagctgtacctca

SEQ ID NO: 426858 - DNA, 430 bp, Homo Sapiens
cgttgagtaagctagggtgagtacagctgtcaacgggagaaattggcaaaacaaaggggatacaaaccccatgcaagtcagaaattcagcagagcagtcaaatcttaaagctccacatgatctcctttgactccatgtctgatatccaggtcatgctgatgtcaaagatgggttcccatggtcccaggcagttccacccctgtggctttgcagggtacagcctccctcttcactgctttcatgggctggcattgagtgtctgtggcttttccaggtgcacagtgcaagctgttggtgtatccaggtgttttcatacatcctctgaaatctaggcagaggttcccaaacctcaattctccacttctgtgtacccacaccacatggaatctgacaaatcttgggacttgcaccctctgaagccatggcctga

SEQ ID NO: 426859 - DNA, 346 bp, Homo Sapiens
aaaatgaacagaatacctcataactatccgctcgacacatacacctctacatatctgttcactcatgctttccgaggctcgcttccctgctcatgttcatatcttttccttgtgtgagcttctgggaatgggggccgagtcatgcggagtttggggctaacggagaaaggatgggcctggagggctggctgaggatctgtgtatgtagcaggaggggcagcctgaggacatgaggggttgcccagggagcagtattttgggcagggggcagcatgagaagtgggtgtcagagggtgaagaaaggacacagagcaggggcattttaacgtgcatgataggagggggg

SEQ ID NO: 426860 - DNA, 496 bp, Homo Sapiens
  misc_feature (90)..(384): n is a, c, g, or t
cccctctatcatgctaatgcagattggaacgtagtacctctaccatagggtaaaaaagtgttatgagatttttgaagagtgagtgagcannnnnnnnnnnnnnnnnnnnnnnnnnnnnnnnnnnnnnnnnnnnnnnnnnnnnnnnnnnnnnnnnnnnnnnnnnnnnnnnnnnnnnnnnnnnnnnnnnnnnnnnnnnnnnnnnnnnnnnnnnnnnnnnnnnnnnnnnnnnnnnnnnnnnnnnnnnnnnnnnnnnnnnnnnnnnnnnnnnnnnnnnnnnnnnnnnnnnnnnnnnnnnnnnnnnnnnnnnnnnnnnnnnnnnnnnnnnnnnnnnnnnnnnnnnnnnnnnnnnnnnnnnnnnnnnnnnnnnnnnnnnnnnnnnnnnnnacaaacaaaaagagtgagtgagcagtaccttctatagggagcatatcctagaggctctgccgtatggtgggaaaatgttcaaatcccttttgcgtcttgatgcatgatagga

SEQ ID NO: 426861 - DNA, 265 bp, Homo Sapiens
  misc_feature (65)..(175): n is a, c, g, or t
taactcggacgaacacgactggtacggactcggaaatgcccattacagatgcactcagagtcatnnnnnnnnnnnnnnnnnnnnnnnnnnnnnnnnnnnnnnnnnnnnnnnnnnnnnnnnnnnnnnnnnnnnnnnnnnnnnnnnnnnnnnnnnnnnnnnnnnnnnnnnnnnnnnntatatcttctaggggtgcagaacactgagctgaagggaagctgaacccacaggagcacttggctatgtgggttcggtggctggcagccag

SEQ ID NO: 426862 - DNA, 115 bp, Homo Sapiens
tgaagaccctgatgcctaaagcaacaagtgatggatgtctggggctcatgctcacactagagcttgaacttgaccccactgaagcaaaagaagtggctgcatgataggagggggg

SEQ ID NO: 426863 - DNA, 572 bp, Homo Sapiens
  misc_feature (178)..(272): n is a, c, g, or t
cccccctctatatgcagtgtgaaaacaggcgccaggctcagctccatgccttccatctatccatccatcaatctaaaaatcattgcatcacatccacagccaataaccactaatagttatcgggtgtttactacgtgccatgatacggttcttttcttatacttcgagacacagtccnnnnnnnnnnnnnnnnnnnnnnnnnnnnnnnnnnnnnnnnnnnnnnnnnnnnnnnnnnnnnnnnnnnnnnnnnnnnnnnnnnnnnnnnnnnnnnnttcagctggaagtacaggcacgtgccactacgcccagccaatttttgtatttttagcagagacggcgtttcaccaggttggccagtctgttctgaaactcctgacctcaagtgatgggattacaggcgtgagccaccgcacctggcacaagttttctttaaacatcagtttccagtttgagggggagcatatacctatgagtggaattactgggtcatatggtaattaaattctatgtttaacttgttgggaaaccctcagattccattttaaactgaggatcatgatagacttgcttca

SEQ ID NO: 426864 - DNA, 126 bp, Homo Sapiens
ccccctccatatgcagtgtgctgcagaggcttggttatcgccctcttctccccaactcttagccacgtcccagtggcggcgggagaacggtggtcccaagccactgtactgggttcgggtttcact

SEQ ID NO: 426865 - DNA, 394 bp, Homo Sapiens
ccccctctatcatgcacatcttgaacacaaaccctggtttgtgtgtcccctactccccagtttgatgtgccaggcactttgttctcaagcccagcagctgttgtgggatgaggggacattttgcatgcttagccagcagctgccagaaacatttctaatctggttttggcaggaaatagagcacaagtggaagccaagttaaaagaagctggaaaaataaacagaataactttagatgtcacttaatatatggtccattttcagccgaagatttgccctagtaatttgttaatatgactggactgtgatcccttccaaaggcagggttgaatatagtcacctttgagatccaggatgtagtccagtgcttggaatatgcatgataggagggggg

SEQ ID NO: 426866 - DNA, 213 bp, Homo Sapiens
ccccctcctatcatgcaggcaatagattccttgggaaagtggatcaggcatgactcagacttctgggtgttagcacagaaacaggatgatgtagtcaaagatatgggtgtcaataaccagagcaaggaaggaaggtgtccatggcagggatcatgagagcagctccctgagatttctgaaacagcctaaaaacgagaggcaactgaaggcaaa

SEQ ID NO: 426867 - DNA, 174 bp, Homo Sapiens
ccctcctatcatgcaactgtggtggtcccccgtcgtcccgggtaggtcaccactaatgatgtccgaacttagttgcgcgacacctcgatcgtggatatgctgcactacaagcccaggaactcctgggtctcaaagcgatccgtcccacgctcagacctcccaaggttgcttggg

SEQ ID NO: 426868 - DNA, 410 bp, Homo Sapiens
ccccttctatcatgcgctaaacacctgactcgctgaatgaacaaacatagttttcaaccttttttgacactatttttcactggcctggagcaagagtgagcatctctctttttgccgataagaaataatattgcctgaaacgagagggtctgtggctaccaaagtggtctagctagtcgtgtgactgtgtgtctgcatagtgcaaatgtgtggtgaatatgcatattagtacgggtcatggtatatgtactgttcccgcatgtgtagtcgtatatattctctcgtgctacgtgtgtgcattgcattatgtgtcatctcaccctggatgtcgtgcctgtatgtgtcgtacatgccggtcctgcgttctgtggtgcctatatgctcgctgcctgtccctttgtgtctctgac

SEQ ID NO: 426869 - DNA, 157 bp, Homo Sapiens
cccctctatcatgcttagttggctttgcatttttaagtaatcagaaagattctcttacccccatgcccttgagccatttgctagcggcgatcgtcattccagaagatagtgccctaagaacttgtcagattcagactgtatctttttcagcattcta

SEQ ID NO: 426870 - DNA, 269 bp, Homo Sapiens
  misc_feature (198)..(219): n is a, c, g, or t
cccctctatcatgcagccatcatattcattttcagctcttgaaaacatgttttaaattaagaagcatttaaatgctgagaagacatcccagaccccagcctctgtctggttagagacagaagaaaaataaagttaaagggcatgtacataacctcacacatggaagcattctcttaattttactttatcaatctaacnnnnnnnnnnnnnnnnnnnnnnggcaatgaatttttcccggttttttaccttgcggaatccagtgtctgatc

SEQ ID NO: 426871 - DNA, 125 bp, Homo Sapiens
tcctatactgccggtagacggcttcctacgaccgtgtgacccaccgtcggcttggacttaacggcgacccgcgactttctacggactacgtccgtacgaccttacgacacttgtgacacgactga

SEQ ID NO: 426872 - DNA, 297 bp, Homo Sapiens
cccctcctatcatgcatccagttatatatttataacatttaatggaatttgctccattcatccctatatttctacagctaatgtattacattattgagtagactccaggaagggtccacggaggagacaggctttaacggtgttgatcagtgtaaatgctatcaaaatggctaaaaatccacatggtgaacaatggatgatgctgtactcaaagctcaactttgattcggttttcaacaaatttggctgtggtataataatttggctctgggactgcataatcacaagatatcaaat

SEQ ID NO: 426873 - DNA, 276 bp, Homo Sapiens
cccccctccatcatgcagtcaatttgcttccgggctgttcctcagacatgagaaattacagtaggaagagaaatttgagagatttacaagcaattgactggatgtctttagaatcgaggggatttagactttgctatcattcccatcataataaacatactggaaacctgagtgatctgtaggcagcatggaaaggaaggcccggaatctgtcagaacctgccaaagatgttcctgcagttatttggagaattaaagcaagcaacggtcagacaac

SEQ ID NO: 426874 - DNA, 306 bp, Homo Sapiens
gatcatggagagagaatgtacatatatacttatgatacaatgtgtgcgtgaatttattattgtcagtcatatgagaaaataaatcatggtaaatatcactacttctgtgtctctgcgtatataaactttgagttaaagcatttctattataattcctgtaattccatcttgtatagtattggggcccagagagcgataccccaaagtgtgatgctttggcatgctgagatctttgaactgaaagagactggatggacccagaagccacctcagaagccaagtctcactctgaccttctctctcact

SEQ ID NO: 426875 - DNA, 203 bp, Homo Sapiens
agtggagagagaacggcaagtggagctgggaaaggacttggtgactaaggcagaggctaaattcagtttcaatcagcctcctaaattatcacctactgtaaccacactaaatgtgcactatctgatacctggatacatccctgcctctgcttttgctcacactcttcagtcagcctagaactaccttcccaaacctttctctc

SEQ ID NO: 426876 - DNA, 305 bp, Homo Sapiens
taaatcgagttatagaagagggaatggatacatgaagagagacaaaactgaaaactggaagcaaaactgaggaagccagaaatgttgacagatctagaaatagactatttccttgcctatttgtcactgctttctcataaatgcccatttatttttcaccagtggtaatggaaagtatttaggaagagagggaatgatcagtcagggaaattcatctatagacattcattatgtttccttgcaattcgtcactttcccatttcatggaatctcaaaacaagatgctaaaatcatctctctccact

SEQ ID NO: 426877 - DNA, 321 bp, Homo Sapiens
acattgcaggcacggaggctgggtgcaggacaggaggcagaaggtctcagtttcaggtttcaggcacaccctgaatgcactgggtgattcaatcatgtctctttccctctatagttttttaatttcctcatttgtactactcaccataatcccgaaacagtcttacttctgccccctggtatctgcacaccatctccttgcctagtacattctttcccactactctttgcctagctaattccttcccattctttaggtctctgctctttaggtcctattctttaggtctctgctgccttctggaaaccttctctctccact

SEQ ID NO: 426878 - DNA, 228 bp, Homo Sapiens
gctgaagatgatgggcaggtggtcgtacaggacccacaggcatggggggtgtgcttggtgtagctggagaggagaggcaggagcaattatgacattgttggcaatgggggcaggaggcactgcattcctgctgaggaattgatcctatctgtgacgggctgggaaaataattactagttgatgatatggtactgctccctacaagttcatgaacattctctctccact

SEQ ID NO: 426879 - DNA, 253 bp, Homo Sapiens
atctcatattacataaacaaaagtaatttattttgattagttcagttacatgcctggaaatggcagaaggttaacaccacgagcttctcctatattgtaattcaaggatgtagctagattctgtgataggagttgtcatggaggccctgatgcatttacctcgtctgtgccccctcaaacacttgttcccggtaatgaatgaaggaggcagctatctctactgatgtgatcaatacagctttctctctccact

SEQ ID NO: 426880 - DNA, 114 bp, Homo Sapiens
tgctccgcctctctggtacgttccctagcgtggttgcttgttagtgatagatagggtggcgtgcgtgagctctcacttgacatgagtccttgactgccagccaggctcgctgga

SEQ ID NO: 426881 - DNA, 130 bp, Homo Sapiens
tatccgtgtcggggttgcccaggagcgtctgcccgcggcgggggcctgatcatccccacagtccaggactagtcgtctactcgttgccttcctcagtggctactctctcgtgctgatgtgagccttacgt

SEQ ID NO: 426882 - DNA, 213 bp, Homo Sapiens
agatccctttccatcccgtgtcttagggaataagatttctgccgtgaatctggggcctgactgatcatccacagatgttactggtagccctctgagcagcactgtctcaagcggtctgataacaggccctgaaacttccaccctgcattccattccttgtgtcttaaaagcagactgcagtgtagctgaagcaaccttctattcatgccaaag

SEQ ID NO: 426883 - DNA, 566 bp, Homo Sapiens
tcctatcatcctctatattacccaaatgagatgtatggtctatacgatgtactgttattgtgaaattctatccatcatacacataacctccctcagcgaagtgaatttcatgacattagcaccattatgtgttgtctttgtctggtgctggatgagaggtgagacttctagtatattgtactcgtatttgattctgagtttctgcttttggtctggtgggaagtaggagaaggagaattgcttgaagattatgggtctacttccctttcccctgggcaagaaacacttctggtatattccttgacatctattgatccttagcacgattcagcatgactaagaggtgtgaagtgctgccatggaacaaagaacattaggactctgaagactcaattttaaatatgtcactttttagctatgtaagcccgggtgtgttactttaatcctactggaagctggggttgatgattcttacctaaggatccttgtgatcattaaaggaggccatttgtgtgaaagccttggcatagatgatagctgacaaatgtgacatatcgatatgtgtc

SEQ ID NO: 426884 - DNA, 173 bp, Homo Sapiens
tgacggaaatcaggtgccttccacaagtcagcaacttcccctttctctggtgatgtttaaatcccggatccaggagacggatcatctctctgatgatctctttctgatgctcgtctacttgatgctcagaagagccgggttctcatactctatagtgatggaaagggggatct

SEQ ID NO: 426885 - DNA, 360 bp, Homo Sapiens
tcctatccatccgctagtcggtggcacgctgtatggtaaggttgagacaaattgccaatggtgctaatgagtagtagaacacgcttgtgagctgtgggacgtgctggaagaaagcagggcttgtccagcccccatgaggctagccctatggcagatgagtcccaccccaggcccttattaccgggactcacagcccatattcatgagtcctttctaataatatagtcagttaattgagaagaggaatcacatcttgtacttctttcatatcccccacagcatctagcataatgctgaggacagagaaatttaataccaacctcaatgaataattcagccactgcgtttccctaagtaatg

SEQ ID NO: 426886 - DNA, 570 bp, Homo Sapiens
  misc_feature (310)..(425): n is a, c, g, or t
tattcgccctgtcatgactggcaatcaactcctgtccgtccatccatcggaacaggtatttatttaggtgcttcacagtgtgtatcacacatggatctgtagacatggacacacagacagactgtccctgtcctagtgtactttgctgtcttgggtggtagtagacattcaacacacaggcacaccaatggctatgacaggtgcagtgagtgaaattgacaagaccttgggagagagacatgggagaggccatgtggctgagcacggatgtggaaccagcatgcttgggtttgaatcctgtcctcacctnnnnnnnnnnnnnnnnnnnnnnnnnnnnnnnnnnnnnnnnnnnnnnnnnnnnnnnnnnnnnnnnnnnnnnnnnnnnnnnnnnnnnnnnnnnnnnnnnnnnnnnnnnnnnnnnnnnngcatttagaatcatgcctgccatataagaagtgcccccttatacatatgtgttaagtacaaggcaggtaatcctaggtaggatcctattggattagaaaagcccaccctgtcccaggaggggactgttcaactgggacctgatgc

SEQ ID NO: 426887 - DNA, 212 bp, Homo Sapiens
tagatcctttccatcccttcttaatcatggcctcagttccgaataccaatgaacaatagaacgcgcggtcctattccacttattcctatctatcggtattccgtgcggttcgggcctgctttgaacactctaattatttcaaagtcgactcttcgggtccccgcggcgtaccctccgcttgggagtccattgtagggtggtcgccgcgcagg

SEQ ID NO: 426888 - DNA, 259 bp, Homo Sapiens
  misc_feature (63)..(167): n is a, c, g, or t
agatcccttttcatcctgttaggagacgccaaagaaggtgttagtctattagatccaaaatannnnnnnnnnnnnnnnnnnnnnnnnnnnnnnnnnnnnnnnnnnnnnnnnnnnnnnnnnnnnnnnnnnnnnnnnnnnnnnnnnnnnnnnnnnnnnnnnnnnnnnnnctatttatgcttacgcagctccacaatggaactacatgacatctggccacataaagccaacatagatacagtgccagtctacaagaggcaca

SEQ ID NO: 426889 - DNA, 542 bp, Homo Sapiens
  misc_feature (397)..(397): n is a, c, g, or t
agtatcctttcatccggcagtgtagcctggacacacccaagacaggtgtgagcctggacagaagccagagcaaggtatgagcctgaaccacactcacggccagctgtgggtctagaccaccatccatggtcaggtgtgagtcaggatcatcctcccaggtccaggtgtaagccagggtcatcctcacatggtcatgtgtgaccctggaccaccatccagttcctggtgtgagcctggaccatcacccatgttcagctgtgaatttgaaccaccatccatggccaggtgtgagcctggaccagcactcacagtccaggtgtgagcctgtgaccacctatccacggccaggtgtgagccaggagcatcctcccagggccaggtgtgagccaggatcatnctcccagggccaggtgtgagccaggagcatcttcgcagggccaggtatgagccaggagcatgcttggcatttggcccattgcaaatgacactctttgtcccttgtcagcattttaaaccaaggtgaagaggtccacttagctttg

SEQ ID NO: 426890 - DNA, 309 bp, Homo Sapiens
ggaagtatgaaatatgccaaaacagtgtcttgtcaagaaaaacacaatacaggcatcattgtgcttaaaaaaatactatggtccctttatataccgttgaagccaacccagttataactgacttttactgttaagaactaggctatttgggaggaatgggagaaataattttatcccttgcatatctaaatgcatgtcataatgagccttcatataataggggtcagctgtacattcagtggaaagggaatcattaaaaggcaccctgcctctcaacacacgaagcacttcggatggaaagggggatct

SEQ ID NO: 426891 - DNA, 465 bp, Homo Sapiens
agatcccctttccatccgtggaagagccagatcgtgctcttagtggttatcataaattgtggaggaagacccaaagcaaagcatcttgggaggagactggtgagctgtcttgctggatgataaaaagttatcaagataaagaatggtatggtaagggaggagctcagcacaggaatgaggcatgaaatagaatggtgtacatggggcagtgtgggtagttaggtatggttgggactttgagtgagtgggaaggttcataatgataattaagcgctggagagatgggcaggagccaggcatggaggaacttgtactaaataatacctgttttaccttgtgaatggtaaggatataggtagagtagaactgaaggcagggagatcagtgagcaagctattgcaatagtattagagatttggggagcctaacccaggattactagagataggatggaaagggggatct

SEQ ID NO: 426892 - DNA, 154 bp, Homo Sapiens
gatccctttccatccactccaaatacaatgtgcttgtatatctattgacatcctctgtttcccattgtgtgtctcatccttatatgacctcagttgcaatcttcttcagaacttatctattaattaatgtattcatccgattaatattgatttg

SEQ ID NO: 426893 - DNA, 516 bp, Homo Sapiens
atctgcaagtattggggatgacctgttcaacatgtagatttggaaaggacaagatatccaaatccatatcattttcccctggggcctaggaaatctcatgtccttctcatattgcagaattcagtcatccctttgcaagaggttttcaaagtcttgacgtgttctaatgccaactcaagtgtcccaagtccaaaatctcatctgaagatgagatcctttgacctatgagcctttgtgatcaaaaacaaattatttatttcccagatacaataatggtagaggcattttgtggacattctcattgcaagagggagaagttggccaaaagaaaggggcaaacggccctatgcaaatttgaaacccagcagggcagtcatcgaatcttaaagctctaaaataatctactttgactccatgtcctgcatccagggcacactggtgcaagggctgggctcccaaagccttaggcagctctgcttctgtggctttgcaggttgcagccctcatggctgctct

SEQ ID NO: 426894 - DNA, 475 bp, Homo Sapiens
agatccccctttccatccacctcgcagggaaccgacctccatcaggacaaactcagcagggatctgcagcctaaggtcaccctggctaaaaaaagctcaaccatgacacatgcagttgttgaagctgccttaaatactgcagaggcagactgaaaagcccctttcaaaaggaagagaaagcatctgtgggcagggggagttcagcgtggctgctctgagccaaccctgtaactgctgaagacaaacagcggcactttgctgctctaaggccctggagtgactcagccatgcagctggggcaaacacactcatccgctgcccgcctgcctggctccttagacctctgaataccagggaaaggttggaaccacctaggttgggatcaggaggtccaaagcccacctgtgcagggaaacacgaactcctattctagggcagggcaggcagtctcacctccggatggaaagggggatct

SEQ ID NO: 426895 - DNA, 533 bp, Homo Sapiens
  misc_feature (54)..(113): n is a, c, g, or t
agtatccccctttccatccccgttttacataatgcagtgccaatgtcctcttannnnnnnnnnnnnnnnnnnnnnnnnnnnnnnnnnnnnnnnnnnnnnnnnnnnnnnnnnnnacatgactggccgaatgagtgagggccatgcagtgcctctcccattatgtcaggactcttcttggaatgctgactgtgttttgtagagtgcagccctaggaagatgggagacccaggaactggccctgtctctgctgatagctccgtcagcttgaatgaggtctaagccccacggacactctgcataaagaagcatgcatgttgtgtaggtaacggggttggaactgttgtggtcattgcttcatgagggaaactagatagggatagcaccagggatggcaggctggagcctggggagggcggatcacagagaagctctgtgacgtcgtctggggttaggaacccatgaaaagactgaacttcctattaggcagggagaaaatggggagggtctggcttgatgtctcttggagaaatctg

SEQ ID NO: 426896 - DNA, 315 bp, Homo Sapiens
  misc_feature (163)..(172): n is a, c, g, or t
acctttttccagtggtcacctgtgggtgacctgaggcctgtggaattgatgagagacgaagcggtgggcatggtgggcaggcacactttcttggacatgtgggcttattttaagtcatttttgcattcagactcttggcttagggatctctctggcctgtcannnnnnnnnngacagctttattgagatataattcaaataccatataattcactcatttaaaatggtgcaattcaatggattttagtatattcacagatatgtgcacccatcaccacagtcaattttagagcatctttatcacctcaaaaagaa

SEQ ID NO: 426897 - DNA, 519 bp, Homo Sapiens
agatccccctttccatccctgtaacaaggctgaggccggccctgagggactgggagggggactgcccaggaccttttcatcctagaagggaggttgtcttgggccagaagtttccagttcagtagctccagctgggcagcctccaggtggactggggcagatgacccgctcacccagcactgctctgtcatccacacattcgactatgagacaaacactggtgagtgtgaactcagagcctgaaggggccctggacattcacagataagccacaccccaccctgccccccaggagccgaccgtccagtgaggcagctggccagatgcgtaaccatgaaccacaatgtgactggtgcagagatggggacttccaggggctttggacacagagaagggctcctgacccagcatgacatcttggaaggcttccgggagaccagacgtctctgcagagcccataggagttcactgggggaagagggtggggtagaggacaggcccggatggacagggggatct

SEQ ID NO: 426898 - DNA, 491 bp, Homo Sapiens
agatcccctttccatcctgccctgtgccgtcagtgtcccctctccatcctgccctgtgctgtcagggtcccctctctggctgcgccctgtgccatcagggtcccctctccatcctgccctgtgctgtcagggtcccctctctgacgcttgccctgcaaacatcctcctttcccgtgactgctacgctcaggagcgaggatgcagtcagaccctgttttgttgcctctggagcatccttctcttcctcttccccccgtttgttatttggtgaggttaggggggaaaggggtgtcttaatctttcttatggtgtgtatgcccagagctcaatagtagttgaaaaggttttcttgtcatatcaattcctcaagctatgctacttgcacactgtggtctgtggggctgcatagtgaaatgtccttttcctggatggcgggacgacagagaaggcacatgatgcagcctcactgctcaggatggaaagggggatct

SEQ ID NO: 426899 - DNA, 448 bp, Homo Sapiens
gtcagtggtggctttaagtattaggcaagattgcatcctctttctttggataaatagcatggtctggttcagacactctattgtgagttgagttgtaacgcctctataccagagtttgcaaactcaaattgcaggaccaagcaggtagcacatgtgaaccgaaaggctcccatggggattgtatcaaataagagaacatacttctgtctaaaaagggccgctaactcagggctacctaaaaataatctgacaggtgaaatcagcaatgaaaaagcccagacattagaaaatggagttacctgttcggcagcttttactgaacgaggggagaccattcagtgtggagacctccagtgtgcccacttgcctttgtaccaacttttctctgagcataaatgtaaaggacgtccgttggaaaggaacctttgggatggaaagggggatctgg

SEQ ID NO: 426900 - DNA, 190 bp, Homo Sapiens
agatcccctttccatccctgccaaaccagagagctctggcctctgagaaaggagcacacccttcccactcttgcccataatcccacctctactgccccaccaggccatcgctgctgcccacgtgtgctgtcagatgagattctgctgcttcccctccatgtgagagatcacactcaatgtccccattctt

SEQ ID NO: 426901 - DNA, 166 bp, Homo Sapiens
cattcgagcggcgcagtttaggatgcaggaaaccatcatcaccaccatgaagtggtacatcgagtggcgtcggggtgttgtgcatcgtggatactcagaggcgctcgattattttacgtccagggtctagtagtgctaggtgaaaagaatcctgatatgtcgtccg

SEQ ID NO: 426902 - DNA, 217 bp, Homo Sapiens
atccccctttccatccccactgttggtccagtgaggtggacaacaaagacgtgttaggtttgctccgatatgtagacaggagtaccaactttggggtctgccctggcaccagtacctcttttagcagagacagacagaagttcagagctaaggcaaacactctggagatcatgagtggggcaggctagtggtattttaacaaaactcttgaaaaaaa

SEQ ID NO: 426903 - DNA, 518 bp, Homo Sapiens
agatccccctttccatcgcgtgagaattccgggtcgaccttcaagatgatgaaagcctaaacgaacaggcacttgaccagttgtaattctccacaggtgacatgtagctgaggtggctcttcacagcctcggggaggcaggctccttctactcttgtcctgccttactatgaccttcacgcctaagatcattttctggccccagggtggtagctcctactccagccatctggtccacattccagagtgctggatggaggaaaggtgggggatgacgccttcccccttaagaacacttcctagaagctgcatataccacttctgttcaacatctttttggctagaatttggtcacaataccacacctaatttcaagagacactaggaaaataccttgaatccatgtagtcatctgcccagctaaaaatcagagcttctacattaggaaggggagaatagataccgagataactgatctatcttgccacagttctctccctagtaccgtcctgattactc

SEQ ID NO: 426904 - DNA, 277 bp, Homo Sapiens
agatccccctttccatcctgtaatgccagaagtcttttacaaccttcttccttggcatctggtgccttacatattaatatatgatcttttttttactaagggcactttgtggtgttcaatagctggtctcagaatttcattgtctgacagtaaaccatccagttcactttgaatctttttcctttccctttctagctcactcttgctgcctctagtttcatggctgttatttctagtatgcttgaaggtttcgttctttgactttagtgctcagtgt

SEQ ID NO: 426905 - DNA, 298 bp, Homo Sapiens
ggctgtgtattactgggggatcatgtcagcggaagcgaggatgatccacctggagaactctgtagggggccaacagccaggtctggtcaggaactaatgtcgttgattgggggacctatcaacgggctccaagcagatgttctaggaacatgggagtaatgttggccccatgtactgagtgggaaggtgacttctgggagagacagaaccctgtaaaaatacaagtgctggcatgtcccagagaaatccagtggtgtcactttctatggatttgcctaaaatttaactcgaggagagg

SEQ ID NO: 426906 - DNA, 214 bp, Homo Sapiens
ctctgggctgtaacaggagcaggaggggaagggatgtagataacgatgttcagttgggttaagggggattacctttaattctctcaatacacagtgaagggcctgggttgagtaggggactcaggagaacagtggcggttgggaagtatcccagggcatggggctgcctaggggctttatggaagtcaaagctttagaggagtcggagagggag

SEQ ID NO: 426907 - DNA, 407 bp, Homo Sapiens
ctacccttccggtcttccagggtttgtactacagagcagaattggctacggccgctccgatgtgataggtgaatctctggaccggatccagaagtcttggaactcatcctgaccctgctacctgcaaatccacgccagttacctcatccatatacaaaagaagacatggtttcgtcctcctgaatgaggtcagagggctataggaatgacagacggccatgtatggacatgctctctaaagtagacagtgagctggacgggtggaatggcccccgcccatgtctttgacggacaagccagtgcagtgacaaacagggcgtgtgtgcactgtctgtgtgacatatgtggcacgtgttgcattggacagagacggtctatgaccctcatgaccgtgtgtacctgaatgt

SEQ ID NO: 426908 - DNA, 132 bp, Homo Sapiens
tctcgagatccttaacagaagttgcctcccttctgctagatgcctctcaagtggtctcaagctgactcaccttccctgtgggattggggaaggtggagtcattcgcaaacaggcagaggcagacattcaggt

SEQ ID NO: 426909 - DNA, 208 bp, Homo Sapiens
gacacgagattaacacatgtattagatcagcagacattcacatcagcataaaagactcacaataagtgaattaagatataaatggaggtgtaagccattacatctgttttacacatgaccctgcacatcgggcagggctctggagggctggctccttgggttgacctgcacgggctgatatacgggatgctgtcggggactcctctac

SEQ ID NO: 426910 - DNA, 113 bp, Homo Sapiens
cagctagggcaatggaacatcctgaaagttggtgcgtcgagcacaggcatctgcatcttaagcatgctaatagattcggatgtctaggagggttcacgagctcgccattctgt

SEQ ID NO: 426911 - DNA, 413 bp, Homo Sapiens
gaacactagcgacggatcatatgtagccaggtacaatcatgagagtatagaactccatgccgtgcagcagggtcagacagaatgagcacggaagtacagaagagagtcatcttcagaagcagaataaccaaaggccccatggaggtagatagatttgctataagcactgaacagcggaggatgtagccaagtgaagaaaaaaagaggtcctgaaacccaggggaagagcataagcaggtataagcatggctagttcatagccacagtgctctgtcaggcctgacaacggcaaaacagacaagttgcaaagcagtggtggaaaagatcagatggtgcccttaaaaaccagattgaggagtttagacaacaaggaaggaaacagatctactcaaggttttcaatcattcaagcag

SEQ ID NO: 426912 - DNA, 218 bp, Homo Sapiens
gtagtaagctgctaggggcatatcagacgacaatttcacagacacgttaaatgagaggcagcaggatgtgatatgtaagtagcactcatatgtatgctgaggagtgttccaagggcatgtcctatcactgagaaaataaaaggcactaacagattggctctaatcttccatctctcttccgaatggccttgtatgctggatacctgacaccttagttt

SEQ ID NO: 426913 - DNA, 220 bp, Homo Sapiens
taacaggggaggggggtggtgcagtgccgttggtacggggctggctccttgagcacccttggtgaagagcacatgattcagtgcttggcagaccggggtaggtgccgtgtctgtcactctggggcctctgcatcctacacctgctcagctcgtgtatgacgtcaactgctaccttcctagagagtggtgggaattaactggcgatagctgtgtggccaag

SEQ ID NO: 426914 - DNA, 162 bp, Homo Sapiens
gggttatagcagtgaagacagaaaacaaatggtggtcgtttcttccttatttagtcttacttcagtgggaatcaggtacattcctatgtgaggccatatttatccttatgctcagggtctgtatgctggggcgaccattgaaggttggacaactccccgctt

SEQ ID NO: 426915 - DNA, 378 bp, Homo Sapiens
ccgagagcatgctaatcagcggggattacatggcatgggccatgtgcctgggcctgggtttaatagttttaaaattttatttaggggggaatgatggtggtttttgggttatacaatgggcaatggctactgaggagtatcctagagacctggagggtcacgtgttgttatttggggatgcctcactattatgggtggcggttacgacgtgggtgactaattactggtacgtttacggctggacatagtacgcaccagacgatacgtgctacgactggtaccacactctggacacctactttggacaacgtacgagccagccagagactttcctgggtcgaactacggactgtacgacgtactgacgaccgacacaca

SEQ ID NO: 426916 - DNA, 184 bp, Homo Sapiens
cgtatagctcagagtgggtacagcaaaatcacccagggcatgaaaggcacaccaggcaacggtgaatcatatatggtggtaacgaaaaacggtaaaaactaaaaatgaatttcacgtttttcttctcaatctgggcttattgacgaggaacgacacacgaacaatttaatcctcggctccctag

SEQ ID NO: 426917 - DNA, 261 bp, Homo Sapiens
  misc_feature (125)..(148): n is a, c, g, or t
agatccctaacccagaactacaagtgactatatctggtgaatatctacacagataatcatattaatgaaaacaagggatattgatagggtcgggaagacaagagggaaagaactccagatatgcnnnnnnnnnnnnnnnnnnnnnnnnacaccctccgccttctctatagtgtcaggtagcggggttcatacacatacaatcttatggttacttatacaatttttactctcccactctcatttgggtctggtaagggactg

SEQ ID NO: 426918 - DNA, 409 bp, Homo Sapiens
tcgggaggatcccgagagcatcgcctaaccagagctccccgttagagaacagcagtccggccacattgatggtgggagtataaatgggttacgttataccccagggtcacctgtagtgggcctcgggtactggacaagggttactggctgtgactggcccggaggcaggcgggccatcctttagctaccaaattcagctcctggcttaggtaacctacaggttgctggggctggacctggggcctgagtgggaactcccggggccattcctttcctttctgatacataaagatggaatgtcttccctatgggaagactaagggctggtgcctcaagcaaggctggtttcagtgggtcaaaggtccttttagcctcgggttcccaaattagggagtgagtcttagtggcc

SEQ ID NO: 426919 - DNA, 212 bp, Homo Sapiens
gatccctacccagggctatactccacatacggcttgcagggcagcaacaaatctatagagactagcagctccaacaatgggctgataccccacatacggcagagcacagggccagcatcacactgggtggtcttgctggtcctttctgcccatttcacattccctgttgcttgaagaggctgtcatagtgactgaagccaaggccagattgt

SEQ ID NO: 426920 - DNA, 379 bp, Homo Sapiens
cagcgatacagagtagtgggcaatcccaaggaagtttaggtgttgcacaaggttcacaccattgggtagacagatgttcattctgtctaaatgctctcttctttgtccagtgagtcctcactactacttcaaaaactgacccaagagtactccctctcctattactccccctccgtttcacaaagctgaatatactttccttagattcatactgtgtacacactctttctagttttccttggacgatgctcaatccagctgttgacaatctcccttcttccaggctgcaaggcacttcaagccaaggtctgttgtcttattcatccttgacttatgaatacccaaaactatgcctgtcatacaggactccacacatatt

SEQ ID NO: 426921 - DNA, 265 bp, Homo Sapiens
acaattgctaagtgatgaaagtatattactacaatctcacattatgtagcctaatcttcaagtttaaaatatcttactagattctgactgaaccagaaaagaaatctataaatcccaggaccttatcgtacatttgggtcatggcccaccattttgcttcctgtggcagtggtaagaaaagaacattcctctctctttccctacaaaacaactcattttgttcacaggaatatggaggaaggcatataagaaagtactcagtgag

SEQ ID NO: 426922 - DNA, 341 bp, Homo Sapiens
ttgctggtgtctttgtcctcctccagccacaggattctcctaacctagagccttgggagtctctctctgtggctcagagggactgcagggtgccttcttgtgggcatgggctcagattccaacagtaacacccatgcaagttgccagcccccttgtctgcagcctggcctccatctcccctgagggacaggagtggtgtggggctggagaggggcagtcccatacctggattcctcaccccttacagatacaggctcctgaagtcaggaaccgaataactgagtctgagatggaaattcccaggaaaatcttcaaggcaaatttacaagggatatcccccc

SEQ ID NO: 426923 - DNA, 181 bp, Homo Sapiens
ggactaggcctcacagggctttaataatatttttacttcaaaatgctgccatgattttgcccacagagcaaaccagaatgctatggtcaattttctcacatttgcaaagaacctgtttacaaacccgctcataaacggggggcacagcctggcgggcatcagagggtcaggtgaggagtgg

SEQ ID NO: 426924 - DNA, 317 bp, Homo Sapiens
ggcagggggagaaaagagacttttacttgttttcccccagcagtcccggaataagcaaaccatggccaccggccctttgtgctcagaggctcaaggcagcaaggggctgaatggggcacatgggccggggctcgggggtcgggctcaggtgtggctctgctgggacggcagcatcgcattccgccgggctgcgcggccagtgggccaggagcccgatccacagctagactctggcagctggcaagcagggcgtctcctgggccagcacgccgtctgaagtgttgccttcttgggccaggctggttttcaggggctgg

SEQ ID NO: 426925 - DNA, 239 bp, Homo Sapiens
ccaatatatcatgctcttcagtcattacttaggaattttctaggggtggaggaggtcaaaccaagaacttttacatttgggagattgaaatctatttctaaaacttgattttggaggttcagctccattctggtcgtcactctctgaaaatgcccagcactttttctgtagatggctgtcaagccacatctcttgcagcctggccacaggcaattggtttttcagtgctcagtgcttcc

SEQ ID NO: 426926 - DNA, 301 bp, Homo Sapiens
ctggtggtcttagcatccattggttatcattgtctgaatcctttgtttcactcgcggttgcaattttatgctttttcaagatcctcccttagtgaagactctgcacccccacttcccttcagcatcactggactcagctttttaaagtacttggattttcattattatcttagataaagccaaggtttcatttctttcagagaaaggccgcagagggaaacaaattgatccgtccatgtttggagcatggctattcttaggatgcggggatggtgtttcgactctgtgaagctcctgggat

SEQ ID NO: 426927 - DNA, 344 bp, Homo Sapiens
cactgtgcccagctaggaagttgcagaggttttgattactcctggcctttagttttctgaagataggatgttaattcaatttgctaaaatgaagtcaggatggcagtaggggttttgaggcaaggaataatggtttggtttaatatcctatagggaatgggaaggagagctgaccaagggcagattaaaggaattttaggtgccgtggaagtttgtgctgaaattgaggactgttgaatctataagattttcctaaaagtgctcagctgcctggtagaagaagcagagaagagtttagtcagaatgagggagtgaggacagaagagagtttggtcagaatcaga

SEQ ID NO: 426928 - DNA, 212 bp, Homo Sapiens
tgggaatgtcacattcctcatctttggtctgattctctgtggcaggcacttgccttcccaggaagcactaagcatttggctttgcagagattttacctcctatctctggagaaggcgccgccttggattctgggccacctggattgctaaagcctggggttaggtgctggagaggagaataaacatttatggagcagctaccaggaggcgga

SEQ ID NO: 426929 - DNA, 151 bp, Homo Sapiens
caactgcgccgacactggtgatactaacctatgtggaaaggggctaaaaaacactgtgtagttatttgacaatagaaaggagcagagtgctgattaaattcaaagctcacgcttttaattatcacttagagttggtttgtatagtaagggg

SEQ ID NO: 426930 - DNA, 195 bp, Homo Sapiens
  misc_feature (43)..(92): n is a, c, g, or t
tacttacattttaccccagaaagaataccaattatctaatagnnnnnnnnnnnnnnnnnnnnnnnnnnnnnnnnnnnnnnnnnnnnnnnnnntctccgattcagttaagtaaataaaccaaaagactctcatgagtatttgggggattgaaatacaatagtctcgagtctcaatcgaccacactcaggataggag

SEQ ID NO: 426931 - DNA, 132 bp, Homo Sapiens
cctgaactgtgtgggtctcagaatgagccacctggaaggtcgatccaagtacatgaagattggattttctggtgtccagagtaacctcttcactttgggtctctggcaggcccctattccctttatggattc

SEQ ID NO: 426932 - DNA, 244 bp, Homo Sapiens
  misc_feature (37)..(37): n is a, c, g, or t
aaaaaaagggtccaggaggtggcaggtggaagacagngctcagtttgtactggatcggcgaggagggaaggagatgagtccaggtgtctcctgggctcccagcatgcagatcacagctttcagacaggctcagggtcagcttcggtctttctgactttggaacgtctggtggaaaagccaccagcagatggacgtacccacagttctgaccctggaaactacccacacggagctgaaggccctt

SEQ ID NO: 426933 - DNA, 313 bp, Homo Sapiens
  misc_feature (11)..(11): n is a, c, g, or t
caaagaaaggncagctgttcaatatttcgttttatctgaactggctcgcgctagtgttacagtaacatggggagtggatgtaggatttcctaagatacgctacaatcccaaggaaaactatgatgtaaaaattggcctgggaccactgagcagcatttaatagcactgagagatatcaaggatgtttaagcggcaggtctgaggagctcacccttgcaggcaggagcagatttagatacacctgggttgatccgctagtgacaccagcctgaagaacaaccaaaggcacctgctttctgttaccttaaatgtc

SEQ ID NO: 426934 - DNA, 584 bp, Homo Sapiens
  misc_feature (92)..(92): n is a, c, g, or t
accatcgtcatagctgactcttgaggatccacgacagccaatggagatcgcctctatgagcctcagcttttctcatcgtttgatgggataanatttatctcatggaattactttgagggggcctaattcagcattccatgcacagtcgtcactcaacaacatgttggctgttattttccaccctaatgctggctttctgctgtgatctgtgtgctggggggattggaggaaaatagcagaggtcctgctctctctgtcctctttcaggactacggaagtttgctaaggaatttcacacggcatcctgctggagcgtgtgggggagtgctgctgacgtgattaagcacaaaggcactggggtgtgggcaaagaaatcgttaattcaggctccctgcaccattccctgacctccgcataagacaatgcaacctcagactgagatctggctggctgtcagcacagactggaaaggtgcagctggagaaaactccacctctctttttggtttcttcttgggccttaagggatctgaaggcaccggggcagaccagggaccatgcgtatgtcttccagtgtgagaccag

SEQ ID NO: 426935 - DNA, 484 bp, Homo Sapiens
  misc_feature (365)..(373): n is a, c, g, or t
ccccaagcctttcccagtctgtcttgcttgtttctcagtaacttctctgcctctcctccattgtatttcatgtctttttctagatttcttttggtaaaaagcaaaacacactttttgagggcctacttttcccagggaacagctttacagatccctgcgcaatcttggtcgggatgtttgcttagctcaaggtgtgcaatggcatgaaggagccagggagcagtcttccatttgaaaatgccgctctctcaaagttgagacagttgctttacttatctgaacagagaaccaaagagctgagtcacagagatgtgtggttaaggatgttaagtcgtaggaatgctagttaagtgtttatcaggtgnnnnnnnnnaaataaagtggggaggagggtcaatcccttatgtagtttaattcaactagctaacagccgtgctttatttcttagaatcattttaaaaataggtgcaaaggagacaatgtc

SEQ ID NO: 426936 - DNA, 224 bp, Homo Sapiens
gtgtggaatcaatatgtgaaagccagatttgtggagtcatctctcaggctgacacatcctgatctgtgtgtcagtgggggaaattctatggggtcagagtgtgactgtcaggtccctgacactgtgtgttctgggtctggccaagtgcacagattcccttgccttgtcctggctggggaggcccttctcaaggactcctcacatgaagggtgggttggtggtgg

SEQ ID NO: 426937 - DNA, 577 bp, Homo Sapiens
  misc_feature (60)..(60): n is a, c, g, or t
  misc_feature (84)..(84): n is a, c, g, or t
  misc_feature (94)..(94): n is a, c, g, or t
  misc_feature (474)..(503): n is a, c, g, or t
tcatagctgactctagagggtacacggccgccaagggagacgcccacttgccatattggncaatttgggtgtcttaccatgctnggagcagagnctaggagaggctgggggcctaggagcccagcctccctaagtcagcctgcatcctgccacttggaggtgaactgcttccgtgggccctatctcagagggtacgtggctcctcgctgctcatggaacccacagactgctctgtctctgccccatcctcttttccaggctttattttagggaagatggtattcttttcctctcatcctcagagcctcccccctctactcacacccaccacaacacccagcagaatcttctcaagggactcaagctctggagacaaaagacaggaagggaaatcttgcaatccattactgttttctgccatgccacaaacatcccctgaggacaggaaacctagagcctgctccctgctggaannnnnnnnnnnnnnnnnnnnnnnnnnnnnntccaagggaacacacacatgaattaatatttgaatgaatcgtcctgctgggacaggccagccttgagccagcca

SEQ ID NO: 426938 - DNA, 245 bp, Homo Sapiens
cgctgatggattgagaatttcaagagtgtgcatgaattaagttttattatgaccaacccagttcggggcacctgaggttcctcgacagaagtgagtaatgccacgtgttgggggtgcagaggaggagaggctgttcaattttgtttgtgcaagagtcagaaaatgttatatagaggggccctggagtgtcaaaggtgagcatcggccaggaggaagtgggagtggcatggaaggcatggggtacc

SEQ ID NO: 426939 - DNA, 116 bp, Homo Sapiens
agctgagcagtcggaaggcggaagtagttaggataatataaatagataaattaagaagggttatgttagggacgtatgggggaactgctattattcatcctactgggggaactggg

SEQ ID NO: 426940 - DNA, 192 bp, Homo Sapiens
ggaggaaaaaacaaggccaggtaatccccaatattggcccggggttgttcccgggggaaaaacattcatccatcaatccggacttctatctgtagctatacatagggggagaaaagcctgcaatattaacttaatattcaaacaggtatttttggtggctgagatataagttggtttactttcctatttgta

SEQ ID NO: 426941 - DNA, 153 bp, Homo Sapiens
ctcttgagtatcccccaacctaaaatcacttgcaaatttccaactaagaagaaggtactttcatacaaagtcaagattaaataattttagtagagtatgttaatttctaaaaaactcatatgtgtttttgtatgtatcaaaaaatgtacatgc

SEQ ID NO: 426942 - DNA, 291 bp, Homo Sapiens
ccatccctaattccgcggtccttcagggcattaataggggcagctgtgaagaaaagtgttaatggacctgactgactctctcctgacggagtcagggttgcatttactattactgatcccagtaataggatgagtttgatctctcagcatgaaaagaatgaccatattagggatttgtttgttctccagactacagaaagtttgataaccagagtaggacttactggagagataatgtcagaatgaatagagactgtctgtgagaaatttgaacgggctcagtgctgttac

SEQ ID NO: 426943 - DNA, 284 bp, Homo Sapiens
  misc_feature (188)..(216): n is a, c, g, or t
  misc_feature (225)..(240): n is a, c, g, or t
catgatagcacaaacacaattccttatttcttgtatccacaggggtgatattattggtaatcaatatcaattggtaatcaataattattaaacgtgttggttgctgaattaccatgacagttgaattcactgtgtcaccagggttctcatgataatgttagggcactaataagtgaagaatgggaacnnnnnnnnnnnnnnnnnnnnnnnnnnnnncccccaacnnnnnnnnnnnnnnnnccccgggctcaatttcgaaataagggcaatggttttttcttgtg

SEQ ID NO: 426944 - DNA, 284 bp, Homo Sapiens
cgctcgctcttgaggatcccccacagacccacagtaggcacataatatttgctaggtggatagatgcacaaattagtaagtaatctaaaatgtgatactcagcttaggaatcagattcctgagagttcggttaagttgaatcaggtttctaaagtaaaggcaaaattcagggccgtactatcctcaatctataaggacggaacaaatgtcagcattatacatttaccacattatgggactcagtgagtaaatgggcaaaaaagtcattacttccatatggagtc

SEQ ID NO: 426945 - DNA, 456 bp, Homo Sapiens
ctgccttgtttctgcccagcctcatttcttctccaggactcatcatggagtgtgaagcattaaacatatgcttctcctcaggcgacctgctcctctttgatttcaaggccattggcacatattttgcaattattctgtttaccagtttttgttccagtttgaagagattcatgtctaatatataataatatcagaaaatccacagtctccatcctcacttcagtttaagctttctaagggactcctcattgcttctaaacagattctgattttgtctttctaaacaacatcagaagagtcagtaatccatccggcgaatatttattgagtgacaagtcacaaccctggctctcaaggtgtttatgttgttattgaaaatatagtcaatttaaaaggcaatggatcagagcagggttagaggggatggaggggagagggcaggcaacagaactacaa

SEQ ID NO: 426946 - DNA, 253 bp, Homo Sapiens
tagctgactctagaggataaaccacagtaccgacaagtggaaatagaaatcaccttggaagctcccttatgaacttttccaggcagtagtttccactatcctgacttccaacagcacagaatagttttgcatgtttgagtactttatataaatgtaaccataaagtatatactattttgtgtctggcttctttcaacattatgtttaaaagatttaattatattactacatgtagttttagataattcattct

SEQ ID NO: 426947 - DNA, 244 bp, Homo Sapiens
atttgaacatatgagatgggaggaagggaactccaagtagacagggtactctgtgtaaaggctaggtagcagccaggtagagaaggcataattgcccagcaattacaagaggcagtaagagacaaggccgaatcattcacgagctataaccaattactatgaattaactgtgatatccatattcttgctcaatagtagggttaaaaacatcttcctcagattatcacaccaaaagcacaagtta

SEQ ID NO: 426948 - DNA, 599 bp, Homo Sapiens
gaagaggaactctgaagtggacattaaggaatgtgagttttatcattaacagtctgattattagagtggttatttggcaaattgtgtaatgtgttcttgttttaaagaattctctatcatctagattcacagataggatttgtaagtaattgctattaaatagctaacttaatatcctgtgcaagggcatctaatgcccagcagtagagaagtttctaattggacaggccagtgagatacattgggtagtatctggagccactggtgttactttagataatacctacttaggtactacatttccaccataacacctcgtctctagcattaagctgtcctgagacacttcagtggtaaatttcatttagcttttatctcagttggaaaaatagcctttctccaagttagtagagtatacttaggctgatcttaggtgttaacaaaagatttcctaaagtttactcttaggagtatttgcattttaaaggaaatttagaatgtatgtggttgatatatttagatagtgttagtctttctgtgtaggctttaattccttctgactttgtatgacagcgccaaaagagcatgacctactgtgg

SEQ ID NO: 426949 - DNA, 304 bp, Homo Sapiens
cgaccacagaacccacagtagggtattgagtcttatttgtctattcagtgaatattcggataccaactctgctgttctgggcatgatggtagccactggggagacagaaggaatgaaagagatgagtaacctgatgtgtgctgtctagtggggactgcaaataaagggggtgttaccactagcgtgctctacagtgttatgctagagagaaatttacttcctttggccactcacttccttgtttttaaataagaactgagttaaagttgctaactgtgaagacttgagaatttgaacctactgt

SEQ ID NO: 426950 - DNA, 197 bp, Homo Sapiens
gaagcaccgttaagaaaggattggagactttgtcatggtacttattttccagatgtttactttttaaataaggaaaaactacaacatgttaataaccaacttggaaaaaacaatattgtgatctgagaaagaacaaaacacatgccatacttaatacgttagtatccattttttccccttcaaatacaattctgcat

SEQ ID NO: 426951 - DNA, 129 bp, Homo Sapiens
agcaaaaaaagcgggcaaagaatcccaaagtttgggccatgcgatgttcgcagagaaaaacagacattccgaaaagtgtctgaaatgtttgccttactcccagccttatctaaagatatcctctcccac

SEQ ID NO: 426952 - DNA, 412 bp, Homo Sapiens
cttgacgccatgcagatagatatggatctagatacagtctagatgctaaagtcgagaaaggcgattggtgcagctgctccactgtgatggaaatgtgcagggtgagtgaatagtccctagacgtggagatattcctgactgcttttacgatactgtcagcatcctatgattgtcttgataatttctgcctttgggaaactgtttcagtttttaggtaactgagctgcatgtatcagttgagaaacggcaggctggcataatggaaaaaggacagcccaggcttgggggtcagacgtaggcggattcaaatcctaactgctacttctcggttatgtgaacttgggccagttcctcagagtacctcatcccctgactttgtgtatcggggataattcctactgtgggtactgtg

SEQ ID NO: 426953 - DNA, 252 bp, Homo Sapiens
  misc_feature (49)..(195): n is a, c, g, or t
aggagcataggttttggagtcagattggggtttgtacctcagctctgtnnnnnnnnnnnnnnnnnnnnnnnnnnnnnnnnnnnnnnnnnnnnnnnnnnnnnnnnnnnnnnnnnnnnnnnnnnnnnnnnnnnnnnnnnnnnnnnnnnnnnnnnnnnnnnnnnnnnnnnnnnnnnnnnnnnnnnnnnnnnnnnnnnncacaaaatacatagatattgttagctcagtgtatctcgctcttagcatagagccagc

SEQ ID NO: 426954 - DNA, 170 bp, Homo Sapiens
tataacaaaaaccattacagtatctttctcctagagttataagcattgtttttaacagctaaaacaatgcaagttgcagatttctcaagaagatggtttgaaaactctatagactacagtataaaataaggtattgaaaatactctcataaaatacgttatgaaaaaaat

SEQ ID NO: 426955 - DNA, 369 bp, Homo Sapiens
atgcatgaagaatatgagttatgaactggacgtaaagttgactacaagtgtattaacctaagtatcccaaaggagggaatggccatttcctagggtggggaaaatcatgaaagattaggggagacaatcaggcattctgttgcatgcacattaggcttgagatggccaacacaagtgaaataacaaggcaatggatagatgaatctgaatccaaaggccaggagagagatctacactagacacatgaatttgggaagtaccagtgcctacatggtatctaattccatgagacttaatgagaacatcttgggactgagtgtagagagcaagagaagaggtccaaggattgggccctgggatcccaacatg

SEQ ID NO: 426956 - DNA, 198 bp, Homo Sapiens
agtatctgtgggcacattctgttactcacttagccaggagtaggcagccaactgacctctgcacatcgaatatcctcatctccaagatggtacaattttaaacaggcacaaagctgccctgtctacgtcacagtgctataagccacgagagctactgtagggcactggctctgtctcacaccatacaaacaaaagtta

SEQ ID NO: 426957 - DNA, 357 bp, Homo Sapiens
cgcaaggatctgtaggctactgctatgctaactggggcagatatgattaaggaggacacaattgggaaagggactcccggtaaggcagtgcagcattagctaagactagcatagaagacaagtgggagagtaggaagaggagcaccccggacagaggaaggagaatgaaatcaaagccaggcagtaccatggtggctctggattgaggactgtagagggcacacattagtaggtcaaggctcaggcactgtctaaactgtgacagccatgactcccagtcactcatctcttttaaacattaattgggtctccagttctttaccttggtcccctagaacttccctgtactgacgccat

SEQ ID NO: 426958 - DNA, 383 bp, Homo Sapiens
aagctagatcactggaatgctgcacattcaggcagtgaatgggagggggggcaagaggtgcactcgctggaaataggccccaaatgagcctgtcccttgtctcacttgctaaaagggctgcccttggtcaggctcccgagaccaagggagagtctggcagagatggtgaggccctggtgcagcatcaactcctgggatagcgaggaattacattcttcctccttggatagcaaggaattacattcttcctcctgggataccgaggaattacattcttaagtgactacagaatttagctagtccaggaggctggatccacacttgtctaagaggattcctttcctttccaagcctcagctccactgatcctcctgtttaaggct

SEQ ID NO: 426959 - DNA, 224 bp, Homo Sapiens
cctagaagtctggagctacatgtccttgcgtgagctctgtgaactacaaccaacagtcttcactgctactaggcctcagctactttgctaagaccatagtcaatggccgtgtacgcctatatgacaagaccaggccctgtactagtcatattcacgtatcatttaataagtcgaccacgatactataagacaggtactactattatgcccacagaatccttacc

SEQ ID NO: 426960 - DNA, 228 bp, Homo Sapiens
  misc_feature (157)..(165): n is a, c, g, or t
ttgcaaagcttctaggctgtcacaaatattaagagaagccatgtttatctttgcactttgttttggttgctaagtaaacctagactgagcattcagtcaaccaaagaaatcacatgtaggtgagcatctgcaggttttcctactggtaagacatgannnnnnnnnataactttagaaagatgtgtttacacaaatttagtctacttagtgactatggcagtgttattg

SEQ ID NO: 426961 - DNA, 185 bp, Homo Sapiens
atgctgggaagacgtgtatgagccctcacctggctggcctggtgctcaggaagctgcagtatggacagcagtctacctggacgggaacatatgtggccgtggacgaagtgtccggccggatgggacccaccatcacatcgtcctttggatgcagcactggcccgcccccactcctttttttattt

SEQ ID NO: 426962 - DNA, 237 bp, Homo Sapiens
aggttcactctccactttcagtggctccacagcacctagaatacatccaagctcctggcatgactttcttggcctgaaatggccctgccttgtccatctctcccacttcttggatggcttcacacactcctggactctatattccggccacctggcctcttttctgttcctcacatgccaatctctttcctgactcttggcctttgcaccagctcatccctttgcccacgaatcctt

SEQ ID NO: 426963 - DNA, 270 bp, Homo Sapiens
gcacattttcatttgcgctaagccctgcaaatctgtagccagtcctaggcctaagaggccaggatcagggatggtgcagctctctgtcttcccgccttctccctcttcaggaatggctctcccaccccacagacactgggacatcagccttgacgcttcctttttccctcaccacgttcccttcatcccaccttcgtaacatagctgagattagcttcctcacatcccctcaccattgctgtgtttgcggcttccaccctccctttcctg

SEQ ID NO: 426964 - DNA, 296 bp, Homo Sapiens
cagagttaattctgagtctacatgtcgtgagtctataggaagaagcttttcttaggaggtgaaatttgggatggagttctcctctacactctagccctgtagccacaatcttggtttagatctttggcattttttgttggacatctttcatagtgtctacctcttcttcctgcctctaggcttcccgcggttgccagatgaaattccgaaaactcaaatcattcctgtagttaatattcttcagtgactccggaacaatcaaattcttgatccctccacatgggtcttaccatctg

SEQ ID NO: 426965 - DNA, 171 bp, Homo Sapiens
tatggtgaaaatatatccgtagttggagaaatttcttaacatggaaacagtggaaaatgatttagaaatgattatagattcctaggaagttgctaaaatagtacatagaggaccctcacccttcatttagtttcccccaaaggtaacttcttaaccaactcaagtacacta

SEQ ID NO: 426966 - DNA, 238 bp, Homo Sapiens
agagcctagggtacccttgtcctcaatctccaaggtccacattgtacccttcctccaatgacaagatcagaatgggtcagtcttccacaaaatctatggtccctcctttgagtgaaccttgatttcagacattttacctgctggattctaaactccctgacttccacgttactgttaccggatttcccctctgtcagtccttccaagactcagaattgtcctcaggctggcaatcttc

SEQ ID NO: 426967 - DNA, 189 bp, Homo Sapiens
cggaaggatctttctcacaacctagaaacccccatgggatgacccccagcctggctgggggtatgtaccatgtgtgctctccggtgaggacacaggaaacttgaacactaaatgatgcccccttatgctagtctttcgaaagacaaagaataaatggataatctgcccacccggcctggttatcctcag

SEQ ID NO: 426968 - DNA, 315 bp, Homo Sapiens
cagctggggccgtgtgatggctgctatatctatcctattacgtcgataccctaaaactcagctctactccccgagctgtgctcaaaacaagaaatacagggaccaacaggaccatggtgtggttaagaagctaccagcaatccacatttatctcaacaagcagcgaagatctcaagaatcttctactttggtcacagaaggagctaggcaaccaatcacatttctctcttttctcttgtatccatgcatccaataaatgatattctcctcttttttaagtgtccagttaatagtgattgatattatatgatgtaa

SEQ ID NO: 426969 - DNA, 182 bp, Homo Sapiens
  misc_feature (57)..(79): n is a, c, g, or t
atattgtagctatttctgagccacatttaaaaggcatggttctataagctatgggcnnnnnnnnnnnnnnnnnnnnnnncttacctccttttgcagttttcccagatctgcaccttctgaagagcaaatgcaccttcctgggtttgtccaaatgcagatcatttatgctctcttatcacatg

SEQ ID NO: 426970 - DNA, 346 bp, Homo Sapiens
ggaagtatctgtgggcagagtgatcagaaaggtgcttgatctgaacaattgatccatgatgaaaaaatgaccattagctctcccccagaagcgtctgtgtttgctgaatggagctgagattttgatccgctatcagactccagaaagatccaggagttccaagaacatggcaaagagtcaaaatcttaggacaaggaattaaaatgccagaatgcaaatgtccaacaggcctggtagctcacagctatcaacaccctagaattccacactgcctcactgcagttgctcaaggatgggtatgtttctgtctctgaaattcgggaaaaagccttaagtgccagagaag

SEQ ID NO: 426971 - DNA, 309 bp, Homo Sapiens
ccggatgatctgtgggcaaggtcgcagacaatgtctgcagggacacaaaggacgaactcctcagaagacacggggctcttctccggcccccggggatgccacaactttctcgtggggacccttggtgtgactcccctagggcccctcagcacggaaaactgcatgtcagggtctctgttctctgctgcagccacatttccagagaccccagccaggccacccagaattccacggcacggccaacccggaccccggagagagcttaagcttttacgagagatgtaatcagagcatgaagaagcccagtga

SEQ ID NO: 426972 - DNA, 256 bp, Homo Sapiens
aagtctggcatatattctgggtgtttaaaatcaatgctttacatgagctacgctgcaagtctcaaccttgatcctgctacagtaatcatccactacaaattaaaacaagagccataactgtctcctactaaaatattctaattgagacatactaacagaatacatttctttgggtgagaaagtctccaccaggatggggaacagacggcccaccaattgtgctgtggccctaacctccgaggactcagcaatcatg

SEQ ID NO: 426973 - DNA, 411 bp, Homo Sapiens
caaggatctgtagggctattaggcaatttcctgctttgggctattacagatagtgctgtaatgaacttcttttgaaatacatcttagtacacatttgcaagtatttctgtaaacacttgaatgtgaccatgatatatgtaaaagacatttaccatttaaaaatattgataactactttctagttatgctttcctcttcaaaagttatcctttatttatctatatactcaaaaacactggatatagtagtcttatttatagtaagtaaaaaaggagtcttattatgtcacccagggcttgagtgcaatgggatagatttcagctaaatgtaaactctggctaccaggttcaagccattctcctgattaagactccccagtagctgggaatacaggtgcctgtcaccacaccc

SEQ ID NO: 426974 - DNA, 197 bp, Homo Sapiens
  misc_feature (14)..(14): n is a, c, g, or t
gcgactctagaggnccccggaaggatctgtgggcactgctggcagaaacataagtgtgtgtggataactcttcattagtggaaaggaatcttagttttcggctgattttcagtggtgggcatgaccccaaacagaatctgagatgatgtaataatcatctgtgatttgattgtacttattagattcagctaaatctt

SEQ ID NO: 426975 - DNA, 402 bp, Homo Sapiens
gcgaaggatctggggcaggttaatttagtgtcgctagcagcccgagctgaggctctgacagacttggatgtttataccgtctgctgtaccgctaaattaaatgagcacagagaacgtaagacatcagggaacccaagctaatgctcttggtggggcagccccaaagcataatgttagcaagaagccatagtgagagacccaaatagccgtacttcagaccctgtgcagagatgccctgggcacagcatacagctaagatgtttgttgctggttcaggcagcctctagtcaggcctggtggggaacagcctatttgtccccagttttttttcagacacctctgcacacaaggtgagaaaacctgtgggcaccagcatttttggacacgatggacagccttcta

SEQ ID NO: 426976 - DNA, 147 bp, Homo Sapiens
aaggatcctgtgggctgatggttttgataagatgatgagtttggggatacgtagttgcctttccaatacctggccattagcaagaaatgctaggctgaatgcaaacgtcgctgtatatactagagatggagactatgatcagatatt

SEQ ID NO: 426977 - DNA, 408 bp, Homo Sapiens
cgcaaggactcttgggcagcttactttctgctgctgggccaacgtgatatttgcccattacatatcagcattggaaaacagtaaagtcctgaatgtcattagtgagagttcatgggtttcacgaactttccatgagctagcaaggaagtttgagactagacccaactgaaagcaatatgtcctatttgaaaaggggaaagtgttaccatgtgtcatggcatggtgaacaggacaagaccttgaacaaggagagcagccacaatttcaaggctgacaccaaggtcagcagtgcgaggtcaggcagaccctcttaaaccctatgaacttcagctgtccctactgtaaaactgtccaggagtatgctaactttcaaagttctatcatattaggagtcttatgatatctgct

SEQ ID NO: 426978 - DNA, 328 bp, Homo Sapiens
  misc_feature (179)..(204): n is a, c, g, or t
ctaaggactcgtgggcatatgttattcatgaaccttgagattgacccagcttagaacttgtgagtggccctcacgttgacatccatagggcctgacgactgatgtgcctcgccctcagctatccacctccagacactgttggagtctaggcattggctggccatacctgcagctgctgnnnnnnnnnnnnnnnnnnnnnnnnnncccatcttcagggccgctcttactatatcgacctaccttgcctgtcactcgcccctgtgggctctgtcacagtggtgccccagtgtactggcttcgctccacccatgcctctaccacatattgt

SEQ ID NO: 426979 - DNA, 205 bp, Homo Sapiens
cgaaggattctgtgggcacgtattggccttggccaagagtcaccccgtggcacatcaggcctggggtggttcttccagcaaagccagaaatccatcttcttatgtgtaaatccccctggtccctggtttctcaacactggcaacttctcaaaattttcaaaagcattgtgaacacgctaaaacatgtctacagcccagcctctgg

SEQ ID NO: 426980 - DNA, 177 bp, Homo Sapiens
cgcaggacttctgtgggcagctcgtgctttcttggtgtcacggaatcgttctaggttcccttcttgagctgatttcttcaggaacagatggatagatggttgcactgaagtgccttgcgcatcccagaaccgaggccacctgcctgtcctcattgcgctataagcggtatagcctaa

SEQ ID NO: 426981 - DNA, 212 bp, Homo Sapiens
gtcgcgcagatgaagggagagggtccagggcgtcctaaatgctgccgctgtcactgtccatctcgctgcgtttcagagacagtggaagctgctctttacctctaaagcgccccgcagacttggcgtcttcacttgtctcaagagctcctagatcctttggtctcgtgtccctttggcaccccgtagctggcttggtgaacgagggcttggtt

SEQ ID NO: 426982 - DNA, 184 bp, Homo Sapiens
attctgtgggcatgaatggaaggaggcaggagagctagaaaaagggatagatctaatgttccctacggaacctggcttatgctggcccttcacatactgtgacatgtaatccttactactgttctctgaggaataaggctgtcccctcttccaggtaagaaaacaggctttgtgtgacttgccc

SEQ ID NO: 426983 - DNA, 409 bp, Homo Sapiens
ccccgctaaggatctgtgggcagataatggttagaagcatgtcaggtttactaagcaaactacttccatagagtaatcatccatattagagccagaaaagtcttgtaggttgtgctgtttgttaccatagtcaaataaaatgtttccttccttaagtttctgaggtatcctgaaagagtcttaaaaattccgggggtcaaactgaagatctcaattctctcttgcaatgactgggacagtattttgattccccagagtctgataccatcatgtgagggatccagcaccagcagtgtaagcctgttaaccttaagctttcagaaggcttggtttgtcagttcattgactatagcccttgccagttcttatccttgctctcttgtatactggctgggacctctgataagtt

SEQ ID NO: 426984 - DNA, 122 bp, Homo Sapiens
ggcagatctgtgggcttagccaccacactcaatctagtacactgtttataaaattttccctgcacactgaggctgtcacaccctctcagctaatgaagtgtagtaggacaggccatactgtg

SEQ ID NO: 426985 - DNA, 194 bp, Homo Sapiens
gagtactgtgcactttcatccagtaagtgccctaccacctgttggagagttgagcatgttttggaacatgtattgtttctctcctggaactgtcttttcttgccatttatttagggaggaacaaagggatgccagttaagactatcatgctgtttattaacatgccagctttacagaggccactggcctgagat

SEQ ID NO: 426986 - DNA, 190 bp, Homo Sapiens
agacctgtgggccgtctgtgtgtcctgcatctgcatgaatattcccgaacgtggccagtttcgcttccatgtctggtctgggcaacgtgggattcttgggccgggatttcactgggtttttctgacttctcgtggagtgcccaagattgagctgagggacctcagggatgcccgaatgctactaaagctc

SEQ ID NO: 426987 - DNA, 148 bp, Homo Sapiens
cgcaaggattctgctgggcaccagaaatgcaccgcgcgacaccttactgtgacactatgaaatgctacacgcgtgagtgccgagtcattaccaagagcgctcaggggcaggcagccagttgttagttacttgcccgcggggcacctgc

SEQ ID NO: 426988 - DNA, 112 bp, Homo Sapiens
aaggatctgtgggcttgtgataagagagcatacatatctgcatttgtgacaaccctggaaggtgcatttgctcttcagaaggtgcagatctgggaaaactgcaacaaggagg

SEQ ID NO: 426989 - DNA, 344 bp, Homo Sapiens
tagggaacaaggatgtcattaaaagaccctccctcactggtgcatctagaaatttgccagctcctcgtgaaagcattagatgtcggctttgcctgagagccgatcctatggaaaatgcagagaagaatggtctgcagagtcaaggagcaaggcttagttactagttaacaattccctaattaaatcataaaccccaggaaaaagccactccattcttaaggggaaggcatttcttatagtttattcttttcttgaattaaatccttaaaaaacgatccaaagcccttctctgtaccagagcctgttactgtggtgaaatgcgactagcccggcatccaggggct

SEQ ID NO: 426990 - DNA, 409 bp, Homo Sapiens
aaagcgatgctgggcccgcagcaggcggggtgggcctggagctaggcgtttctcccacatgccccgggacgctgctttggaactgtgccgagtcccctgcatgccaggcctctcgtttccttgtggtttatctgctgaagagggcaggttgtgagtcccacgggtctctacaatgtcaactttgctcattgcagccctctgggggctttgaactcatgcctctgttgggcgtccatcagcccatccgatgcaggcagaagccatctgactgtgccacctggctgcagcccaccatagctcccagctgcttgctccaggcgcttctccctgatctcagccactccaagggcactcacaggcacccctccctttctctgtcagggctcacccctcgcagggctgaccctct

SEQ ID NO: 426991 - DNA, 305 bp, Homo Sapiens
gaggattcagttgagcggccaggagcgggcaggcacacaggcttagcaaggataacctagctaagtgttgggaaagttccactttccaaccaaacccagcaactcagcattctccttgggagagaaggacaaggcttccctggaggttaagttagatcttgaaggcagaagggcagagaaaagccttccaggcccacaagactccaggttcaaaggcgacaaggtttgagacaatgtggtgctctttaagctagcataactagtgtgatgtaccatgagcaaaaagggctttagcaagtatttat

SEQ ID NO: 426992 - DNA, 351 bp, Homo Sapiens
ggtcagatgctctagatatctgtttacttcctcttgaaggacggcagatggggaagaaggacaatatcatcagagtagtatttggaacaagacttccagccaaccagtggcaacttcttggaggcagtctggtgaagtggctggaactctggcattagaatctgagttttgactgtatgtttctgggcaacccttggtttcctaagctccagtgacctctcaagggtgttgtgaggacaaacatgagctggtgcctgtgttctgtaccaggttgccataaagaatggtgttctttgcgtcttgtcattttgaactcctcttccaaaggagcctgggaaaccctctgcttac

SEQ ID NO: 426993 - DNA, 223 bp, Homo Sapiens
tgactgtcctgctgggcaactcttgctatgaatgtccccctcatctagcttgggctttggacccaaactctacctgcatgcctcctccccttgcctgggctctaaccatttggagtgcagtcatgcgccaggactccctgggacccaggctcctgtgctgcattgccacacctaagtgactctgggacatgggactgtgtgaggagtgtggagggctcgggga

SEQ ID NO: 426994 - DNA, 197 bp, Homo Sapiens
tccctggaatctgggcagggatcagagggctgctggacacaacaaatgaagcagctttaaggatcggacactcacacgctgtgctggttgcaaaatgccagggacaacaaccactggacagatctggtgctgctgaacacgggcttcctctgtggatgtgacttgggtttcctcacagtgcatacaggggctcaatg

SEQ ID NO: 426995 - DNA, 206 bp, Homo Sapiens
tgtcttggagacttgaactcccctgtgctctgaacacaccagctgccgtggtagccatcagacgtccctactggagccattgtggcccaagagaagtggctgagatggggatatggccctggtttgtgcaaactcagggaaactcggggatgtgacctcctgcagctttgccgtgtgttttgacctctcccaactgcttgggtttc

SEQ ID NO: 426996 - DNA, 332 bp, Homo Sapiens
actctttttgtagtatgtcaccattgttagcttattctggtattgcggattttccctgttcgcaggactgggtgaaagctttttctgcagcatgtcatgttgaaaaccttgtgttgactttcctcgtgttctgaaatgggagcataaaagtttactccgccacttcgtcttttaatagcagaactttgctgttttctgcagatctaggaccttgttacagaactctgccaaaataacatgtttacagaacaatgtgctgtgattagagaagaatatgctggtgtgtacatttcaaactctctggacaatatgaatcacactgtctatgttac

SEQ ID NO: 426997 - DNA, 265 bp, Homo Sapiens
cattgagcccctgtgatgccttgagttctagtttggaaacgttatttctaatttctccccagtccctagctcccagataccagagctggtcccagaacactctccccttcactgggaacagagccacatccaacatccctattctatcggccatcatctgctgactgtggtctaagggatgtgtctggccccctagcacaggccctgagggccaggagaagatgaggttgctaaaactccaggacactaccaggccctcctcagt

SEQ ID NO: 426998 - DNA, 119 bp, Homo Sapiens
actagaggatcccctctgttaactcagcagctttagggattgctagtggcaaaggcaaggcctctacaggtacccacaccatgcaaattgcatcctggggctcaactggggtaccgaga

SEQ ID NO: 426999 - DNA, 207 bp, Homo Sapiens
cattgatgccccgtgtgatcggtgcatggcaagagccaagaggagggaaaagggggtcgagtgttgtctgtaactctgttcccacgaggcacattcaggaagtagaggcataaataaggagatttacaccattcctcctttcacaggtatgacagattaaataatacctgtacactgtagtataaactttgtaccttctataggtca

SEQ ID NO: 427000 - DNA, 307 bp, Homo Sapiens
cattgagccccttgatgcttccctaaatcttatatgctacaggtctgtattttgtaatgtcttttatatcgtctcatttatgctttcatctctgtcctttttcccctatatattatttagtgttagaaactgtacaatttattctatataattttcaacagtttattgcattctcatggtatagtataatatgttcctcttttctctgtattcttttgtaaattgtgtttctttgtaaatctaagagtggacaatcattatacaggttcttaatttttaacaaaatttgtgttaaaggctgttttgt

SEQ ID NO: 427001 - DNA, 316 bp, Homo Sapiens
cattgagccccttgatgcagaagggctcctttggaagattttatgcaaagagaatgccatggaaagattatattcatagtggatcactctggaagtgtcatgcggaatgacatggagaggtaggaagcggggttgggagagcaaacgtaaatctccacggtccaacttgcggagagctctgattggaatgagctggcgagagatgatgagggcctgatttaaggaacgattgtattgaacggcacataaaggatatatggcaattccagcgaaatgctacatagaagtctcaaactttactggtttacatctaaat

SEQ ID NO: 427002 - DNA, 180 bp, Homo Sapiens
atcatagggaagatgaaaaacaggagctaatgatcattctacatttacttgtgtctacgggcaccttatgaaaattacttattagacagatgctatgttatttcccactaaactagatggttctacaatcattacagcaatgccctggacaggcttgctaacaatacagattgctgggac

SEQ ID NO: 427003 - DNA, 275 bp, Homo Sapiens
ccattgagcctggattccatcttcctcacagtctcactccaacgctccactttattccctgttcccttctactggtttggaagccggtttgcatccctttttctctccctttctttacctctaactgacagaggatctagaattttcccttcccatttcccttaggctacggaaaaactctggactccatcatctctcggaaaacccagggattttttggggaacccaaaaggaattgcctggggggcaaaagattggaaaggaaaaattccctt

SEQ ID NO: 427004 - DNA, 176 bp, Homo Sapiens
gtgtaaaaaggcaggtatatacagaatgttcaaactaaagacatttccttaagtcatactttcatgctttctaaactataatcacccttatcatcccctgctgttatgctttccctctgactcccatgtggcctcaatgttccatccaccaccattattaacacttcacggatact

SEQ ID NO: 427005 - DNA, 173 bp, Homo Sapiens
tcagttaccaactgtatactaaaggtatctttgcctcattatactatctctggatagccatatcctcttctaaaattgacggatgcctgcctacaaaatctacgggacacttattgtgtaggtgtcaaacactttaaaggcccactaaagggcatctataattccatgagtgc

SEQ ID NO: 427006 - DNA, 173 bp, Homo Sapiens
actcttatggctttatgtgaatatatctttgcccattttggtttgagtggggatggtttatcttgtaatgagcatgtgtttaatgctggggaggagtgacagacagtggcccagaaacaaccaagtcatcttctgtattcacaggggcagaaagggcatgctttcagtgttta

SEQ ID NO: 427007 - DNA, 379 bp, Homo Sapiens
  misc_feature (265)..(266): n is a, c, g, or t
  misc_feature (293)..(294): n is a, c, g, or t
  misc_feature (307)..(307): n is a, c, g, or t
  misc_feature (328)..(329): n is a, c, g, or t
  misc_feature (359)..(359): n is a, c, g, or t
tgccctctctctacccatcagtgcaccgttcattttccgatatatttcagtgtaaattgcaggtatccgtatactttgtccctaacatgaagcacagacattcattttccccaaagcaattagacttcccccactgaattcactaacaatttcagaactacatctgtggggcggggaccacttgcaaaccataagatcataagggtagggccctgactcctattcaactgggtgcacttatagagaccggaacgagagaccgtgnnggctctttccacctatgtgacggacanncactgagaacggnccagctcaggtactctcttcnnctcttcttataagcgcaggcaagggagccnctcaccagaaaacccaacct

SEQ ID NO: 427008 - DNA, 183 bp, Homo Sapiens
tatcgagctggtaccgcgggactgccctcgcaggctgctggcatcaggtatacgggactcatccctccctttcctgccagctcccaccattgccctgatgggggctccagctcctgcccccagcatggggagtctggcccaaaggaccatctgtaaacacttgttccgaatccaatggctgcc

SEQ ID NO: 427009 - DNA, 137 bp, Homo Sapiens
catcatggggtctggacatcatggaggtgaggcgtatgtgaatgggtgtataaatgccactctgatatttgtacttgttttgactgatgctgctgttgcttcactacagtcctgatgtagtgtgggtcgaggcatga

SEQ ID NO: 427010 - DNA, 408 bp, Homo Sapiens
catcatggggcttcctggtagggatgcttttcaaggtatgtgggtggtactgacagcagcctcaccctctcaaggacattcttctgtctgtactcatacatggatacctagcagttaccaagtttccatttcccttacatgtgtattaagtatttaaaccatgtgagtgcattgaaaatacgtctgaccatcatgtgcaggatctgctaatgaaactcacacagtattcgaatcattcagtgaactgctacctcaggtgcttgaaataacgatgaccctgcgcgtgtgtaaacactcaaagtgacttactgatcaactctgtcttttctgaaaaccaacttcaacaaactcatttttgaccacttgacccagggttactttgtaaacttatcaatcactaaatagtct

SEQ ID NO: 427011 - DNA, 330 bp, Homo Sapiens
ggatgatgtgctgggtagagagcattgaagcccaatgccacttcccgacatgattttgcccgtaggtatttcttcatcgaaacacctttgtaatatcctttttattgcatatgaaggatgcaatatcctttttattactctgttacaccgggtcctcttttggactcctctggctggaaggaaagcgtttctctcataatttttgctccctgaacctatcacacagctctgagacttccttccttccaaagccagaagattaagggggaatataccccatctatacctgtggtcatcacgtccattcttcacgtttttatctcccttcac

SEQ ID NO: 427012 - DNA, 352 bp, Homo Sapiens
ggttctggagcatgacaggatgaggaatactgggacaggtagagtagcaactctgtgtagagtgattttatgttaatccagtcacagccactcaagtagacagaggaaggagagaacgtggctaggtaagaattgaggttatgaggggtcactgttcaggaagctgtggatctcagatccagtgtgcagtctgaacagtgagtgttgagtgtgaggggtctgtttatccaaaagtactagtactgaatctatggaactgagattcacagtctctgaatgaaggagggatactgaatatagtttttataaggcaatataaaaaggtgtacaatattgaagtttgtattgcttc

SEQ ID NO: 427013 - DNA, 121 bp, Homo Sapiens
gctccttgtttacatatccacccttcaggactggataacagatagtcttttccgacctgaatcccattccattcccttttattatgtgtccctgtaaattctattaccgtgctcatgagtc

SEQ ID NO: 427014 - DNA, 228 bp, Homo Sapiens
ggtttctggaaagttgtagcctactggaatgaaagactcaccaaatcagtttgtggtcttcctgaggcaagtcagtcagcttcctactctgggtatcttccatggctaccagctgggcacagaaccaagcactgactcaacaacctccaggtctggttccttatcaggctttttgggaaccctacaggccatagtacattatccattctggccatttcagatttcttc

SEQ ID NO: 427015 - DNA, 343 bp, Homo Sapiens
ctgagaaggcatggcggaccctttcgtcatcgtgctgcccaggtccctgatgaccacctcctgaaagagcagcacctggccagcctccatcaagctctgtgggtattaactacccatttaactacactaagccaggtaggaaggtagtccactaactacactaaccagcccagaaaaacaaccgtattagactatactaacgtaccctgtgaaaccagccctagtcaacactaagccagtgggatactagtccattaactatactaaccagcccaggagaacgacccattaagtacactaatcagcccattatcaaccaggccattatcgacactaactatgt

SEQ ID NO: 427016 - DNA, 267 bp, Homo Sapiens
  misc_feature (103)..(103): n is a, c, g, or t
  misc_feature (149)..(149): n is a, c, g, or t
  misc_feature (160)..(160): n is a, c, g, or t
  misc_feature (210)..(210): n is a, c, g, or t
  misc_feature (226)..(226): n is a, c, g, or t
  misc_feature (235)..(235): n is a, c, g, or t
  misc_feature (245)..(245): n is a, c, g, or t
agagacagtccatagttttcagtcaaaaggctaaaggggaaagtgacccaaaaacatgaagaacacttgagatgtccttcagagtcccaattcctacccccanaactcagaggcttatgtagacataagaatagtgtgatgcaacccangctgtggccanggaggacacagtacagtgacgtcagggagaacgccctctgtctttctctnggccctttatgtcccnatcattccncttcctccangaataacggaacgggaaacgag

SEQ ID NO: 427017 - DNA, 290 bp, Homo Sapiens
cttcatggggttctggattaatttagcaagatttcccacattatagaaatcaggcagattaccttaaatcagaccttttaagagtataaatactttctctctagttgtctttatcaactctcttacttgctatcttcttcaacttgcgttactcataccacattttgtgatcatttatttctacattgagtttttcatagaaaatgattcctggaagccaggccacctcactgttgtctttgaatgacacatttccgtgctttggctctgatgtgccagagaaccccttg

SEQ ID NO: 427018 - DNA, 185 bp, Homo Sapiens
gattgccgtgctgaccacctcctctacacttaggaagtcagaggctaagtgtggagccacatctcctttgcacagactgttgagtctcttgagaaggtgagtgtccagtgtaagaaagacatatgaagtaaactcagtagcgtcacacgtctgtctctctctttacttcccactactgctgcact

SEQ ID NO: 427019 - DNA, 100 bp, Homo Sapiens
gtgactgcggacctgggggagcagagacagcacggacgtggggcaacaaacccaagtgatcaccaggagttgtggattcccactagtacaacctgtaaag

SEQ ID NO: 427020 - DNA, 154 bp, Homo Sapiens
tcctcccttgtatctttaccatattctggctttgccatcagctatttgagcaccattgtcgatcaccatatatgaggaacttctgtgagccacgtaatagggatgtgacatggtacgtgatacagtagtccatacttcttagtacagtgtcgga

SEQ ID NO: 427021 - DNA, 276 bp, Homo Sapiens
tcatcatgggtctggacttggagtgtggacctctggtgtttctctcctatcggcacctgacttctgcaaccttgggctggtcccatggcttttctgggccaccatttccccagcaaagtcagtagcaaggtaaactggatgaccttgaaaatccttctaactgggagggtctctgattctgcatcagtattttctttgccctgggtcccttctctgtgcaggcaggtggagttatgacagctactagaagcacagaggtaccttcctaatttttgt

SEQ ID NO: 427022 - DNA, 434 bp, Homo Sapiens
acatcttgggttctggagggtgggcagcaggactacctctcgtctcagtggtgtcgataagcaatttaagagccagatcctgggggtctgaaagtgatgaaaacccagcccttgcccaaataacagagcctgaggctttctattgcccagcaagttgaactcagcagggaagtgaaaaggtgtcagagagaaactcagggcataagttcccagcatttattattgtttatctgtgcatgtcagataagagtacagtggctggagccccttaccctgtccatgtgagcaagaactgcatgtaagggtgacaaaggaatgaatttccatatccattagaaaactcagctcccagatagcaaaccctgaagagagacatgcatattgattcttgaaatgaaatattttcaagctgacagtttggtagcaataaacgt

SEQ ID NO: 427023 - DNA, 444 bp, Homo Sapiens
ccatcagtggttctggaaggacattttctagggtggatctcagtgagaaatacttccttacgtggaattgctcccagtgggtggaattattattcagtgcttttaccctcggctcctgatctctgggttcaagccctttcaaatctaatactgtatatttgtaaaggtcaacctattgttttcatcctccaccggtttgtctgacctcgtttgtagattcaccatttctgttctgtgatgtcacctctggtggggatgggagtggaatgaggagggaaatgctaaaaagacaagagccccagaaagaagcaacgtatcctcgcccactcttagaaagacagcaccctcagaaacaaaatgtctggcttggcagagtcatcctgtttgtccttatttgtaaaaagaaaagaaagccaaacttttgtgattttcttaagatccagg

SEQ ID NO: 427024 - DNA, 388 bp, Homo Sapiens
ccatatgggttctggaggcatctgctacagacatgctttagttctcaccataggttctactgaataatcagaatgcatattcctcacttaaatattgttttcatctgaatgatccccaagatcctaagcacatcccccagtgctgagaggaggaggcgcgggcagaatttcagtatttgttctgagcaactctgatgagaaactcccctctcctgcggctaaggtgctttcctgactgggaagataagatgatgactatccatgaaagtctcctttcccttctctgaaaccccgtgcccctcagagcgggctaagcaagggactgccatacccaggctgccagagaatgtaggctgaaagaggaggctagcttgactcaagaccttgc

SEQ ID NO: 427025 - DNA, 104 bp, Homo Sapiens
caaggtacccttcaaaccgggtttaagattcccttctgagaatgaaaatttgaagaatcaaactgtaagagcagtaatctgtagcaatcacataacaaaaaaga

SEQ ID NO: 427026 - DNA, 448 bp, Homo Sapiens
tgacaggaatggtcatttagtaacaaggggtgaacggcggagcaccccctccttgagtctttgtactacaccttatggcggtggaatccaaatggctcaggcacaccctctgtcgttagcccatgcctttgttacttcatttaagtaatgctttctgaacaggtccaaggggtcaaaagaataggaacataaaccagacatgttctttgcagtgaagagaggataagatttatatccacattgctataatacaaggcggtggttgacgaattactaggaaaaaagaacaaagaacatcccatagaatttgggaaggcgtcagggcagatgcggcatttatttggatctgctggatgcgtgagtttggctttgtggagatccggggctgcggtgggaaaagcctcagcacgccttcggagggtgcagtgctgctgtaagcatgctggtg

SEQ ID NO: 427027 - DNA, 430 bp, Homo Sapiens
tcaggcctagcttgtctctggctccttgacgttaggaacctgctgtgctggaggggctgtggtgctcccagaccaaaggtcacaacactctgatgggaggtcccagccaaagcactttgtagggtggtggcagcaggatccatcctcatttgcatgtgttagcagcagtggcaatggaagcacactgtggtccatgctcatcagttgcagcatggtgccagcgggtgccagttctctgcaggtgcgagcctctctgtggacattcacagaagtggccatggtagtatggcatgggggtgggtggaggcccctcaagcagttgtgtgcacattcatgccagttgtggtgttagcaccggggtgggacgctgatgaccgcaggactgtgtgcaccctctgtgtgtattcatgctggtggtgatggccactca

SEQ ID NO: 427028 - DNA, 282 bp, Homo Sapiens
ggatcgcgtcagcgcgatttttctctgggtttggtaagtctgttggaacgcctagatcccgaggtctgtgagatggggtatcactggttgctatgaggattccaggaagcccaagtgaggtacggcactcctggtctggggctgccacagccgggtccccaggaggcctccctgccacctgcccctcaaactgctgagcttttcacacctctactgtctgcacccacctgctgggcccctcccctctccccgttgttcccaccaccactcacctatcccgtg

SEQ ID NO: 427029 - DNA, 260 bp, Homo Sapiens
ggcacgagagcatcatgggaggggagcaacccccacagagcggcaggggttgtcaggagggctcctggggaccctgcatctgttgaggtctgaagggggcgagggaaacatgcattctgaagccgagatagctggctgtgcgaagatctagaggagtgtggactggcctgggctcagattctagagtgcggactgggccaacaggaggggacacaggacacggtgctcgtgctggtcctggggaagagggaaatggagtc

SEQ ID NO: 427030 - DNA, 250 bp, Homo Sapiens
  misc_feature (61)..(61): n is a, c, g, or t
attactgaataaatagtgtcaggtgtgtgttaggttctaaggggctaaaataactaagatnactggactaaagtagaactattgggctcctaatgtgatagtttttccactatagacagccctcttcttccaagggtccctgccagggcttcccctaccctaaacagtgccttggtaaaaattaggaaagtcaccccttccttaagacacttgactttccaacagtgccttggtaagaattaggcgagtc

SEQ ID NO: 427031 - DNA, 351 bp, Homo Sapiens
ttatcgcccatgatggggttagagacccacagttgctcaaaagcagtttttgtttttcttgatagctggatttgggttatctctcaggaagcggttagcagtctttagggcaacctaattgcatttctttgtttacaaagcacttaacttcatccctctcaggcgcacaccagcactgtctatcactaatactggcagttctagggtgaggtgtacagttgctcttagtcagaaactcaatttgctgttttccactagattcccagatagagaaggacagttgtttcaggcaagcttaagaccctgtaacatttcttgccctttttgatttgaactcccatctccctagct

SEQ ID NO: 427032 - DNA, 352 bp, Homo Sapiens
gtcgaactgtgagtgagattttaaagagctaaagtagaattgccgttctactttgccaggtcctgggatctaatcccataaaagtggctgtatctacatatactgcccaaaagagggggcaataggcatgctttcgtagacccagctggctgcccatttgaaatctattctttccttcttcactgaagagtcctaaatttgttaggaacatcaattgctcagataaaatagataatttccaaggcacccttggagctaccagtcatgcaacagaggtctaactaatgggatgtaagtacaaacatgcaagtggagcttctggaaactactgttttgttctctttgcgtagaa

SEQ ID NO: 427033 - DNA, 272 bp, Homo Sapiens
tcaattggcttatatggtctccagcacccagctcggtgcctggtgcacgggaggccctggttaacacttgctgggatggttggtactcggagaggacttgtccccctagaatatcatcacaagcaacttcctgcccctttcctagtccagcctccctctcctggctcagcctttctgccactttttccaggaagtgtttgtagttacaaagtgttcacctgcatcatttcacttaaacctcaacaactactcctccccccctttttgtttgg

SEQ ID NO: 427034 - DNA, 238 bp, Homo Sapiens
tgtaggccagtagggcactagccatgtcattccagtattcccagggcccatcatagtggggtgctgggactagggcttagttgccctccccagtcctcatcaacacctcctagccaccacaaataaatacaccatctaagccaaaactgagtgcttgtatagctttgaaacaaatcctcagccccctgcctgttcccacttagaagggtgctgctcctaagcccctgttttatataaa

SEQ ID NO: 427035 - DNA, 314 bp, Homo Sapiens
ggaaagaactgtcatagggaagatgatttgtaaacacacagtcctgtgcagaaggatccccttcaggaggtgtctccagcatcccaaagctgtgcgcaccttctcttttcctgcctcaggccacctatgcatccagctgcagcccatccccacacctgaaatccatctcttgaatcccagccaggttatataccaccccattgccatgtcctgttctggccagaatgcatgctgttcccccaagcctcgtgggagtgaggccatgggaaacagagatgagcatgtctggacaagtctgtgatggtagtggatga

SEQ ID NO: 427036 - DNA, 190 bp, Homo Sapiens
tatggtccgggcgcaggtggacaatttgcagcctcatcagctctccctagagctttgcgctcaccctgccctattgacggcaaacaccgaaaggatgggaggagagaagagacgtatgttttatatggatgtgcatattgcagtaacttaaaatgaacaaaaatccagaaccccatgatgtccaggaacg

SEQ ID NO: 427037 - DNA, 343 bp, Homo Sapiens
tacaggcttcgtaggaggacactcgacgacggtgtatacagaaatgagatgggcacaacacgctactgtgctcccatgtttgagcttccatgtgtggcctggaattaatagggtcccactccagtaggatgcattctacagtttggggacatctgggataaatgatttcctgggattctccagcagatagcccagagggtctaggccttcctgttgtgggacggggaggggtcctgtgctggcagaaataccccctggtcccccgacccttcccgctctctcctgtcttccacattggctcaattgctcaaattcaaagaccaggagacctgctttgattacc

SEQ ID NO: 427038 - DNA, 340 bp, Homo Sapiens
aagcagacacgtaggcatgattagcaggactgtcttacactatttacaggactgctttgattttcagaccacaatcggttttcatatgactgattaaaaacatgtgccagttgaagtcacagctgcagaagaaaactggaaaaagcagtgagccttagatgttggaacttgcctctatttgcaaaaatgacctctgacttgatttatgcccttgatttcctgacagtgagggctgtgtccctgaaccacttctcctaccacaccccaccctaccaccacattggcctgactctagcaaacatcatgaggctcatcttacaattacccaaagaaaagcatg

SEQ ID NO: 427039 - DNA, 388 bp, Homo Sapiens
  misc_feature (140)..(173): n is a, c, g, or t
gactatcaggcatatttgtgatcctcagtatagcgagaagctctgggctaggaggactgacagaaaagcgaaaattagagggctcatattctaagtaattttaccttattcttctaaatgcaaaatcttcatttaaacannnnnnnnnnnnnnnnnnnnnnnnnnnnnnnnnncaaaattaaggccaacttaaaatatatgcatgcctacttagaataaccacaagcaagcatttgcttgttggcttttacagaatcctatgtccaggaaagaaactatttcctacatgcattattgaaagactaatcatttattagaccgaaagtcattaactctaattgtttcaagatttacttgcatttatgattctttcctgttatagatgcct

SEQ ID NO: 427040 - DNA, 259 bp, Homo Sapiens
cgagtatagatacatcaattaacaggtcttgggttactgcaccgtactgtcagtgtgataccgaatcactattcactaaacataatgtatcattcttaggttgtagacatgggccatcagagttaacaagaggtctgtagttgaagttctagaaatacgtaggtctttaaaataatcctacatttcaattgcccttttaacctcttataaagtcttttgagactttataagtctcaaaagtcatagttagccttttgag

SEQ ID NO: 427041 - DNA, 356 bp, Homo Sapiens
atgtggtctggacatcatgttctggaagacaatgatggcaatgtaaagccttggaagattaaatcattcattctgctatccacccattcactcaacacttatcgtaacatactggattgtgctggggcaggaattacggaagtaaaaaagtcatggtctctgtccatttagtgatggacagacatgtaaacaaccataccacaatgtgataaatgctacaagagagaaatgtacaaaaccctttggcaatgcaggtgtgaatcattctctctcaaagaatccaggaagctttcaaggaaggttacatctgggctagattttgaagcataaacagaattttggtaggtgaaaagtga

SEQ ID NO: 427042 - DNA, 349 bp, Homo Sapiens
tatgttcagcagaactgtgatttactggtaatgtcaacatctggaaaggttattagataataattaaacaccgtgcaggtcaacatctgaaagagatcaagttcccagatcaccatgcagtaggctcaacattaagttcacaggtagaaattcctaaaatgtaattgtcttgagaatctactgcaggacacggctaaagctgataaataatacaccaataccgagccgacttcaggcaccgaccttcacctaaaatgaccttctcctctgatttccagacgagtacacaatcctcatgcacactacaggcggaaaaccacaatcatggttttgcctcccccttctctga

SEQ ID NO: 427043 - DNA, 217 bp, Homo Sapiens
  misc_feature (154)..(154): n is a, c, g, or t
cttggcattcagaacttgactgtttgactgcaagaagcctagctttcagcctgtctcgcctttcagcatgccttcctcaatcagcttaatcatttccagcttttgatttaaagtaagaaacctgctactctttctttcacttgaacacttaaanggccattgtagggttattagttgacctaatttcagtattgttgcgtctcaaggaataggaagg

SEQ ID NO: 427044 - DNA, 178 bp, Homo Sapiens
gtaggatgaagcagtggtccggtaacgagaacgaacaccaccgacgtcgaacgactcactctgtggtccacaagctgcatcagttttggatcgatagcctgacttggctctaccaacactttgataagctctctggcctgtattcagttccctggggtgcagacggtctaggcggtac

SEQ ID NO: 427045 - DNA, 288 bp, Homo Sapiens
cgccacaggcttctccaccaatcacgcatttgggagcccacattggagcagtgggcctcctaaggcatcaggaacgggtcacgcagaatgagttgctgaaacatgtcacggtgaagatcttcgaggtagtgacttccagatggaccgcagtgctcgggaccgcctttgtgaggagacggcagagcatgtagaagctagtggagaagctgctcgtcctggttaacctgttcaatgcccagctgaaagcgttcagagatgaggagaaggccagagtagctgtggtggacg

SEQ ID NO: 427046 - DNA, 427 bp, Homo Sapiens
ggccgccacagtttctcggccggcgtcgtctcccattttgggaggattctcaaggttctcagatgctccaatgccacctcggctctgctagcgtggccgccgagcttgcgtgccgtgactgctgcccggacatcgcctcttctggaggctgaacaagaggtgactcgaggttgcgcgcacacataaggcgccggggctgcaggggccgagaaggacgtagcctccaaaatctggaagctcactttgcgcgcatcgagtcgttgctgggctctcacatttcacgggcccctgggtcctggctgacgggctcttctcggttgctggatactcagtattcatgggtggtgcccctgcgtgcgtaagtatttgcacagcttccgtggtggcgttcctagggtggggacagagcttgggtgcagagagggct

SEQ ID NO: 427047 - DNA, 430 bp, Homo Sapiens
cggccgcacagctctccataagtgataatttgcttctatattgagaaaggactttggagaaatatacgagacacattaactatgggcacctgggtggaaggagagggctaaattctgcacaggtgaggcacaaaaacagatgcatttcactatataactttctcaccttttaaaatttatgactatcgaaatagttcatcaacataggttcaatttatgttaaattgataagtgaaaccgacgcattgcattaaataattgtttcaaaataatgatatcagaacgtacacctttatcatcctcaaactcagttcttttccttgacattttcccccctgggtaaaatcaataaatgaacattaaatgctaccatggaggacatgagtgtgtgaaacacgcagttcttctttacgaagtcgatatttgggat

SEQ ID NO: 427048 - DNA, 305 bp, Homo Sapiens
  misc_feature (49)..(106): n is a, c, g, or t
  misc_feature (198)..(249): n is a, c, g, or t
ggtcttagtttaggttgactagcctgagcaatatggtaagatcctgtcnnnnnnnnnnnnnnnnnnnnnnnnnnnnnnnnnnnnnnnnnnnnnnnnnnnnnnnnnnctgtatggactaaacaccagaatgggaaatgacagagaaaagagccaggacacttgtatgtcagtcaatataaagtatctaatctgaataannnnnnnnnnnnnnnnnnnnnnnnnnnnnnnnnnnnnnnnnnnnnnnnnnnnaacagctaggggtcttaatgtcttaatgacagttgggtcattaaatcctataaggg

SEQ ID NO: 427049 - DNA, 234 bp, Homo Sapiens
cagtccattcctaaacacgcccccgccctactctagggccctcctcatagcggaggccgagcctgcctctgcatcttcagccctcacggcccccctcaaaccagactctccactcccgtgagcccttctgtgcggcctctgggcttccaggtacttctttctgcccggcatggcttccttctctgccagcatggaatgttcctcttcactattcacaatgtccaacatcactct

SEQ ID NO: 427050 - DNA, 300 bp, Homo Sapiens
tccccatcagtttctcaagacagcaggtagaagcggtccgtcctcctcgaacaactcaatcagctctacgtgacgttcctgtgtcccttggactggttcagcatatcctacctcccttaaaaccctgacttccgaatgtggcctggctgcttctcaattatcttgatggcttactcctagctggtgatcaggttgatcgcatggtctgtcacttcaggcatgaagctgcgctcccctcagcacactcttctctgcagcgtggttgaccgttttcaataccttgccgcgagagagctcgtg

SEQ ID NO: 427051 - DNA, 350 bp, Homo Sapiens
catccttcactttcagccaatgcttttgcttcctactgcactaagactggacaaaatcaaatagaaaacttctgtcaatttttcccacccacatctgtctgcctccacctttgtgccacacatcctgcctttcaccaatactatgactaaagattgagctcctaagcccacggcttccgtttgtgcatgagataacatcttcctgctccctagccaaagaacgtcacccagcagttcccctcctatcttctgcatcatcagctttccctctaccagagcattccatcagtatacaaacagctgttattcattccatattttaaaaagggggagaggggcgtgtgggcatg

SEQ ID NO: 427052 - DNA, 389 bp, Homo Sapiens
  misc_feature (43)..(153): n is a, c, g, or t
gagtagctgggattacaggcgcccgccacactacccagctaannnnnnnnnnnnnnnnnnnnnnnnnnnnnnnnnnnnnnnnnnnnnnnnnnnnnnnnnnnnnnnnnnnnnnnnnnnnnnnnnnnnnnnnnnnnnnnnnnnnnnnnnnnnnnngagtgagccactatgcccggccttcattggattctttctagggaaagtcatcttgtagagcagagcatgcagagtgctatttcttttttatgtttctcttgaggcagaagactggtgtttacctaccatttcatgggtcgtagggccggcggtgaccattatgtggtgtgtgtacagcgtcgtacaggcttggccttgaatgatctcttatggttagaaaagacaattaaaaacaa

SEQ ID NO: 427053 - DNA, 352 bp, Homo Sapiens
tctagatccaagagaacaaagaaagaggctgtgacagtctaatatatggttccccagtttcagccttggagtgtaccatccgtctgttagcaaagctctaagaccaaatgggctcccactccagggaacgtcccccttcccacaggggcgggggagatggagtccggggctgtgccgccctctggtagcagcacgtgaaggcgcacaggaggcctcaatgttctccggggccctgggatagccatgcagagaggcggaggtcctttatgtgccagagtaggctgctgtcgagggactgcggttctgctcgaggtgtgccgtatcggtgtatagaagcagaacgtcacatcag

SEQ ID NO: 427054 - DNA, 149 bp, Homo Sapiens
cggccacagctttctcggctgcacatggttctcgaggcggcccagggtaggtgtgcatgtcgtgcgtccatctcgccgtgcccagcctgtgagccgtcgttctactgttgtcaaggtcggcgatggagccggatcaggtcggccagcct

SEQ ID NO: 427055 - DNA, 173 bp, Homo Sapiens
gatgcttgtgagtctctctacgagtatcccccccgcgtactctggcgtatgatatctgtgtggtttgcacacttgagtcgttattcatcctctctgcccccccctttcctcatctctcatgtaacgatgttaccacttacagtttgtgcttcagtgagacgctgtggcggtcg

SEQ ID NO: 427056 - DNA, 212 bp, Homo Sapiens
atttctccggcgctacagcttctgcctacacgtgagccatactgacatctttcagctcacctcccaccttcagctgctgtgtctaggccttcgcagcgctgtgccttggtgcctgacacagtattcactatcttccccagcatctcaattccctctccattcttgctttagctggaaggtcccttctgacagcctgccgctaaaaagatggg

SEQ ID NO: 427057 - DNA, 103 bp, Homo Sapiens
tgagccaccggagcttgctaaaatggagttttattactcctttgaaaaggaatactagatcaagatgactgagagattgactcgtggatttggcgaggggccg

SEQ ID NO: 427058 - DNA, 158 bp, Homo Sapiens
caggagtcctaactcctattattactttccctttactgacaaaaaaacttaggttccaaacggagtagataatcattgagagagtcttcttagacaccctccataacaagggaaaggacaaacttcttagcccatcatttgattctagctgcttagtt

SEQ ID NO: 427059 - DNA, 154 bp, Homo Sapiens
ggcttaagcttctcggactcacaccccaggtcagaatagtcaggtggctactctaggactaatctctcttcctatctcctggtaaaatggttttagcagacatttgtccctggcagctgttagtttcccctctcatcactatattaagacatcc

SEQ ID NO: 427060 - DNA, 406 bp, Homo Sapiens
ggaccggccgcacagcttctcctctagaagttgtctgccagtatagccaccatgcctgcctggattactgcaagagaccagtctccctgatcccagtgtcttcctcctcatgcaaagtggtgtgtgtttctcaagggtaaccttgctccctgtcactcacatacacagcttcttggcctgacacacaagacactgtgtgatctgccctctgcccctccacttgccttattccctgccgtgagtcctcagagacactaacccagctgcatgaaactcccccagacccttgaccttgggagtcagtcaaccttttgaggttctttgaagctttcatgaaaacctgactttgtaagcgtggtgattatgctgctcggtcaggggcgaggaatcatgcctgatatggctg

SEQ ID NO: 427061 - DNA, 444 bp, Homo Sapiens
gtccactgtcacactcccacactgctcctcattggaagaacccatggataaaggaacccctccttaaactgtccaacctcccttagaaattgtttattacagtcatgttctgtataactcctgttgttacaggatcgcagtctggcctccttctctaactatcagaacaggttgtttcacatttttgaaacccattttcctcatttgttaaatatcactcagtgaattttactgtcctagtgagctatttaaaaagttaaggcacaaattaatagtatatccataaacagcattcccctaaaatatccccgtctagagttactacttagaatcaggacactgacaagttagtctgtgaaaagaatggcatttctccacatgtagaagaatgtcctaagaaataagaacctttaaaattccaatctgcacctggcttagaactcc

SEQ ID NO: 427062 - DNA, 104 bp, Homo Sapiens
taccggctgcacagcttctcggacccatctctgctagggacaccaactgatcaggatatttgtttcagatactatagttttcagttccaaaatttttatttctt

SEQ ID NO: 427063 - DNA, 110 bp, Homo Sapiens
ggcgcacagttctctccacttctggccccgttctctaatccttcattccttggttccagagggtaaatgtagatcgatatgtcacctctggctccaaaggtctctgaagg

SEQ ID NO: 427064 - DNA, 168 bp, Homo Sapiens
acctgtttcatgccagagctgagaaactgtgatgaattaagcaatcttcaatcatgtctctcaaccaccttttcttgataggaattcagcaaactttcctcctactcctgacagtataactccaaaaggagttaaaagtttggtgtctctggaggcagagaaatctta

SEQ ID NO: 427065 - DNA, 160 bp, Homo Sapiens
ggcgtacagttctccctctctggacatgtgtctttgaaataaatctagtttcagcacacacaaaaaagacctgtttcccagtgctagtcccagaagattctatgtgtaattacaacaggatcccaaatccaagccctctgagtaacagtccattcatttc

SEQ ID NO: 427066 - DNA, 300 bp, Homo Sapiens
agcgcacagctctctctttagtaatatgtaaattccatgaaaataatgaatggatcccaaaggatctttagattaacaggaaacagctaacacttttgaatttggttattcaagaggaccattcgtgtgagcattttaagattctgaagactagggatatgattctttctaaaaccatgtttaattgtttttgcatttagtttaacatttagcagtcattgatatcttcaatgacaaacatttgaaaagtcaccactccaaagactgagaagaaaactgaagagattctgactgggttct

SEQ ID NO: 427067 - DNA, 231 bp, Homo Sapiens
caagttccatagtggataattgtctgttgtagagtgaggctgtgtattgttagggagatttttgcattatggaacttatctgtgggttatagggcatgtcctggtgtgagtatgagcaatacagggcaagtcagtttcttgtaggttcactgtaggcattgtgaggaatatgtgtagtactctggtacatgactggctcttcaggcaactttaggtgttacggtaatattg

SEQ ID NO: 427068 - DNA, 206 bp, Homo Sapiens
caccgtccccattcttatagtcctcccagaggtcacttactcatcaccatacccccaatgactcgagttgccaatctccagttgcacttccacatcagttgatagagtgactggacactgtatgactcaacaaagagggcaaaacccacctccaatggcgtggcattgagagccctctgtgtctgtgccccacctgtttctgtctc

SEQ ID NO: 427069 - DNA, 184 bp, Homo Sapiens
tgcgccgcactcgtgctcggccgcacagcttctccaggccctgccgatgcactcagtcccccaggactcaggatcatagggctagcggctcccagggcacgggccccaaggcagtagcagttcctgacctgacccacccctacttgtcactgaggcccagtggtaccattgctatggggtgaca

SEQ ID NO: 427070 - DNA, 346 bp, Homo Sapiens
tccgcgtaagcttctccggcgcacagcttctccggcccggcgccacagcttctcggcatgcccccacctggatagcgcaggtggttggcctctgtcactcaaccaaagggaactgcttccagccttttccctctttccccaactcctcacactagacagaaggaatgttccccagggccaattgtgccaggtgactctcttccttagaattctcccatgcagagccacctccattccctctcgtccagtagtttttctcaccttgataattttgcatgtgtgaccccttgctctggaaaaggcccttaccccctgccagccttgtcggtctgatgcccggagtcct

SEQ ID NO: 427071 - DNA, 142 bp, Homo Sapiens
ctatacatcagccaatctgaactactttcaattccctcaagtccataatctcctacctctccactttcagccttcacacatgcctctctaatacaacaagctagtgcctgcctgcattctctgctcatctgtgccatacatg

SEQ ID NO: 427072 - DNA, 284 bp, Homo Sapiens
  misc_feature (38)..(38): n is a, c, g, or t
caagcttctctctgggtgtcacctgtagggacctcaanattagaacgtcagctcctcccagagtcttcagctgcacgaccctcaatctttaacatcagctcctctccgggtctgcagcttggtgacttctctgaatagaccttcgagggcactggggggtgattgttggagggcttggggagctcaggcagcacttgtgtgggaacgtggctgttacaggaactgcagaaactgggactgggttcctggggaaaggattgggggtgttggaggcgctggcaggg

SEQ ID NO: 427073 - DNA, 356 bp, Homo Sapiens
ccggcgtcacagcttctctccacaggcaggcacttagaagatggctggcacgtttatcccttgaacaggtggcagttatatgattttctgtttctttaataattccttaagcttatttttatcttttatgcacagtttgtaagatgacggttcaaatctagcgtttgaagaactgtatgaaacaggtttggaagggaacagacggcccacgtcacagggagagataggcgggttcccagactagctgacagttagggccatgtgcctccctgagataccagagtggcccacgttgctggccgtgccaaatgctatcctacagcatcggcacctgctgggggaagcaggggggaaat

SEQ ID NO: 427074 - DNA, 145 bp, Homo Sapiens
ttcacacatgcctgcacttgctctccctgcagccagcatccctcacggctaccatttccccctggccagtgaagaagcactaagaggcagacgctacaaccatggcggcaagaggcctggtccaaagacaagagttcaggtcccc

SEQ ID NO: 427075 - DNA, 325 bp, Homo Sapiens
gtacttggaagttgaatgggggaggagactacactttcagaaatctgagatggctgagtcacacaggttcgcaaactgatatgggacctagccatgcctccctccacagagttggtatggtaagggtgtggtgtatttccctaccagacctctgcccaagggagaccagcgaccccaaagacataagaacaacagtagcaacatgacgggcatagtgccagtgattggaggtggacgacttaagtcccagagtagacctggcgagggtgtcatctgtctccccttcaaaccgcatgacacagctacaaacaccagagaagctgtg

SEQ ID NO: 427076 - DNA, 338 bp, Homo Sapiens
gatggtctggtttgcgtgctgtctcccacgtaaccaaaagcatctcaagggcaggtctgcactcccaggttatcattcactcagtgactcagtgaatataaatacatttctgtccaaatctttgcccaagttttcctacaaatgaaggagcaatctccttccattcttctttataaaccaattctcaaatcctcccataaaactaccccccaaaaacactttcaaggatgaatcatgtacatttctgtcccatattttcctgctgtttcctgtgacgaactgtaggcttcaggtatgggcagggccaatgctccctctgtaatgcatataccaggacc

SEQ ID NO: 427077 - DNA, 308 bp, Homo Sapiens
tatttttgtatttttagtagagacagcatttcgccatgctagccaggttggtcttgaactcctgacctcaagtgatctactcgccttgcccctcccaaagtgctgcgatgacgggcgtgagccactgcgcccggccgatttttttcttaataggcttctgccttgtctaacttcccagagtgaacatggctagctttcagaactgaatgagacctccgtgaatgctatttcacaggcaggagggtgtgaatgtatttgcagggagctggtgggggctcagcccgcaggacacagcctgaggatgggga

SEQ ID NO: 427078 - DNA, 205 bp, Homo Sapiens
acagcttctctatctagtgtgtccttcgttacgctgatgcaagtaggcatttttatatagcacaagaatatataggttttaatcgcacgcaagtgtcatctctgacgacgctctcttttcagttcctcctgcaccacacttgctctcatcatctgctacaggggagggacctgctagccccgtgcctaaattagcaccagcagga

SEQ ID NO: 427079 - DNA, 321 bp, Homo Sapiens
tgtgcgtcctcgctctctggtctctggcactatcacaaccatcacggagtaaggagtcattgtttccctcctgcctatatatagacatggtctctgtattaaccggattactgaccaaaatgagcctatgccgggacaagaaggctatcaagccacaagagaggtgctctgaagtgaactcataagagctggatggcactgacagaaaactctggcttctttggctgaccagggttcagcgtgcatttctaggtacccaattacatccattggatgcatcttttggagcgaaagttattgccttattaagcaaacctagga

SEQ ID NO: 427080 - DNA, 340 bp, Homo Sapiens
agagatcacagattctttcctacatgacgtctctaagtaagcactcaaaggcaaacatgcctttccaaagccttcttgccttgggtcgtagccagtgttctctgtaatctcttccactaacgttcacagagtcctaaactgatctgtggactgctggtcattgcctccaatccctctgtcatttctaaatcaacatgtttaagccaaactcatcctcctatctcctatagaccatcggcctctcctgcaggtcacctcatgcctgtgaactatttcccccattcttccaggctttaaactttaaccacccacttcccaggcgggtcgggaaaatgagaca

SEQ ID NO: 427081 - DNA, 325 bp, Homo Sapiens
ttctcggccgccacagttctcgtcaacctagtccactctgatgcaagcagacctgtaacagcgcgcctggcagcctccatgccacactcaattctgctcccccatcatcagcctccctctatttctgagcttcctggtccccatatacactgtggcctccacatctaccctatgaagctcccacagggaaaaagagggaagcagccagagggttgcttgacctagagcctccaaaatgaaccccaggtgtggagtcagtaggagattgcatgtaaactgagtcctgcaggcctcctaggcttcccattgcctgggaatgtctcaa

SEQ ID NO: 427082 - DNA, 399 bp, Homo Sapiens
tcttagaggataccccggccgcccttctccggccgccacagtcttctcccagtacctcaccagctcgtgggaactggtgcttgtagggaaccttccgcatccagcgagccgggaatgagcggacgctcttcctcttcgataagctgctgctcatcacgaacaatagagatgacacgtttacgtatgatgctcacatcctgtttggcaacctcatgcttctggaggtgattcctatagagccgctctggcttcagcgtcttctactacaagtagtccctagtctgcagtgcacagtccaggccctatcccggctctgacgaacgcctcttggctctgcatctggtgagactgcttctggtgaaccatgtatcctagatttctgcttcggcccagcgtgct

SEQ ID NO: 427083 - DNA, 368 bp, Homo Sapiens
agtctctacagatcccccggccgccacagctactcctttaagatacatcctgaatatgctttatctcacaggcacattttctatatttttatcacataatatactgtaatttccaaaagtataattctatatcacttaagttgaacaacagaacaatgcttcatatagtttatgaagttcaagtatgcaaagaatatacactagctttcttttatagcggtgctatcaatacagagaggcttgggggtcagcaaagggtaataggattggtaataccaattattatagtactcgctgcaacttcggcataggtgtgttggctctacaccatgttatcccaatcatctttgggaattcctatgcatgtt

SEQ ID NO: 427084 - DNA, 254 bp, Homo Sapiens
cagcacgctgctcagacgtgctgggacttacaggccttaggcatctgattcttgccttttgacaattgttagactgagttacaggcggtctgtctgggacccacatcctatattttgaactgatgaggcccagcaggctcagaaatgggaaggcgctgtgcttggttccccatctgtctggctctttcatgtaacaagttctcactggtgctgtgagcaacttgtaaataggccagactgctggtctctggaat

SEQ ID NO: 427085 - DNA, 431 bp, Homo Sapiens
tctctacagatccccgcccgccacagcttctgtagctcgactctagtgtggctgcggaattggtattctctgctttgcacgtccagagttacagctgatcctcgtcccgagctctgcgcagctagtggctgtgtgtatccatgctacccttctgggcttggcgtattgaaaatagagcccctgtgctggggtggctgctgaccctgggaggagcggtgcactccactggtcgctctgcctgtcgatcatggggctattctgcagcagcttctgctcacagggtagtgcgtggcggtcgggagtcacaccttacactcctaattcctaggcagtgcatctgcactaattccaggctgctctgtcgtctgggctccgggcttgtgagaagctgtggcggtcggtgaagcttggcggcttgtgtcccagctcta

SEQ ID NO: 427086 - DNA, 175 bp, Homo Sapiens
ctctacaggatcccccggcgcgccacaggttctcccatatagttttcttgagatacagccattcctgttttgtttacgattgtctgtgccggctctcatgcaacatacgcggatattgtgtctgtgtctgaagctactcactctctagcccttcacagagaaagtgtgccaccct

SEQ ID NO: 427087 - DNA, 133 bp, Homo Sapiens
gactagtcctatctccagaactcaacaagaaccactagagctacctctcattcttgtctggaagccaccaaagttgtccacaccaggcccaccagctacaccagaactataaggttttacacgattgtgtgca

SEQ ID NO: 427088 - DNA, 437 bp, Homo Sapiens
agaggatccccctgccaaagagccactcagtccactgagaaacaggatgtgccgttatctgcacactgaggtttatttttaccttgtccctggtgagtccccagagacaaggagaaaacactctgggagggagttaagagccttttgcttatccttgaaggaaagcagtctctgaggattagtgagggtggtggtgagggtaggtagggggaggagagtcagaggaatcagagttatttggactgcattttttccttgcctgattaaatcttactgacattggcactttgtgtcactaaaagaacacagccctggatgtggggccaggcaccagagggttggcggcagagtctggggctggcatggctgctgggctgcttggctctgaggacccaccgtgtatttggaacctgacttgtcaggcgctgaggacctgg

SEQ ID NO: 427089 - DNA, 420 bp, Homo Sapiens
  misc_feature (103)..(103): n is a, c, g, or t
tcggccggacttgggctgtagcgagtgtgatctgctgtcctagaactgtactagtcattgagaacataaagacataattttggctacattgggctttatatantaatgaacataccaaaaaattagtttagtaaattgcctgggcctcacgtctatgtagattttagagggacataaaagaaagactgaccaatcctatttagaaagtggagagcatcagaacggactcaaagaggtgatctttgagctgcatctgagcaacacttttagcactgagcatcaagcagccttgagaaccactggcaattgaaaaaaacctaccttagcatttccaagaacacctgatgttgatctcagtttcaaactcctggcttatattattcctagaactccttctcctatacaagtgccacccttcct

SEQ ID NO: 427090 - DNA, 306 bp, Homo Sapiens
aagcctcctgattatggcgagatacagctcctagttgcatagcgacattgtgtacagtgagctacaacgttttacgtctcgtgttgtacgactgtctagtgattagttctgtctgaattccactgccggtcaggccaccttcggtgaacagaaagatgaatcctagggctcagagcactgcatcagcatcatttcatattgctcccgtgatgctgtggcgcatgtccgccgaatagcttggacgcctgtggggattgcgactgatttctttgctagcggaggtgatatatgctcatgtgtctacgt

SEQ ID NO: 427091 - DNA, 129 bp, Homo Sapiens
tcccaagagatggctcgttgcttcatccagccaaagtggtcgaagtggttctggcctctttggtggtgttcgtggcggtcgtttcggtgggtactgccccttcggtcgtgcagtggacttctgtgctcg

SEQ ID NO: 427092 - DNA, 161 bp, Homo Sapiens
gtcccggacatgggctgtagccaacaaaaaacagcaacacctttctaggaatatgctcaaagaaacttatacatgagcacttgattcatgaaatggtgtaccttgtttcacaaaacattgcaacttgtttcaccattcattggataatgtgatagatttac

SEQ ID NO: 427093 - DNA, 526 bp, Homo Sapiens
ggacatgggctgtagcctcttgtttcagtttatttacctacacttgatttttccttgtcctgagtgtgctcagtatctcatcttatcctttaagtaagatatatttaagtaagctgcttttaaatcctttctaaaaaataagatagagcataaatataaaagtatttctgtatctagccgttaacagcataatccttctgtcctccattgacaggtagaataactttgatgcttgtctcctccctaccctactttttgatacagtatgattttatgacctatttttctaggatcaacaaaacttggggagaattaacaccacctgaccagccatttggtgaccatcttgagctccgagtgctgtgttaatgacatgcataggcgggtcacaaactgtaacaaatccaccagctgaacacatgctgtaataagaataccagacaacttctccaaattttcccagacaaaatcaaccttgggaaccttgataccagacatcagcatgctctctagtttcaaaaccaga

SEQ ID NO: 427094 - DNA, 449 bp, Homo Sapiens
  misc_feature (40)..(40): n is a, c, g, or t
tgaccggacatgggctgtagctaaacaaggcattcttttntagcatgcagcaagactctgctctgacatttagacatgtatttgatagagcatccaggaatctacaccacggtggatggcagaaatgctttaagcctcatatgttttcaaaatggcagttactgcattcctcgcctagccaatgttcacttcataagtattcccaaggaacatccaattctgagtagcatggcttcctgatgtagcctttgatgttactaccccagagagctgaatgaattggcttgttacatccaagctttatttaacatttgccagttgaatgcagagaatgaagattcctgtgcggatttaggaggtggacatgttaagttccaccctgacctttttttcgaccttgagtttataagaatgagagaagatgtgtatgcaaaagaacaatgagtatc

SEQ ID NO: 427095 - DNA, 365 bp, Homo Sapiens
  misc_feature (90)..(248): n is a, c, g, or t
ggaccgacatgggctgtagcagcagctgaaataagacacacctatacttgtctttgtgtgttcactttccctttaggtctttaatacctnnnnnnnnnnnnnnnnnnnnnnnnnnnnnnnnnnnnnnnnnnnnnnnnnnnnnnnnnnnnnnnnnnnnnnnnnnnnnnnnnnnnnnnnnnnnnnnnnnnnnnnnnnnnnnnnnnnnnnnnnnnnnnnnnnnnnnnnnnnnnnnnnnnnnnnnnnnnnnncattctaaagaattgatagaggacttgcagtgttctttaatgactgagccctctagctttgccatttcactgtctctaggacagcaagatttttggaagtggggtgggtatcatgct

SEQ ID NO: 427096 - DNA, 146 bp, Homo Sapiens
gactgtgagatcatagtctttaaagtatttgattatttcagaacattggatatcattatgggagtaaaaaaagtaaaccacacttcagtacagaagaaccagaataaatcaatgcttactaatacacagaaagtgtgcatctcctt

SEQ ID NO: 427097 - DNA, 441 bp, Homo Sapiens
tgaccggacatgggctgtagcctcaacaaagatcttctgtgtgtttacctctccctgtctcgcaccccaaggtatttttagtgctgttgacatcagttaaaagtaagcaccgacggacgcctcactgtgagtcatggagaagcacgcacagagcaggtcttggtggatgccggtgactggagagagtgtagagggtgaagggaagatggcgctaccattgcctgtgctgaggggagcgcctgaggtctttatgcatttgtgtgtttactctcttgtggcttacttgtgagctccaggtaaatcatgctggcttggtatccctcagcaactcagagctgaggtgtgttcagccacatcttccttccaagcatgttcctcccaggacttggttttgaattcatgtttcacgagctttgtgactgtaacttatagaactttcat

SEQ ID NO: 427098 - DNA, 467 bp, Homo Sapiens
  misc_feature (98)..(183): n is a, c, g, or t
  misc_feature (443)..(443): n is a, c, g, or t
tggaccggatggctgtagctaataggaacatgaaaggagaaactagaaaggatccaccccgtgatatgcacggaccggccagccacccatgtggacgnnnnnnnnnnnnnnnnnnnnnnnnnnnnnnnnnnnnnnnnnnnnnnnnnnnnnnnnnnnnnnnnnnnnnnnnnnnnnnnnnnnnnngtgtagccgcatccctcagctgccgcttgcagtctaaggatccccttagcaggcagccacctttctcctgggttggggagtggtgggactgaacccccaccccttgtgcccctgcacccgcctcctgggcactccatctactccagcctcctgcctgtgtctgccatgctttgttctctagttgtttccttgccacctaccagtctcctcagctacaaggaagtttcagagaaatcacttttcttcttcagaacctccanaccatcccacccatcagactttcc

SEQ ID NO: 427099 - DNA, 469 bp, Homo Sapiens
  misc_feature (186)..(260): n is a, c, g, or t
tgacggacatgggctgtagcccagttttgattctttggatttgaattcctattcccagtagattctctcctgcctaaatgattagtgtattggttcctaaactttactgcatattggagtcatttggaaatcagttctgattcctggctcccatccctagacattgtgttataattctgttgtgtnnnnnnnnnnnnnnnnnnnnnnnnnnnnnnnnnnnnnnnnnnnnnnnnnnnnnnnnnnnnnnnnnnnnnnnnnnnctggttagtggaattttcaagtgggctttgttatctcagaagacatccctccccttacccttggtggagacagctgatgttcttctcctgggagactgcagtggagctggggagtaaggggagagaaggggagtagggcaggacagagtgaagataagctaggaggcccctgcaggtggagacttaaccagtatcacagtcaggtgatg

SEQ ID NO: 427100 - DNA, 160 bp, Homo Sapiens
ggtcaggtatagtgcagttgggtaggatgatacgctttgaaaagaacccgggtgatgcccatttcttcctccttaggaacacatctataggttggtaatcaccagcctgtatgtactattgattcccaatacatctatcccttcctgagcttgtttctgt

SEQ ID NO: 427101 - DNA, 309 bp, Homo Sapiens
gaccggacattgggctgtgcgcagcaacatggtgtagtatagaaaacactggcctggaaatcaggtgacttggaaatcaccattgagttgtacggtcccttcacttctctgggcctggttttgtcagcaataaagggtggggattagactggaagatctttaatattcagctttaatactctgattgtatgagttttaagcttcatattggactgatatgacttttgtggctgtaatgaaatccagaaaagagagcttataccactgtgtttgtagattagtagtagcttgaatactattaatgcttcc

SEQ ID NO: 427102 - DNA, 344 bp, Homo Sapiens
cctacttaatcaaggagaatatgggcttggagaggtctcatttccaggctaatgtcatagccaataaatggtggggttgcgttttggggccaccaccgcctgaccccaaggatccagcaataccgagcacagctgcctccctgatgactaaccctcaactctccccagctctgtgctccacttgtactcagctgtgtgcagttccctgaacaaacattccccaacgcccccacaacttggaccatattctcccctggccttggagggcctcccctttcttggtctggctgacaaccaaccatcttccaggactcagcccaaaatccctgctcccgaggaagccc

SEQ ID NO: 427103 - DNA, 413 bp, Homo Sapiens
gaccggactaatgggctgtagccagactctgaaccacttactcttaacaaacagcctagagcctgcccacccaaaatacagcactcacacctccctccaccgtcagctatgggaatgatggaaagggaagtagggtgggccaggaaggaatcaaaggaccaactttccaggccttgggaaacagatgaaaaggatgcaggtcatctcaggagggttgagagtagaacaccaggtccctgtgattaaagggtcgaaaacctagcagtgcacaaaaatcaaaacatcttggttattttcctgtctcccactactgacatttttgtctcttacatcattttatccaggggtacaatgggggcgtgggggcagggtggggatctgacttatgggaaactgtgagggtgagtggaatc

SEQ ID NO: 427104 - DNA, 168 bp, Homo Sapiens
ccagcatggtacctgacagattaggccactgagaaaaaatggacactttctttcgatttatctatttcgtcttttgagagcatctttccataacgaaataatctgacatctctgcgaacaggtggcaatctgacattcaccgggtatttatattctttgtgcaacaga

SEQ ID NO: 427105 - DNA, 318 bp, Homo Sapiens
  misc_feature (285)..(285): n is a, c, g, or t
gcgctgtactgcattatcacattcaaatcacacctactatattttcgctgcttaatgatactttcaatctttgcaattctgattatctctacatagctgcttctaattatcactaattcactttcaccacccctactcacctatttactgtttctttctcctaacacattttttaaaatggtgttagggctatgcgactaaatacagattcatttagataagctattatgtccaatcatcgaatggcttagcattattcattttcttctttgaacatcttacttnatgtgttttactatgtgctactggcccattgtg

SEQ ID NO: 427106 - DNA, 135 bp, Homo Sapiens
cacaatgcgcctgtagctcatcattagctattccaatatggatcgctgctagtccacacattactgctactattagtatagaatgaataattcacttcctctagtcccagttgccagcgctttcaggtgctctat

SEQ ID NO: 427107 - DNA, 203 bp, Homo Sapiens
ctcttgcacgagcagtcagacctattccacgtggttaagtgcttctactaccattaaagcgaggcactgaagctagagcttattagtcctctgtctctccagaggaccaagaaatacctattgacacaggccacttcagatgtgtacagcaaattctatagtgcttcttagcccagcaggtctttaccttccccttgagagtt

SEQ ID NO: 427108 - DNA, 414 bp, Homo Sapiens
gcatagctgaatttaccctggtagcgcaaaccctggcgaggtcaagagcagcctggggctgaacaataattactgcaagagtctccacggagacagcgcccgtaccatcagcatctcccattatggatgggagaacagaggccccgagaagttaagctgcctggccaaggtcacacagaggcagagctggattcaacgcaggcagattggctccacagtctgtcccaccgccccaccctccaaagtcccccggtaacagtccagttcttcaccaagcggtgaagaactgggcctgttgaggtaaacatgaggaagttctaggcctgtagagacaagtcggagaaaggagctggggctaaagaggctgttgtaaggcttgagattggcctacataggcgtctagaaggccggagc

SEQ ID NO: 427109 - DNA, 262 bp, Homo Sapiens
cgcacgatgcgcgcctgctagcattcgtttgtccggtgtctatttgctacattgagattcgcccgggggaatagcgttatgtcgattcagagatgatatgtggtttgcgatgagtgggatgaagaacgagaggacgtccatgtttaattatgcctttttgtgttgaggtgatgatggacgtgtagatttcctgttgtgaaattgttttaggtcatagcttttctagtctggttaggttctcccgcggagtcccgcgcgccgg

SEQ ID NO: 427110 - DNA, 124 bp, Homo Sapiens
cttcggtagggcccttcagtgaagtacgattggggcgttggggagctgtgttataccctcaaacttctgtggacgtctgtcactcgttactaatatttggagcgcagctgcgggatgccgtgcc

SEQ ID NO: 427111 - DNA, 373 bp, Homo Sapiens
actttcttgtctctagtccaggaggcagctggcgcggcggacacggctggtgaggagaagcatggcagtgaggtctgacctcctgggatagaccttagccctcataccccagcacaaggagagtacggccgttcccagaggaactccaagcgactcatgatggggatctacggaggacgaggggatcctctttgcttgggccgcccagcgtgccggccacgacccatccctgttgccctttggtctgtaatactccggtgaggtccctcagtggagaacacgtccaccacctccatggcccccgggctggcattgctgactactggagtgagccggcagcttgtcctccggctggtgatgaccttgtccactc

SEQ ID NO: 427112 - DNA, 334 bp, Homo Sapiens
tgttctctatacatttcccagaccccattgccaaatttcctgttagggctctgccaatgtgataccctaaaggaacccttaaagataggagagacttcattcctgtattccagttgtcacatgatctcagctgcagacatctggcttctactagctagttctgcactcaacatcaggtttgccacacttctcagagatttttgcagcagtctgactacccacttggcagtctgagatcagtcatcccttgctttcccaccctcagggccatgcctttcctcagaggtataagcaccatgataccttgagggagcttctcccataaaagtcagta

SEQ ID NO: 427113 - DNA, 197 bp, Homo Sapiens
tccccgcgtacaattgggcctgtaggcgaagattaggttgtaaaggaaaccaagccacaaacttcccttggtttttgttcagcgttagctggacaggaagagtctaggatttttgctctgactagttggtagaaacgtgtcttcttcttctgtgctgtgtttttaccaatgttgatagtgttctccacagacacagc

SEQ ID NO: 427114 - DNA, 307 bp, Homo Sapiens
  misc_feature (51)..(158): n is a, c, g, or t
gcggtcatctacaacgatctttgatggcagtcagccaaggccaggtaatgnnnnnnnnnnnnnnnnnnnnnnnnnnnnnnnnnnnnnnnnnnnnnnnnnnnnnnnnnnnnnnnnnnnnnnnnnnnnnnnnnnnnnnnnnnnnnnnnnnnnnnnnnnnnggtgaagtgagaatgaagtcactcagcatagtgcccatacaacatagatccttcacaaatgtcaccttacggaaaattgcatagttacaagtgagaagagtggaagtgactgggtcaccccgaaacgagccatgatactggtctctgaa

SEQ ID NO: 427115 - DNA, 193 bp, Homo Sapiens
  misc_feature (129)..(129): n is a, c, g, or t
gagagttgggcgtctcaaagcagtgcacgtgcaccagcatctgtggaaactcctgttccctggaccactgagggatagaattccctggcagggtaatgtatttatacttgaatcaatgatgaaagtggngaaaggtagatggcatggaaagggtgggagaaaattgaatgaggaaatactcatcttatctact

SEQ ID NO: 427116 - DNA, 105 bp, Homo Sapiens
attggaatgcaggggagtcgaaatctgaaaaagcagaatgtgaaggaagaataggttgaaagaaacctgttgtaatgtcattctgagagactcagccaggtcaat

SEQ ID NO: 427117 - DNA, 469 bp, Homo Sapiens
  misc_feature (446)..(446): n is a, c, g, or t
ttgggagtgaaccttgtttcccttccttcctctgtgatcttccttcctctttaatgttgagtagatggttttttaattaatatcccaggtcagtggtctgtttaaattccaggcaaccaagcaaaaagacccatatagctttccttactaaaatggctttctgctgctgtttgattaaataatagagaagttgaagggtgtgctgatgatgaaaagcatctccctgagccttcagaaggaaccgagcatacaccccctccccccggagagcctccctcccctcagcttcagctggagtgcatttgcttctgttgagctgcaagttcctgcaaagcagaaacattcagatgattttctttggcgagttttgaaagcgctgatgactgagctgatcttttggatcatgaacttcattttgagggggttactctttcccttgttactgngctgtgaaatgatcaaagtgctt

SEQ ID NO: 427118 - DNA, 284 bp, Homo Sapiens
tggtaactcagagtttgcaatgatgggagccaacataaagcaagcaggttctcatcacagaaccaggggaagttttaaaaattgggggaatcaagatagggatgagggaagggctggcacggggatggcagaccagaagcctgtgagggagactgcagaatcctagaatctctgtgcacccaggcaactccctctggcccaccctggcagaaggcatgagcttaacaagaaaccctggacttgaggccccgcggcacacttgatagagggggcgaaggccagtg

SEQ ID NO: 427119 - DNA, 364 bp, Homo Sapiens
aggaaaactagaaatgtgaggcaactcagaaaacttgcttaaacatcactgagggcgaggggatgcaaaaatcgggcaaaggcttcaggggctggaaattggcctggccagcagtgcagtgcatgccttgagtttcaagacagcatctttctctgcctcttccataataacatggtaatagaatagccagtctttcagctttcccaggattgggcagatgaagctggggtgaaagaacacagtaagcatctctgtcacggggctactagatgacatagggaagtggaatctgaaagaccttaaatccatttctgctttgtctgtctcactctgcagctaagggcaaatcttctcaacctacttg

SEQ ID NO: 427120 - DNA, 258 bp, Homo Sapiens
gttagaagggagttgagaagttatgtcatcttccactgcagcagataccccttttttagtacttggagatcccccgaatcacagcatttctaaatcagccctggattccacaagtgaagcagcggaggaaccaggaggtcagcggtgtcactcaaatctgtggcaatcaagtgggagttctcaaaaggctatcaaaggaagggggttatgataaggaaaggctcaagacctgcctcagaaggagtgagcagggaagag

SEQ ID NO: 427121 - DNA, 350 bp, Homo Sapiens
acagacactgtctctgcatgttggaatttagtctgtaaagtctgaatggtgatgatctggaccagcatagtgtggaaggtactggtctgtgttctggatgatttaggttaccatgccatctccagataaatggagtattgctgtttagggccctgacttatacacttggtcatttccacctctggtctacagttgcctaccccgcaatccatatgcaattctgcatatggctttattttctaggaggtggagggaggaaaagaggtgaggatttgcgtgaagacaagctagtgttggtccaggttttttctgctttctcaattatcctataatctttgaaaacacattgg

SEQ ID NO: 427122 - DNA, 408 bp, Homo Sapiens
tctgtcaagtgctgttcaatgagatatccaaggccatgggcagagctgagctcagagctcagagttcctggagtgtccacacctctctcctttgtgcttcttgcagctcctgtaccccttaccctggggcagccagtatgaatgcatgaggcacatgtggggactctgcttctgagttcggatactgcatgccatcaccattatccctgaatgttccagatgagaacactgagatccagagctgccgcccctcaaggcctctaggcagagaggtggagtggaggctaagtctgttacccttcagccacccagcactgctatgccaatgggtttaccatttcagtgcctcctcactggtctaagtgacagacactgacattcacacattctcagccagggtgggtggca

SEQ ID NO: 427123 - DNA, 395 bp, Homo Sapiens
acaagcgagccacagtctgcttaggtcccacaactggtaccaatggcactggggccaagccccacgacttctattcccaggtcactgctcaccattcctttaactcctccactatgtcctcaccttggcttacgtgtttgtacatattgtcaatcctccatgcagattcaaatttgacttcatatacttccactcatcttggcagagaaaatggactttatagtgattgttttgatttctttctttgcgttgtaacttaggttttattatagcatatccagtaggacaaaagtcacattgaaagactattgtgagtgaaatccagtctttgattgccttgcaaactaaagtgtacaattacaggtttgaagacctttcgatcggtcggccagggg

SEQ ID NO: 427124 - DNA, 253 bp, Homo Sapiens
  misc_feature (107)..(136): n is a, c, g, or t
  misc_feature (153)..(178): n is a, c, g, or t
aaacaaaaatactaagcttactaaaagccatggaaatgaaatgcaaatgacaataagaacttcgggaactgtcttaaaagagggaaagatgtggctagaagataccnnnnnnnnnnnnnnnnnnnnnnnnnnnnnngggaccccgggggctcnnnnnnnnnnnnnnnnnnnnnnnnnngccgcgcattttctgagggatgtggcgccagccgttgaactcttttccgttgttttcaaaaaacggggctctttt

SEQ ID NO: 427125 - DNA, 459 bp, Homo Sapiens
gctgactgttcctttgctgtttgtctactttttcccattttgtgctgagactcatctttccagcacaaacaccagggtgaggaattggaattttagtgctggaagtctccagaactatgatctagtgctcattccctctgatcccattgccctgacattatctgatgcttccacagctccttgtacagggaggtgtggagttgggagagcagcagcctgtggtacagggctgcccacagggaaggaagaagacatggcggggacatggcctgactcccgatgtgctccttcctgtagggtcttccacatggctgggctccctcccgtcccagcacacatcctgggtccatgtgaccttgagcttcacaaggtcaaatctgtgcagatccaaatggtgtgtgatctaattttcttcctcaagaagccttgcacaatctggcccctgcatgcttctctgag

SEQ ID NO: 427126 - DNA, 274 bp, Homo Sapiens
ccctaccacaaagatcagaatctaccaatcagctacattaatctaaattaattcaacactctcaagtttactaagctcagaatatggcagagagcattggttgtccccagtactgacctcagcttcttatatagcacagagcacatggccaccaagctagattgcttcgcagtcttataacttctggatgattaggatttagcagaagtggaatgttcaacatagcggtcttgcctttaaaaggaagcagtgtgctccctgtatccgtacagac

SEQ ID NO: 427127 - DNA, 381 bp, Homo Sapiens
agaggggtcagaaggtgagggggacgcgagggggagtgccccaggcagggggcgccacggctgcaagcaccacagtcggggaagccctcacgcagttcccatggtctccacgcactcaaaaacttgggggacctcagggagactccagcctctaccgcgtgccagtggtttcccgcctctgtgccaggcctacttctctggaccatacgctcctcatgggcagcaatggctacttgggctttgccagccggcaccctggggtttagcccggttcagagctaggcacacggcaggctcgaagggagaccacacacccacagaaaacctccctctgagaagcgccccatgcctcaccgcagacagcgggcaggcagagggggt

SEQ ID NO: 427128 - DNA, 367 bp, Homo Sapiens
gaagctgatgatctggatgagcatttatctgtacaatttgggttttgggaaaagtcactctactcctaagagatgaaatatatgggaaatccttagcaggtaatttatttattattaacttattgtaggtgtattccctctaataaaactacaattttctactatattcctacctatggattggaatctattaggagaaaatcttctgtttgtagaacaagccagtgcaagtcagctcttggatctgtttctctgcctggacaccacaatgaaatggtaattggccacatttgcaattgtccagcagtagccaggtcattgagaagttatgtgacatgtggcctgattgatgtgcacaggaagctga

SEQ ID NO: 427129 - DNA, 283 bp, Homo Sapiens
cgaacaggacacgcacgtgtgaactcatcatacccattctacagaaaagggatcaatgagaaactccaggagaggcaaagctctgataatgcctgcatcaagctacagctggagagtacaggatctggctcttctgtggagctctatgcacaggcccaacacaaacactgggctgcctaagcaaagcccctgaatcaccaacccagaacagattctgattttatcagttgagttgttgcagccggggttaccatcgtgacaatgtcccataggtgccacagac

SEQ ID NO: 427130 - DNA, 369 bp, Homo Sapiens
cagtgatgcagctggactgtttcgcagctttccagagacctccttggaagcacagacttccatgggttgaagagagtttgtgtcacaattccagtccctagccctggccctgtgtgaagtagtaacaccgccctgccagtaggatatagctgctgaggaggtaagagttttaaaaaattcataccccaaaataattatttttactcttgctgtgaagttagataccaaagagtagaatgtggtggtagaatcaagagagtcaacccaacatcactgaaaagattctgaaggtttgtatccagctgaatatccaaaacaggatgttgcttaagcatgggtaaaatgcatctggtgtatgttttagacagc

SEQ ID NO: 427131 - DNA, 262 bp, Homo Sapiens
cgaacaggacacgcgcgtagaaatgaaactcaatccatacaaaaccattttgtattatgaactacacttattattctaattatttatattcatagttttgcttgggagagttgcgtgcctaacatctaatccatacagaaagcaccctggagcctttgtactatagaaatggctgtcagaaaactaagcttaacctctgggcatatcaagtttcttgataacacacatctctttgaaaaaaatatgacttatattgaccaaa

SEQ ID NO: 427132 - DNA, 386 bp, Homo Sapiens
cgaacaggacacgcaagaacacttagcagcatacctgaatttgactagtgaccttcagggtacattcagtactcataaaatctacttacacccttttacctgtagaaaagacactgagacttgcttgacttaccattagcaaaaacttccctgcaattgaggcaattctttttcctcctagaagaaacaccatctggaaaatagcccaagctaggataaagtttttacagcagagtcaagttatacagtctaataactagaaatttctaggtacttctcgcagagaatgaaagtgggaaggagttttctaacactggggctttctttcccttgtctttacaaaagacaaaagctggcagtcagtcagtagcactagagtattcctt

SEQ ID NO: 427133 - DNA, 331 bp, Homo Sapiens
gaatacaacacactggaattggcacattgagtgcacctttgactgcattgtactgtttcgtggtttaaacctgtctttcctttgcccttgctgtttgactactatgattgagctgccaccttttcacacaatattggaattttttgtttgaatctctgtttaccctactggactgtgaatcttgagggaagaaaccatatcttattgatcatatcaataagtgcctgtacgtagtaggcacattatgttcatttttaagttgaacaaaattggaactaatttgttgaaattatagtcctccaacaaggactcacttgaatacatcagataa

SEQ ID NO: 427134 - DNA, 275 bp, Homo Sapiens
cgaacagaacaagcagggttttgttccgaatgtctgacgtcatgccaccagagagaaacgaacgattgctacaatcctgctggagatatccaagggggtcgtcctggtcaccaatatcaagcccaagagcagcagtctcattccaagccatgggctctgttctgatgagagagctgtagagctaaactgaaagccgtttcttgaactctggtgaggtgacctaagacatacggtactaaccagcacatgcataagtcgacacaccttcattccta

SEQ ID NO: 427135 - DNA, 355 bp, Homo Sapiens
tggtggtgcggaaaaccaaagaacccatccttggtatatgatatgctgtgattacctttgagacaagggaatctcaacaatgtctcatgcctgataggccgcataagacatcctataataatagaatgttaaaggaacaatgttccttacagaccacgtaattccaaatcaactttttacaaagaaggaaatttgggtccagaatgacatggttgtttccacgtgtggatcctgcctctccccatccaatgccccttctattaatacgttatcatgtcagctatcccagatttcatggtcatgctatttcagctcatgacaggcacagaatataggtacccacctgaagcagagg

SEQ ID NO: 427136 - DNA, 286 bp, Homo Sapiens
ctctaaaatgttcaggttaggtcacccaacgttccaacttatgggttttggaaaaagcagatggctttaacaggcgaatatcattcactttaggtaggtattcttgtgtatctatttggcagacaagtagagaaacatttcaggcataaatacagttgttaacatttgggattatagtcttaacctttcctcactgattagaattccgtagtgacacatttgagattagctctttaacaaagtcacttcttgttagaagtgactttgttaaagaaaataagttagc

SEQ ID NO: 427137 - DNA, 622 bp, Homo Sapiens
agaaccgggctgtggtgactccctttatcttggggtggtagggaaagccaggatggagctgggttttgtcaccgtcctaaaatgttatgaattcctccaagaaaatcaccaaggcccttaaactatggaaatccctaaaacccacaacaggacactgaacccctagggtattccataacctttcttagccttccagagtccctcaggacctagagttgacccaggctgtgtgttaagcaccatggcagccttgttggcttagctgaggtttgctatccagagccctactccaggtcaattctgaaatattcttgtttggtacatggcaacctgcatccaaataccaatgataagagctcatcttcagactcctctgggaaagcagatcaaaaagaaaccagaatactccgatagaatcaaaggatgattactgatgcttactgatataattctgaaaacaatgggcaccaaaaaagggctatatcaaaaaacagccagaaagcccagctgagtccttaggtcacactggagtagaagggaggtatgggcctgggtacagttctgagggggagctcagcccacaggacgaggcctgtagtccaaaagcaccaaggactaaaca

SEQ ID NO: 427138 - DNA, 220 bp, Homo Sapiens
  misc_feature (81)..(163): n is a, c, g, or t
cgaaaggacaagcacaaataaatatgagttcacatggattcaatcaccatgatacctgtacagaagtcatacttctgttcnnnnnnnnnnnnnnnnnnnnnnnnnnnnnnnnnnnnnnnnnnnnnnnnnnnnnnnnnnnnnnnnnnnnnnnnnnnnnnnnnnncagaacacaattactatgaaatggatgaaaaatcatttcacaagtgcatgccaccta

SEQ ID NO: 427139 - DNA, 466 bp, Homo Sapiens
  misc_feature (237)..(285): n is a, c, g, or t
gacctccaaattacagtaaattacagtactaagattttacttgaactttctaaagcattcgccattttaaattatttaacttttatactcctccttcccttttgtgctgtttccttcctggcgctcctaaatatctgtccattctttggacctcttccaaattttcagataattataatagtgtgcgaatgatgcaaaggtaatgtgccgtgggagagaacagaagagagaaacctnnnnnnnnnnnnnnnnnnnnnnnnnnnnnnnnnnnnnnnnnnnnnnnnnagatgcttcagtagatttacagtgagggcaaaagaaaacggttttctttaggagtatggagggattatataggatgtacaataaataccctaagtacttcaaatcagttcagatctttaaaatcctatttttccttcagttctcaacttcaatatcacttactctgggagtcattccctac

SEQ ID NO: 427140 - DNA, 387 bp, Homo Sapiens
agaatacactttgtactgcagtgttccttcagcacctttactggcaaagcttaatattctgcattctgtcaaaggagaaatgttcataagggccagttccagtatcacaaagcaagacagagaaggatagatttggaagaaggaagtactgcattgataacagaagggttagctgaggtagatcacacggattctcggatattctctaaatctttaccctacggaaaatgatttctagtgcatattagatttgttaattcaggaagtagatgtaaattacatattcctgggcacagattgcaaattaaccatcctcatactgtgcagccagtataaattcctgggtcttgccagcattgcttcagagaatggactcagcttgcttgt

SEQ ID NO: 427141 - DNA, 396 bp, Homo Sapiens
  misc_feature (107)..(209): n is a, c, g, or t
ggaatgaatcctggctctttcaccttctaggcttgcaacttcagagaagtcccttaccctccctttcaacatctataaagtggggaaaatcgtagcaactactcaannnnnnnnnnnnnnnnnnnnnnnnnnnnnnnnnnnnnnnnnnnnnnnnnnnnnnnnnnnnnnnnnnnnnnnnnnnnnnnnnnnnnnnnnnnnnnnnnnnnnnnattattaggtataatttagcatctctcagtaatcggtcatgattacctccttgttccaacttcaacttgatacgaagactttaattagaatattcctgcctgatttgtctggagatccagcttatggtcagtagtccttcttaaaagttagtccttaattcaggtttatggaacaagccctttcagg

SEQ ID NO: 427142 - DNA, 312 bp, Homo Sapiens
agcagaccagtcacaagcaaaggtcatggcaacagttttgggatgctcaaggcattttgcttattgactttcgggagggccaaagataataaaatctgcttattatgagcgtgtttttgagaaagccaaaattttagcagaaaaatgcccaagaaaactgcgccagagtcctttcccactatgacaatcctcctgctgattactcacataacataaggaaaattctgcaaaagtttggatggaaaatcactaggcattcccctcatagacccaatttggctgtttctgacttccttttgttttgtaatcttt

SEQ ID NO: 427143 - DNA, 176 bp, Homo Sapiens
tcgccccagggaagccaggtgggaaagcagacagagacagacacagggaagccagcagagagagcagacagagagacatacacagggaagccaggtagaccccgcagtcagaaacatacacaggggagcaagagggaagagcagccagacagacagacacagggaagccaggggaa

SEQ ID NO: 427144 - DNA, 335 bp, Homo Sapiens
  misc_feature (63)..(141): n is a, c, g, or t
tggctctacaaggtggaccagccataccaattagatggcaagcttcttgaggatagggccaannnnnnnnnnnnnnnnnnnnnnnnnnnnnnnnnnnnnnnnnnnnnnnnnnnnnnnnnnnnnnnnnnnnnnnnnnnnnnngcatcccacattgcttctgtcccagtgtatggtataagtaacaagtgattaataaatactgactcagtgacctgtttatgacagaaaatctcaaattatagttcatgtaaatgaaaaggagtgaaaactgtgcttggtcccatcctataaacaaaatgtgacagtgttatgatttgttaaaagcaatgccacca

SEQ ID NO: 427145 - DNA, 144 bp, Homo Sapiens
ggtcggtacccggggccagagactggattaagtggccctaggagacgggacgtgctcttattctcgtgatctgatactgctgatttctgacccttggtctgatcagaatcctcctttatacagcttttatgaagttattgtcca

SEQ ID NO: 427146 - DNA, 612 bp, Homo Sapiens
gcggcagagactggatgaggtggggtgcccacccagtggggcttgtggtcaaggagcagagatggtggtaagcagaatcgcagtgtggtatagcaaatggagagcctgccagtgtcactgcgaggtggggacggtggttgctgctgtggagctcctctcccaggcctcccatcctttccctcagctgactcggctgttccctatggtggccactgaaggcagatcatgtcttcatgtgcctcaatgccagcctgagcattgacctggaaaaggtgcttgacagacatttattctgggctccataaaggaccagtgttgccatgataggtggaggagaggaggaagcccagagtgtgacttgccccacacacccctggatatcacagtcctgcccctgcccattttggaaagaaccacatggagagggctcacttccatggacctgaaatcgtgtgtttgactttgtcatcagctgcagagcaaggagggaggcagtttacatctggatgcctgcattcaccttgcccagagatgctgactgctgaggatgcacctcagggctttacagatgctccccttcttgccatgtccagtctctggggccgggggatc

SEQ ID NO: 427147 - DNA, 569 bp, Homo Sapiens
gactggagccggctgtgcttttcacactgtgcgtgttgactcaggattactgtctatggctaacttctagtgtgtcttttgttgaagtctgcagaacagcctcaaccagcaccagcttttgaaggacttacaaaacttgtgttcttctgattctgggatttttgcctgaaatgcctcgtatatttttggctaggtgtcgttagcacttgtgttacggcatttggagctctgtatttttgtgatgtgctagctgtgaggatgtttaaaattagattcctagaaatcaggttataggagctctcggccacgcttcatgggttatgttttgacacctcatagtggatcccgttgcggtggctattcttagtatttgtggaacacctgactcttgatgctaggagaatgttatttgttttctttgtaagcctaaagtctaatgaccttgtagagtctttatacccatctcttataaatcagctttaatatgcttgaaaaagtcctcattgtgcccttgaaaagcaggtgcacattttaaaagtcatccttttaaaatccttttctccagtctc

SEQ ID NO: 427148 - DNA, 564 bp, Homo Sapiens
tccaagactggaaggaggccggaggtgtacatagagcattagaagatgaggttagaaaggttggaacagcgaggcagtggcagatcacaggagagaagggttctcagtggatgcagggccgtactgtgcaccaatgggatattttgaaaaactgtgaggaattttggcattactatgattggggtggtggtaatgttagtgggcaggcaacatttatgttaaaagaatagccatgctcaggacccttccacccagcaaagtattttttctacaatcaatgtgacttttaaatgccctgctgctcattcatggagatgtaacactttataaccttttatgctaacttctaaactccactaatggcaaaataggttatgggatcaactcttcattaaacaagtaaacattctggataaatatatttgatcatatttggggaatctttgctaatactttttcaagtatttttctgcctgatagtttctctctttgacttctaaaagtccaatttcatgtaagttagatgtcttgacattatttcatgggtcactgatgttctgttta

SEQ ID NO: 427149 - DNA, 265 bp, Homo Sapiens
gcctgctgaaacctgttgggcttgtatgctttcatttgtgacggcacctctgctctgggatgaggactgtaccccacgccaccccaattattactgagagagcacacccctattaccttgacatacatcctccagcccttttggctgcactgtcttgcctggccatcctctccttcttgagtctcctatctctgaacacctgtcctgtccagtcttccaccttgaaaaaactttgaccctgtagagtcctctgggaacactcccc

SEQ ID NO: 427150 - DNA, 155 bp, Homo Sapiens
tcatggctgccgtgaggtatggcttggccactttaagctccacatggacctgctgacgggccagctgatcctggagtgcccgaacctccttctagcggatgtgactcaagaaccggatcgcctcctacagcgactcaatgttactatccgcatgc

SEQ ID NO: 427151 - DNA, 126 bp, Homo Sapiens
tgcttctccctcaccagcaccaaagcccactcagaaacctccgaaggatcattccaccagagagtggattgaggttaacatggcctctctgggttccgcctgatttcccattataggacttgaggg

SEQ ID NO: 427152 - DNA, 375 bp, Homo Sapiens
cctcctctctaagaactgtcaaatgtacagaaggaagcaagacaaaacaagatatctgcctatatttcaacacggatgtagaaacctgcctgtgtttacagaagcacttcagtttgaaacaaatgtaaacttaagattgcttcagagtacacagcgggtgggtgcatgcccgggtaactaccatatgctctgaaaagtgagatgtcaaaaaggtgtgacagcaggcatgcccttaggtgctcaaataaggaagctggcatgtgtgttactctcagccttctcaaaatggcccccagtggttctcttggggcagctattcatttaggagagggagggtcttctgatgtgggcgaaacttaagaacatgaatggcag

SEQ ID NO: 427153 - DNA, 639 bp, Homo Sapiens
tgaaggttttctaaaaaggaaataggattggattggtcagggctagtactccgatttgtgaggcagtggtgtctttgtaggcttggctgttaatgaggtggtttatactctacaaggcatgtgaaattatttgagggagagaggagaatgtgtttttctaacccttactatgtcctaaacacagagggtaatcaataaccaactgttgaggatgtagtttttcttaacactaaatcattccctgagagaagtccgtaagcttgactgattttaactgcctgtgagttggaaatctttgataaatgctctgagggataggaagtcagtctgggatgatacagggcgggatctcaccatcgggagagtggtcccattcgataatgggaaaaactcatgttggatggaatggaaattttcccagtcaagataccctcatgcccagagccaggagaaactttagaccaacctccgtcggcttcagtttctccttcctcagtttcttgatgctcctccccgagccccctcccctatcacgtatgttttgcgggttgttctgttgtttgtctttgaaaagattgatttatacatttgtacagaaaatcccagagccttttcctcttaatgctataaagttgctat

SEQ ID NO: 427154 - DNA, 139 bp, Homo Sapiens
cttcagcaggtaagttggcaataattttagataaaaataatggttccggatcattctgtttggcaacggtataaattttcccgccattttcttccaccgtccaagtacggattgatccaaaaggttttgcataatccag

SEQ ID NO: 427155 - DNA, 217 bp, Homo Sapiens
ctcaaagaactattcttacctgttttctccaatcaactgatttattatctcctgtaaccatatcatcataacttaaccagagggaacggtgagctttttgacctgttcctcattggtagctcgcccttcaagatatatggaaggacattctggaaaaccttttgttatgaaaattgtgtcctgttatttgaacatatttcagtggagggcattgtct

SEQ ID NO: 427156 - DNA, 102 bp, Homo Sapiens
ctccagtcctagtgctaccatggttctcagacaccatcagtagggttacagaggcaccaaggggtatcagtgccctccagagttttagttagaggaaggtga

SEQ ID NO: 427157 - DNA, 149 bp, Homo Sapiens
ctttagctcggtaccctttctctctgaagtggagtgaaggaaggagaaccagaagctaaagtatgtctggtgttggatgaagttgagattggatgcctggtcaatgagtgtgcctggcgttggatgagttgagattggatgcctggtgg

SEQ ID NO: 427158 - DNA, 225 bp, Homo Sapiens
aaattcgactcgtaccccaataacactttcgcagctttcattggaaaaatcggattctgcaccattttcgcaaatagatgttatggtgtaacaataggttccgtattctaatccgctgtcggtgtagctcatctcggtgatgccgcttgcaattagaacattattgcgatagatattgtaactcatatctcttgtctctgaaacttttgttgatggaatcttaag

SEQ ID NO: 427159 - DNA, 157 bp, Homo Sapiens
cagtgagacagtacagtgagatagtcacattcacacattgctaccagcagtgcaaattggtaaaaatttgctggagagcaatataaaaatagcattaaaatcaagacattttaaagtctatacttttgagcctagtaattccaattctagaaaatta

SEQ ID NO: 427160 - DNA, 441 bp, Homo Sapiens
tcacaccacccagtttgaattagaagcttctccttatactctgatagcacctcatgcttattttaactaccacattcctcatgctataattatctgtttatatgtctctaccattagaccaaaagctccttgaaggcaaagctatatcttatttgtttttatttctccagcttttagcatagtgcctaccacataacaggggccaagtaaatttttttcctgagccaatgaatgacctggctcaaaggtcatctttctcctctacaaaacctctcattgtcctaataattgtacggactctcccttcacagagtccctttctcgggacattgatgactttcttcccagtattatgtgtgcatcttctcaaggccaaaacctccttaggggcaggtcttctgctgtccctagcacagggtcttgctcacaggggagcattct

SEQ ID NO: 427161 - DNA, 290 bp, Homo Sapiens
gtgattctcctagagatgcatgagtccttaatgaaagctgccctcactattcttgaaaaagccacttgcatttatagataacagagggtaaactttaaacacaactgcataaagtggcaaggaactggcctgctgtcagctcactgaatttggattccatgcaagcaggatgtgtaaaggaggtaaactccaaaagtgtttttcctcccttaataaggtctattcttcttggtgtcaaggtatgaaaagcagtatttcatatcaacattcatgatgaggctagtgggctg

SEQ ID NO: 427162 - DNA, 307 bp, Homo Sapiens
gtggccgactccctgctcaccctcccaactgcgtcagccatagggaactggggtggggtcccagcacccctgggcaggcagttccataggggattacctccagctgtctttcacagagagacagccaagctacagatcaatcaaccccattcataatcaaagaaaatgaatcaaaccagatgtcagtagtcacccatgaaattaatcaaggcataagacactagcactctgctccttggtggggatgcaatgagatgtgtgcccccttgatgggagagtaagttaatgataccgcctctccaatctt

SEQ ID NO: 427163 - DNA, 314 bp, Homo Sapiens
cagcgccactagcgctatttaccaaccataacctatttggggccatgctctgagcccacagtctttctgtaaccttaggatgagtatgggcttctgtacccaactggggcttgggtcttcattctgaaggctcccgcgaatacacgtcaaataaatgtgcgtgcctttatgcctgctcatcaatttgcctcatggcagtgattttcagcaaaccttcagagggccaagcggaagctctgccttggcccctacagaaggttcaggtagtggggacttcccagccttctccagatgttctcccactaccctgtcat

SEQ ID NO: 427164 - DNA, 169 bp, Homo Sapiens
aggtcaatcttcctgacacattttgctggttcttcctcatgatccaaacattaaaggaccccagggcgtaggtcttagacctctattcttctctatctctactcacttctttttttgatgttgaggtgggtggtgcagtgtttattcagtgatcttcctactttctttc

SEQ ID NO: 427165 - DNA, 122 bp, Homo Sapiens
tgtttccaaaacagcactccatttttcctcaatgaataaatggacatctagaagtaaaaattccagttcactgagaatgtgccgttcttctgcggatgacttttaggttttaaagagatctc

SEQ ID NO: 427166 - DNA, 224 bp, Homo Sapiens
tcaattgactcgtacccacactttccttcctcggtgcatgtccccattgtgcctgggtagctggaattcctaaagaagaaactaattgacatagctgccttcaagagcccaggtggggacaatagcttgtagcacatacacacgagtttgtatcctacaagaacgtgttttgaaaacaaattgtatgtggcagatcgcttattaaggctattttgcggggggag

SEQ ID NO: 427167 - DNA, 376 bp, Homo Sapiens
caccatgccttccttctctcagagtgcaatcttgttcttcaatttccaggcccctatctgctcacctctgtgcattcatcaccttctgccctcattatttgctcatatgacctatctgaacccatgctggctttccttacgcagagacaccttatcacttcatctctgcttcccctccaagcccccagggcctgaagcagtgattaccagcaagtatgccctaagctgagcttggggaagctccttctaagaagttattacatgaaaatgcttggctttccatattctaaaccatactggtcaaggaggtctaacggttgctatcccctagaatagcaaaggaaaacccccattcacaggctctgtctaaacagca

SEQ ID NO: 427168 - DNA, 290 bp, Homo Sapiens
cgaggttaactgatcatctcattataaactgaaaggacttcaggacggggtagtgtgagactctggctctgcaggaggctgaggccccaggagacatgaagttgatttaggtgcattctgtgtttatatgagagggagtgggctctgcagaggatgggttaagggaactagttgaaggctggggtggccaaagtaagcaactcagatatgtgagggtgtgtggtgcgttcacatctgatttatttacgattgccaaggcacagcagggggcactgctaagagaatttgca

SEQ ID NO: 427169 - DNA, 483 bp, Homo Sapiens
gttgcctgagatacattattagataatttattctccatgtatagctttttccaaaaaaaaggatttggggtggcgtggcctggtccagtaaatatatgttaaaccagaatggttcagaatctatgggagttagtcaaggtacaggtgggtaaaaggattcttcgcagggaaatttctgaggatgaggcatcccagggagctctggacagccaggggcagctgcagaaagacagaacttatggtacctcttccacgatgtgcacagagaagacttgtgacccttatacagaacacactctttgcctcttgcccttgtgacagtggacactccagaacttgcatgatatgtgcccaggcttaccgatgcagatgtgctatgaggaagtggctaagagcatgggccccggacccaggagaatcctggctatgtctattcctagtgcagtaatggccttgggaaagttgctcaacgtttttaatcct

SEQ ID NO: 427170 - DNA, 199 bp, Homo Sapiens
gacatctgtggatattttgcttcgaaagctgcacctccatatctttctcccactcttggatagcaaaaccaaggattaagtgattactgcaaattgtcttctgtgcattgcttagcagtccctcctctgccattttataagcatctttctccccacatgctggactcaaacgatatgagtccatcaccaagtccctgag

SEQ ID NO: 427171 - DNA, 129 bp, Homo Sapiens
catccttccctcactcaccctgtaccagctgcaagggcaccttgcaagctttcaaacacccaagcacgttgttgcctcagggactttgcatgactttttctctgtcccaacagtctttatttttattta

SEQ ID NO: 427172 - DNA, 203 bp, Homo Sapiens
caaaagtaaaatgggaaaataaatcatggtgaatttacataacagagcactatatagcgatgagaatgaatgatctacaaccacagccaacgctgggtgaatctcacaaacgcaatgttaaaggggaaatccagctagtaaaatgaacgtgctagaagattccgttcgatggggttagactcagaatagtcacccttggtggg

SEQ ID NO: 427173 - DNA, 346 bp, Homo Sapiens
aggccatagggggcttctataagctctgacatcctcctggtgtgcagatggccatgtgcgtgtgttggctgcgtgtgtgcccaggaaggacttcagaaggcaataataaccccccttggactgaccttgaggctctgtgtgagcagaacgtgaaagctgaggcagagttagaaactgcctggctgggtgttgaaagtttgcatggatccagagcctctcagcaaagagtagatgtgttggttccaggaggttaaggaaatctgtctaatcattagctaaccactaagttaactgcgcaaagaattcagtggccacacatgatgtagaatacagacttggcataatt

SEQ ID NO: 427174 - DNA, 184 bp, Homo Sapiens
actcggaccccagtggcggctgcccaaagaggagaagtgacgaccgtcactaacaattactatctcacgttgtacgagggccaacgggttatcccgccggccctcctcctcttgtcaagggcgttctttgcgtcgcactgctcggatggctgctgctacagctcgccaaccgatgagggtaaga

SEQ ID NO: 427175 - DNA, 111 bp, Homo Sapiens
acagacgccatctcttcagagatgctcctacctcacccctgtctaaaatggcctcacccctgtcattttctgtctcttaatctgcattaattttcttcagtgcaacttaag

SEQ ID NO: 427176 - DNA, 147 bp, Homo Sapiens
actgttacttttaactgggtgtggattttgaaatactgaggcacctgcaggcagcccaggtaaaactaaattagtaggcattttagagctcagtagagagagaggacatcaagatacgtattaggagttctcagcatataggaatag

SEQ ID NO: 427177 - DNA, 188 bp, Homo Sapiens
tatctgggattcgaatcagccctctccagctccaagcacactgggatccttgccgttggaggttgctgttggcttctgcccgcgctgtgtattgagatctgcaaccaagcatgggagcttacgaaggcacctggtggtttctaggtaggaaaacagtgtggatgccagatgtggtgcctcacacacaa

SEQ ID NO: 427178 - DNA, 391 bp, Homo Sapiens
cactagcctcattgatgaaggaaacaaattctgcagagcagaggggacttatccaagaattcttcagtaatcaatctgagaatatgacttttgagacagctcactggtgagattttaacttcaattcagtttgacaaacatattatgcaactactacaaaccgggcactttggccaatactaagaaaccaagaggattcttatcactggaaacaaaataattaactgaaaatgtaattaatcgtactaaaaaggggtttccacctttaaaatacatgaccagcagaagcataaaatcattaccaatgcccattaagttggcactgtagattatacatcagttcctacatctaatatgttcttcccaagtaacatcagtggagcctctgatc

SEQ ID NO: 427179 - DNA, 205 bp, Homo Sapiens
tcatgaacgccatccgtgctggcacccgattcgagttttgctattcggagtcctcgacgatgcccacgactcttaccgagtcccatcacctgcctacccaccctttggaggacttcgccttcttaactcgcctgcgtcggcacggcattccggtgggtctgttctatcgggacgtctactggaagttcccgctctacggtgaggg

SEQ ID NO: 427180 - DNA, 222 bp, Homo Sapiens
tgatttattattctaaatattttggtggcatttcaacggtatttaccgcatcttcaccaggaattgggtccatcttaagaaaccactttctttgcttatccattagaagcaaatcttcatctggtctaattttatcttgggactggggaaattcaatcacatcttttggctttacttctaattctaggtttcttgctatggctaccacattccggggtactt

SEQ ID NO: 427181 - DNA, 341 bp, Homo Sapiens
agttttggagtgtgaggtcaaaggcgttttgagcaacttgtaagaaaccatttttaaggcggaagtcgggaattttgttttttatatgttgaatttgaaatccttattaaacatccaagtggagaggctggatagacaattaaatttagaccctgaggttcgggaaggaagtccaatgggctagagatataaatttgagagttgtcaacctaaaataataaaaaaaggtaggaatctagtttaaaggaagtttattcaagcataaaggttgaagatggctacctgggagcatagattcaagttaccctaaatatacactctgattagcagcggttatgagt

SEQ ID NO: 427182 - DNA, 107 bp, Homo Sapiens
gagccacggaaagagctgtaagtatgggatgccaccaacacacaggttcttttctttggggagcaatactttcgaggtaaccccctttcctttctggtgcaatccat

SEQ ID NO: 427183 - DNA, 224 bp, Homo Sapiens
ttcgagctcggcaccccagcgcactagcctcattttgtaacatgctggctgcagcccactaaatagatcttgcattcccactaacaggctgtggcccacaatgtgaaaaactgctcccactgcgccttgggggtctagtggatgcaggaaggtcacctggatcctctcaagtccagccctacagtggccccagggctcacagaataagccctcagcgtagcttc

SEQ ID NO: 427184 - DNA, 415 bp, Homo Sapiens
acatccccatggggagtaaagagtggatagcggaggccagtttggagcttggcccctatgcaaacactgggcacacaggcagttaagaaagaactaaacattgtgtcctacgtccctggcactggggggctctgttagtagctacccaggcaggaatccccaattctcaagctttggagaagttaggatgtagaggctaaatcatactcaattcagaaaaacactggtagggatacactgacctagttcaatagctacagtagaggggtaggaaaggttgacagtcagatcacataggacaaaaaccagaatcaaattacaaggctcaattaggcaacaaagacatattttgtagatcacacattaacagtaagtaaagttctatagactggagtttccagccccataccctccc

SEQ ID NO: 427185 - DNA, 162 bp, Homo Sapiens
atcattcctgattccaaaatgcatcctcttttagggataggtgaccataatattataatgtcatctcacttaggcagagtcatcttccttaaatgagtcaactcatggaagacaaacaccaggtgggcatgtctcagtgctcagtggtgattcaaaattttg

SEQ ID NO: 427186 - DNA, 422 bp, Homo Sapiens
cacgccactagcctcatagggtcataacgagaacaaaatgagtggatgcatatagcattaagcctaatacttggctcatataatgaacccagtaaatggttgctattattactataacaactacttctattactgttggtgctactattactattactactcttactactaaaacaagtactgttattcctcctcctgccagcaccatggggattacacaattcagctgaggacaggatgatgaatcactggcgtctcagtcctctcccacgaatggtactggagtgcttgaatttgccagcacttttgtaaggagctgggagcaaaggctgagaagacacagtcactgcccagacacagtcactgccctcatagactgtgaatctagtgtccaacaaaggcatgactcaacaaacaaccag

SEQ ID NO: 427187 - DNA, 463 bp, Homo Sapiens
ctgagctgaagcctcgtccctggtgtggcctcccaggctgccctgagcagacccctcaggcagaaacctgtcatgcaccagctctccctccccctcacttccttctccctagggctgggctacaggccttgctaggggcttctttaggaaccctcctgggcggctgaaagcagctctgggatgggagaccgtttgggaccttgtctgagaatcctaccaccacacacgtattttgagagaggaagtggggccaaggcaggctccctgacattccggccgttcagagccggctgactcggaagccagaggagccaagcttctaccaggtcctcccctgcccagaccactgctttgacgctttcttcctcaaatagcatttacccagaaggcacatgtgtctgagtcatctcctctatctaagggttctgggtctctctctgctttgggtccatggggcttgtgg

SEQ ID NO: 427188 - DNA, 256 bp, Homo Sapiens
ggatggtgtttgggggcattgggatggctctcttccttcttggtctaaatcacagagcctgatcaggagagggtcagagttccagactcttgaagagtcaggaagaacatcagaagtgaagctgctgccatctgaggtggccctgggttggctattcacagagggctggaatgggacgatggggctgtactccccactaaggctgccagatctggaacttgaccttgaagtctagttatccaggactcttaaggct

SEQ ID NO: 427189 - DNA, 168 bp, Homo Sapiens
  misc_feature (80)..(98): n is a, c, g, or t
accaggtattaaaatcggcatttcctgcgttttcttccagtttatatgttagttttattgtctagatttgagttggaaannnnnnnnnnnnnnnnnnngttattttcaggttctagtatccctgaaaccatcgtggctctgagggtgtaatcctgataactgtatcag

SEQ ID NO: 427190 - DNA, 229 bp, Homo Sapiens
attagctctgtgcacactggagtttatcctgaaattgtttttggagatggttggaagatttagaccaggacagatctagggttgacaggcaatagagaggggctgattcagtgttcgatgaaggatgcctgctgtgaggaacctttctggggacacccaggaggctggcagtgccctccaaaccatgttgggccagttggattctcgggtgtccacagcaacatgagat

SEQ ID NO: 427191 - DNA, 306 bp, Homo Sapiens
ggcacagtctgcagggctgaagggtccctgcgcctgtgtgtgtggaccttcctcgcccgcgcctcatctccccattcttccttctctctcctgttctttgattcgggttttacttcctccttggaggtttctgtctgtctccgacatgctcagatggcagatctgctccatctgcatgctgtcgtctcgtgtagcactgatcgtttccttggggtgtgtgacattgtgctgtggcctcacctgcggagctcgtgttttccatggagttccatgtggccagactgtagacatccacctggggtgatt

SEQ ID NO: 427192 - DNA, 153 bp, Homo Sapiens
tccagcattccagcagttctgaaggtcctgtgcctggcctcacgagcccattacaggttgcaaagatctaatgatcttctcagaaggaaactgaggagacaggaggcactgagaagctgcacaagcagcacttgcgtgattctcagagagtac

SEQ ID NO: 427193 - DNA, 165 bp, Homo Sapiens
gtcctgtgaattccacctcagtaatttctttcaaatgtatctcttctagtccattttaccaacaccataataatttagaaactcattattctaacctgagtacagaacccatgagtgggtatcaaccatcagtctctcttctgttaaaaagttttacagctctct

SEQ ID NO: 427194 - DNA, 386 bp, Homo Sapiens
gccatagtctagacactgtcccaacagtgagagactcaaaatgcctcaggaaaacagaccatgtgctgtcaggtaccaccaagagtcagacgcacagaaatagtgcatgtgtgagctgaggattctgtgccttgcacatggggtggagcatggagacccaggagcacatgaagcactgaccaagctgagggcctacagtgtaccttgcacatggggtggagcacagagccacaggagcgcatgacgcactgaccgagctgagggcctactgtgtgccttgcatgtggggtggagcacagagccccaggagcgcatgaggcactgaccaagctgagggcctactgtgtgccttgcacatggggtggagcacagagacccaggagcac

SEQ ID NO: 427195 - DNA, 386 bp, Homo Sapiens
ccaaattcttgatgactcttttctgttccacaaattttaaatgcagtgctctgtagctttctactgaaggcctccccaaagctttacaaaatcagtcatcagtacatcagcactctcctctgttcttcagtcaaatacaaatctgcctaatggattgcttacggttctctgacagttctgatttgctaagaacatgatgtgtggaacctatggcatttctctgacctgtcagcctactgacctcattgtgtgggaaagggaagcagagttagctttgtgtaactggttctccctgaacccatgatggtttccagtgattacttccttttcagtaaacggatctgagccattttgacttaggacaagttaaagaagggcttggtgtt

SEQ ID NO: 427196 - DNA, 129 bp, Homo Sapiens
cttgaccccacgccctagcctaatatagatcggctacggcgttattagattcgcttggcgcttggttggaaacgggtgtgaagcagccttctgatggatgtattttcgcgttgttgaataaggattcaa

SEQ ID NO: 427197 - DNA, 646 bp, Homo Sapiens
gggaactagtactgggaaccagaagggtatcagcaatcaaggtgactatctgcttctttctctgcagtggttattatcagttcagtttgtttctatctactccatttctttgcatacctattatgtactcatcatctggcttacagcttgctgtaagtcaccttccagcccaatagagagaacctgattgattgatctagctcatttggtcgagcctgacttccaaaattagaggttgctggtcagccagggaaatgggcccttgagactggtgactaatcatttatggctagagaagcttataggatcttttgagggtttcacatgaggaaaccgtgctaaggcctgtgccaaagcaatatagaatgtcttggtagcacatgtaggaggctgtacctaatgattgcggtatcttaagatggtttaccagaagacttggaaattcgagccttgaagaagagtggaattagcattcaaaatgggagttagcgaggacatcgtaaccaaatggaacagcatatatgaagacccatatgtttgtgatgtgttgctggaaccacaggtatcatttttgggtgcatttccatgacgaggcaagaacagaatagtacctttaaggaaatttgatatgtggagtgacacaatg

SEQ ID NO: 427198 - DNA, 619 bp, Homo Sapiens
  misc_feature (430)..(440): n is a, c, g, or t
caaggtcacccgttagagcagacctgcctatctccctcttctgggggactactagaatccattgtggacagcttagagccacacacccaaatgtgttagctctgcctccttgctgtgtgctctcagtgttagagctgtagcttggtgggatttcagtcatgccagtggtgtggcaagagagttggagtggtgaaggtctcattgatggcgtggtcaccctgttagccccccaggtggaagtcatcgtcatctgtttagtaagtaaggaagcttgcgaaaggaaggcaggagattgtgcaggtttatagtaggtcaccttagtaagatactaggagagagagagacctgttaagctttgttcaacccagggtttcccaatcttatttgattacagactcttctccccaccctctcacccacctgaccccannnnnnnnnnnccacataacatctacgggaacatggatccctctgggaaatactaaaataattaagggctcatatttattgagccctcaccaactctatattaccagacattgtggtgagcacttttatattcatctttcaatatgccctgtggcccaaagtggagctactagatatttgcattttacaa

SEQ ID NO: 427199 - DNA, 369 bp, Homo Sapiens
tgtagtcctccttttttggagtgtcttttatttggttttggtattaaagtaatattggcttaagagaatgaattatggctaactctttctgcctttactctgcttctatttttctgaagaggttgtagagaattggtataatttcttctttgatgtctagtagaattcacaagcaaaatcatctggatctagtgctttcctttttggaaggttgttaacaattcctttagtagatataggcctactgagattatttctctttgtgtgggttttgctagcttgtgtctttcaaggaattggtctcttttatttaaggtataaaatgtgttggcataaagctgtttctagtcttcctttaatacttatgga

SEQ ID NO: 427200 - DNA, 233 bp, Homo Sapiens
cccagggtcactgttacaatgtctataagaggacctgtagcttctatgtgaatgatcctccttcccccacctcaggcaggcagggggtctcttgaaaactcccagtgaaagtgtttgagcctctcttgtcaccctaaattcccttgtagttgaaaatattttgctggtctaatctcacatattctagttctgttgctatccccagtggaacaaaaggaaacagttctgagact

SEQ ID NO: 427201 - DNA, 127 bp, Homo Sapiens
aaagcaaaccacataaaaggatttacaccaaaaagtcagtctctcccatccatggcccagttcctttcccaaaggcactcaaccgcagccacgggttccatgcagaccgtgtagagaatcatagatg

SEQ ID NO: 427202 - DNA, 365 bp, Homo Sapiens
cgatgggcgcggatgtgatctcaggcatggtcctctcctgactgggagcgtggagtggatttcgggtgcgttccggctctgttgcggggctggatatgcgtggcgacgacagcgactagggtcaataggctgagtacgttgacggtccctcccgcctgcaccgcggcggaacggtccaacccgtccccgatgccgatgcgtaccagcagggaggcctccagcaggaaggcggggagccagaaccacgtcgtccatttcagccggacctgcaacacggcgggcaggatgatgggggcgtggccgaggatcatccccatggtgaatccgaggaagagcgagtggacgacggcgtcatacccacttcg

SEQ ID NO: 427203 - DNA, 262 bp, Homo Sapiens
ccataagaagcaactcctcatccattcaagtctgatcatgagattgcagcaattcagtctcatcttcaggctccacttctaatgctagttctctttctattttcgccacaccttcagttacttcctccactgaagtattcagctcctcaaagtcatccatgaaggctggaattaacctttttcaaactcctgttcatgttgacattttgaccttctctcatgaatcaccaatgttccatttattattattattatttttttg

SEQ ID NO: 427204 - DNA, 358 bp, Homo Sapiens
ttagaatattgacaaccaagcaatcctgtagtaagaagaaaatattaggtcacatccttagcctctgtaacaggaagttctggattaaatcaggaataaactggcaactttagtaactaaaacattcattacctggactgtctaatttttttaaacttctaaaccaaatccaaatgccagatttgtcatgccattcacaactacagctacgtgataggtcttgaccagcactgaccaacaaaactttgtacaatgaccacatccttctccatctgtgctgtcccctacagcagccgcctgccaagagtgcagagcatctgaaaagtaaggctaaatgaggctactgtgagattgatct

SEQ ID NO: 427205 - DNA, 271 bp, Homo Sapiens
gtggctcaatggctctcgaagaccgacagaccagattaacagacatcgcttgctctttttactactcaatgaactctaccccttttttaccccggttactgaactctatacctgacatctgcccatcctaccttgtgaccaccacaccagaggtccgagccaccctgaggacttatactaactttgcctggctatactagagtgcatcatatgagcttattgatatcacttgcggccacggaactaataacattgaatgtgctcttctata

SEQ ID NO: 427206 - DNA, 128 bp, Homo Sapiens
atcccccacactactgcctgcttgataggtccgattgtgggatttcactgctgactgctggctgcctgttgaatgaaatacatatccccaggtcgctagcctggtgttgatggaactttccactttgt

SEQ ID NO: 427207 - DNA, 473 bp, Homo Sapiens
  misc_feature (191)..(247): n is a, c, g, or t
gttcagaggagagatcagattggtttgtcaggtcactgttttttattcattgtagaccactgtagacgggcggagactttctgccaagcctgtcttcagtctgcagattggctgctctttgcactctccagtcggcctgggcttcaaaagtgggcctaagtggttgaatgtagggcagccctctgtgtttnnnnnnnnnnnnnnnnnnnnnnnnnnnnnnnnnnnnnnnnnnnnnnnnnnnnnnnnnggagcattataagcaacaggccccttccattgtctgacttgtaaaatgtgcaacgcaataggcagctattctttgtgtacagatgtacctcaaatcccagaccatcagggccctcagttagctagcgtcggtggaggggtacgactcagacacaattaaccacaacatatgggagcatggcagatggcacttggcacaaactaagccttaagagtggagcctgtca

SEQ ID NO: 427208 - DNA, 254 bp, Homo Sapiens
agcacaagtctgacatgctggagaacactcagacaaaatccttaacatacataaatatcacccggattccctccacaacatgaaatctaaccccatgaaacccatgatagtccacaaaaccagacacgccttatatcacccagtctagcttcacaacagccaagcataatgcaaactcgcccccgcaactcatgaaaatactccacacccaacaaaccttcccccaacacagaaacttgccgggcaaaacaaat

SEQ ID NO: 427209 - DNA, 224 bp, Homo Sapiens
  misc_feature (156)..(182): n is a, c, g, or t
cttggtagcaagctgtagattttgtttcaaggaaagcatcttcatcttctctagtttcatcatgtatagatggagattccgatgcaggtatctgtatcaatttcaatacagtcacatttgtgtttatttgaactctagaactagaaaaggaattannnnnnnnnnnnnnnnnnnnnnnnnnncttctcttgaggatcatgaaagtataaaagaatactttctaa

SEQ ID NO: 427210 - DNA, 439 bp, Homo Sapiens
cactccaggttttcggtcatctgctgcctcccccaggtcccatggtcagtttactggtctggcaactaggatataggttcaatgacccccatcttctgtccagctattattctttgctcttctttaattttccttcttcctggggctcaataaattcattcatcatgtcacacgatgttcaagctgtagttcgagcttctgtcacgagggggcaccattgtaccaccattatagaactcttctgcaaagacgtatctgctgagctcagagacagcagcagggatgcaaggtttggtgttcgcccagtggctgctcctagactacttggtatgttaatatatttattggtatattctagatctgtcccaaaatcaccagtgcaggggttttcagatcatgcattaaccagccacatcggatcagaatttcagccatctgc

SEQ ID NO: 427211 - DNA, 340 bp, Homo Sapiens
  misc_feature (142)..(181): n is a, c, g, or t
  misc_feature (244)..(295): n is a, c, g, or t
atcatccacaaaatttaagagaatgctgtctacatagtcacacaataaatgttagttgaacaaaccaacagattcacaagaagaataaaacagcaacaaggcctaaaatctgagagagacaccattcagagcctcctagctnnnnnnnnnnnnnnnnnnnnnnnnnnnnnnnnnnnnnnnnaagcctctacacagccccacttgctaggtctgccctaatcagactctctggcactgataccannnnnnnnnnnnnnnnnnnnnnnnnnnnnnnnnnnnnnnnnnnnnnnnnnnnctccagaccagtgctgtcccacagacccttttgcaatgatgctag

SEQ ID NO: 427212 - DNA, 120 bp, Homo Sapiens
ccgccactagcctcatggaatttacactgttgctggggaaacagactataggcaaggaaacaggtaaataagcaatctactttcagataggaagaagtgcttatttactgcatcaaaaaa

SEQ ID NO: 427213 - DNA, 380 bp, Homo Sapiens
ccactgccttccatatctgtccccatttattcagcactttattgtgccagagctgagctacgaatcacctcatcatcgcttttcactcccggctctacgtgggaactactataatcctgcccatgttacatgtgaggaaactgcctgaggcctcgcatacagggaggagtggagctgggatccaaactcagctttgaccctggaatctatgccccgccctctggaacacaccagcaaattctccagaaagcgccgggaccttagcactgggcttttccaaagggatgattttccaaagggatgggctgccctggccagatgggcaactgcctcctactttctagctctgcccagtcctgggcggtaagattcccgtttcc

SEQ ID NO: 427214 - DNA, 302 bp, Homo Sapiens
ccgagctttacctccctgtatatctatgtgaatgaaaacacatcctttgccctaccctaagacaagtccagcgccaattcacattttgagatctagtttttagttttgtcttcacgtttgacctctggggatttccttactctcttgcaagctcagctatgcatttaaaagtaggtttgttatttttatccagcaattttttgttgtttcattggaagtttttcagatatagattgcactttgctggtaatggaagtctgtgtttctctaagtgaagtaggagtaaaagtggctacagtaac

SEQ ID NO: 427215 - DNA, 145 bp, Homo Sapiens
tcttttgcatgtagatatccttttcccagcaccattcgttaaatggagactattctttccccactgaatagtcttggtaccctctttgaaaatcaattgatgataaatagatgtgtttatttctgaactctccattttattccat

SEQ ID NO: 427216 - DNA, 271 bp, Homo Sapiens
tgtgttgtgggaaatatggagagggagtataccgctgtgactagaatgttttttcctgtaagtaagagagtgatatttgatcaggccaacttggggactagctcatagagttctcccagtaggttaatattggggggtaaggccaggttagcgaggcttgcttcatgtcatcaaaaagctatcattgggatttcagtgtgaagtccttgaaagaggattatgatgcaactgttagtgctttttaactttgagtttgctaggcctactattc

SEQ ID NO: 427217 - DNA, 251 bp, Homo Sapiens
tttggctcggcaccccgccactatcctcatcaagtacatttttaaagtcacatcaaagttcatgaattcagatgctgatgaagcaaaagattatctaaataatgtataaaaagcacagggtttcttcaagtaaactctaagaaaaggtaggtggggagtttatagacttgagagttatcaatcgtaaccaattataaatgaattatgaacattagttggatcctgactccaacaacctttaccacatatgc

SEQ ID NO: 427218 - DNA, 198 bp, Homo Sapiens
tgctctctaatcttagagttccaaatggagaattgatcccttctagccccttagattttcactggggaccctgccacttggctcagagtctcctctgcaactcaactctgcagggaaggcatgtcaatatccgtctggtcaacccacccaatgccctctgagttctttgacctcctccgcgccagtgacctctactct

SEQ ID NO: 427219 - DNA, 414 bp, Homo Sapiens
  misc_feature (318)..(332): n is a, c, g, or t
atcccactgccttcacagagttctgccagagtcttcctcattcagagtgaaatttcaagggatcttgtaactttcctcgtcattttcatgaccagtccagtctaatggcaaagcttccgtcttccgtctaatttaaagcttctttccctccttcagctcagaacacctgcacgggcatagaagcttgaggtatggtggtggtgagctgggaagggtcaggtagggagaagagaagtagggcaaggacaacagagggcttttttgacggtagagttggaatccaccagcatgggtgtgaccagtatacatatgctatcnnnnnnnnnnnnnnnctcatgggagtgctttggtggatttcttggagattccccattggtgactttggattggaagcccgggcatgggcgatgtcat

SEQ ID NO: 427220 - DNA, 149 bp, Homo Sapiens
aaaaattttcaaattatgtcaatatacagcaaattcatcaccatcatataagcactctgctctcagatcatgccccagcattttcttctctttgatatttccaactattctctcttcttgatttccataaacatgttcaaaatcctccc

SEQ ID NO: 427221 - DNA, 394 bp, Homo Sapiens
ctctttccactcaaccctgccaaccctctccccttcagccagaaggaaatacttgtagccctcccaatgctgtgtatttgtctctcggcctcctcatccatgcctgctttggccctacactctacctgcctctcccagacttaccactgcttaattcaactgatctttcaaatcttaacttaggcatcgccttctttacaagactttctctggtccagccatggtaccccacttatgcctcttcctgaaggtgctgccggacctgtctgactcccccactaaacagggcctccatgcctggtatgcaatagttatttaatgtttaatgacaccttcctatggactcatacaccatccagcatcactgatggggcaatgtttggataactggctc

SEQ ID NO: 427222 - DNA, 111 bp, Homo Sapiens
cgtttcaggtcaaatatggcgagcgtgttcggctgaaatttatcaatgagagcatgatggcgcatcccatgcacctacatggcatgtttgtacaacttgaaaatggtcaag

SEQ ID NO: 427223 - DNA, 118 bp, Homo Sapiens
aattttaattattataggtcatttagaaaccatgcactataaagtatttagaaagaacttggtagtaatttttggaaaaaacattttctccaaacactgtttaaaacagctcaacttg

SEQ ID NO: 427224 - DNA, 137 bp, Homo Sapiens
  misc_feature (65)..(65): n is a, c, g, or t
ccggccaggtagtgacagtttttagaggctctgggtgcttggcccttgccttaaaccgaatgctntaaaaggcctttgatctctgtcaataaaattgcaagtgtgtacacacatttgacttaacaatcataataata

SEQ ID NO: 427225 - DNA, 509 bp, Homo Sapiens
gccccctttagactatgaatgaaccccaagttctgctccgttaccttacaccaggccccatttcccacactctgtctgtccctgtgaacacctcagcttgcaaccctagcctaagcttccaaaggggaaggcgtcactccttccaaatcaaaacagaactcgaagagactgaagcctgggttttgtagcgcaaccacaaacccccgtttgttcaggacagttgggttcgcatgtgttgacctggtgtcattattaatagcgttccctttcactctcactgtcctgtcaggctgccttgagtctctgccggctctagacccacctgtcataccaaggattctgtacccagagccctcagaaggtcatttgctctctgcatagtttctcagcctggagatttcaaacttcctcctagcagagtttattctgcagcatgctgctaaggtaggcagaagtaaagagagaacggtggaataaagagaagttagaaaaaagaagagagctaaagg

SEQ ID NO: 427226 - DNA, 200 bp, Homo Sapiens
acatatttctcgagagaattcattatttatagattgatctgaaaaggtcagcactgaacttatgctaaaatgatagtagttatacaaactacagattctgaattttaaaaagtatcttctttttctcgtgttatattcttaaatatacacaagacatttggtgaccagaacaagttgatttctgtcctcagttatgttaa

SEQ ID NO: 427227 - DNA, 282 bp, Homo Sapiens
ccgtatattctaaactgtagcttctattgtagttcgttactaagatcactatgcagcttcctttcaaatcatattaactgatacactcttccatcctttatctgcaacctttctgtgtgctttcatcccactctatcctaccctgacagtccccaagcagccactgatctgatctactccctgtcactctaggttagtctgcactttctagagttgataaaactgaaatcatacagtatgcactcttttggaggaggagaccaggcttcttttactcaggag

SEQ ID NO: 427228 - DNA, 153 bp, Homo Sapiens
gcgtgtacgacggcagtgtaaacgacgagcagatgttaaacgacgagcagtgttaaacgacggcccgtgttaaacgacggccagtgttaaacgacggccagtgttaaacgacggcccgtgttcaacgacggcccgtgttaaacgacggccaga

SEQ ID NO: 427229 - DNA, 172 bp, Homo Sapiens
gtctggacgcttcgactggcacgcatctcagcaaatgttcttgtatgactctcactgcaaacctgatataatgtgcatgactctgtcggtgctctacccaggagggcccatggacaccagtacaggccggatggcaccctgattctcccatgcacaccccgagaggtccaga

SEQ ID NO: 427230 - DNA, 274 bp, Homo Sapiens
gacgtagcagtatagcgatgtgatggatgatagggttggcgctattggctgtctttcctgacttccagaggacttggggactaaaggtgtgagatctcagcggaagggctggagactctagccactgagggcagcttgtgatccagccccagcagatactctggacactaaggcatgggtcgagaaagaaggactttctccttgaccaactccagctgggctcttcacagcttcttctccgctaggcgccgaccttggccttccacactcaccc

SEQ ID NO: 427231 - DNA, 264 bp, Homo Sapiens
agcagtctacaggaacaggttctagtaaaagtatcactaaggttgaaggcaggagagtaagtctgggactataggttgggagactgtaaggcgtggacaaaagcaagaagagtataagcaaggtaaggaatgaggggaaagtgatgagtatgaaagaggaagtgacctgtgagaatcagacctctggactatggtgacttcgcttctctcctggactcagcacctctttgctgtggtatcccacaagttattactgcttggtgg

SEQ ID NO: 427232 - DNA, 218 bp, Homo Sapiens
gctcacggaggtggggcagagctgatgtgacccggtccctgctctgcctctggcccttagtagctgccaaaggttgtacaagatcgattgctctcacgaaagcacgacactagaggttaagaactctttgcacgcagactccgtggtgctccactttctagaattcacgtgcttggctggctcatgtacgtgcttgcggggagatccatctagatgtc

SEQ ID NO: 427233 - DNA, 386 bp, Homo Sapiens
tagcgcaggaagtgcaggcgccagtaattgtgataatcatccagcagactcgatcattatgagcccaacttgtaactacaattaacacaaaaatcaatgtcaaatccccagatattatttacaggattataatatgggtatttctttagatgaaaatctgtaagccattttcaattgtatatttcaattttcatgtatgtgtgtgtcatatccatctctattaaccctatataatttatttcttcagcatatttctgcacaataaaaaagctcaatggattcatagaatgacagctactttcacaagaaacttatctcattttcaaggcgctacatacttcacacatgacacacttcaaagccggtcaacaatcattatcagatct

SEQ ID NO: 427234 - DNA, 423 bp, Homo Sapiens
ccaggtgagatccagctggagacggacggaggacggaagcaccgaagacttttggttggtttatgtaaggacaaatggaggggaacaccgatacaggtttctctgtaagagtagagccttagcccaggtcattgtcgaatgtgttttacgttggcatacaacatttaagggatggatgccatttttattatttctcctttcaatgaacttttccaattgtctaaccagatgtggattacagtggtttcatataagaggatttctaaatcaggattacagagcaaaaacctcccgggggtgcgtgacaggttgggagcagtggtgggtccaggcagcaatggattccctggggaagttgcggaaaaagcgtctctgggagacgtgcttcgtgcggagagaagctgaagtgttggcaaaaaaccg

SEQ ID NO: 427235 - DNA, 127 bp, Homo Sapiens
ataagcggatctgtctaacacccaagagcattgtcatgatgtcactcctggaggttgttctattaagcattagtgatttatacttccggataaccagtggcacagatgtactctttacatagctgat

SEQ ID NO: 427236 - DNA, 143 bp, Homo Sapiens
accaatgctaagcattttgcctttgttatctcaattactcctcacaacaaacctctgagatagctgtcattattccttacactctagactttgtttcttggtagttatactctggtcttacactatccagtgtaataaaaacg

SEQ ID NO: 427237 - DNA, 419 bp, Homo Sapiens
  misc_feature (65)..(160): n is a, c, g, or t
tgcgtatacagcacggatgcgggtcatgtggggttaggagtacttataagcagggctgcttgctnnnnnnnnnnnnnnnnnnnnnnnnnnnnnnnnnnnnnnnnnnnnnnnnnnnnnnnnnnnnnnnnnnnnnnnnnnnnnnnnnnnnnnnnnnnnnnnntgaacagggtttatagtttctagtctctgatcatataaatttgctttgggaaactttcccagcatttttcttccaagacgcaagcacctgctctgctgtgctttaattagacctgcccgtgtcactcctgtttgtgctttagcaacaggaacgcacctgggcctcctgaacactcacttgcttcagcttgccagctctgagcttatcttgttggctacagttgatcacaagagagtgaagcagtgtaaacgtcggagat

SEQ ID NO: 427238 - DNA, 420 bp, Homo Sapiens
atacagcaggaacaccatgcacgttaggtgcgaggtcactcaatgagaaacacaggcaaagtccctagcaagctctgaccccttgcaaaggccagcctcaggcccatccatcccccagagccaggaccctgccccagtagaaacccctaagccggagacccatcattagaggccatgactgccaccagcttgggctactcggtctcattatgtccctgggtatgggtggcagccacttccctgtgcccccagcagagtgtggcaccagaactgcccggctccgtgggtgcatctcattatctgaatgtctgccatcagctgtgctgaagcaaagcggcactgggaactcactctgtacttttgcctaatgttctaatttgcccctgcagaaggggaataacccttttctggaggctgctc

SEQ ID NO: 427239 - DNA, 157 bp, Homo Sapiens
atcctccctgaccaggtcctcctgcactaactcctccctgaccaatccccctgccctaactcactccctgaccagatcctccatgcctaaatcactcactgaccaaggctcctagagctaaaatctcctccccatgaacaggtcctccgtgcaacta

SEQ ID NO: 427240 - DNA, 413 bp, Homo Sapiens
cctccagacgacgtgccaggaaaagtcctgccagtccaaagccttctctctgcagctgggtgttaagggtgattgcccctctctctccttgtaagattatgtttgacagcagtgaaaaccaacagtttaacagcagtaatctcttggcaggacagattgatatgagccttgtcccaaaacaaagtaatcctttcagggaagtgtatttcacgttgagctcacgttcccaagatgctgagattcttatgtagctgacaccggagctgaggctgagccccaggcagggatatccaacgattggcagtaaacaccacggaactgagtgaagattcaggggctgagtgtgttcctgagtgcttcaaaccgggggacctggaaaccagaggactcctggggaaaggctgtcaactcca

SEQ ID NO: 427241 - DNA, 185 bp, Homo Sapiens
tatttctgaatgaataattgattataaggtagtgaagagggaggttatatctgaggtccagttgacatgagggaaaggtcttaagacctttaagacatttaagaggaaaaatgagcccaaaatgcatgtgtttggaaggcccacagctgggcacagccatgcatgtgtttggaaggcccacaggt

SEQ ID NO: 427242 - DNA, 172 bp, Homo Sapiens
gtgctccttgtgtctcgcaaccactaggttcacattttctcctataacacgcattgatctccaatggtaacctggtatagcccatcagtaaaagatcttgagtagatccctttgaaaatatgcatgcttttatataagttatatgcattatactattgtactaaagtgtctc

SEQ ID NO: 427243 - DNA, 377 bp, Homo Sapiens
gacgtctgttggtgatgtgcatgtcagcgctgtaatgttagcagatgagcctacacacatcttttccattttgtgatagaagcagcagcagctgtgtttaactgagcagtgagcatagaagatgaaacattgagcctgtcactcttacatccataaaaacgctatccagtaatatttatttaactactaaagtttactacttcatattatcctcaatttatttcagaacaatttttcctagggtgtgtacacttggaaaagtcatctggaatttactactcacttttatcatatcctggttgtttggtattttggagattgctggtagctgactttgcccccaacaggttatttagaaagattttttacacgcaaag

SEQ ID NO: 427244 - DNA, 179 bp, Homo Sapiens
atctcacaataattgtatggggacacgagatccacattcagacccagaatgaccctcttgtccttttctgcaaatgctaagaacctccttgaaaatgtatactagaattaagaatagaaggatcatggggaaatcctgcaacccacatagttctgtaaattttatagtggttgattttt

SEQ ID NO: 427245 - DNA, 354 bp, Homo Sapiens
tactgtccaggatgtggggtgaattgatgtcatcggagaatcaggaactcccttggtggatgacatcatcgggcagtctgtacccaggagtggggataacgggtgtaagataagtgaggtttttctcaccattgccccactatggaacaggccaccttgcaaggaagtgagcatctctctggagtgtctgagcagaagcagggtacctgtttgccagttatgcttgggaacagagtctgggattggacaggggggtggggcccaggctacaggccctctgaagacctgagttctgagattgatgagtttagagatacagacacagaaggggcttcagagatcatggagttcaag

SEQ ID NO: 427246 - DNA, 378 bp, Homo Sapiens
ttacttcggtgtatggtggtacttccggtgtcatagaccttgcagcaacaatccctatgggtagccactattacaaatcccattatggagaggaggaagctgggaacgagactgtacacagtgagtaagaggctgaacccaggctggtctgccaccagagcctgagggctgcagcgcctgcctgccatccagcctgcatcctcctgcagaggccacgggcagctgccccgtcctctttgatactaggagtagagaacggacttcctacctttatttgaaaatgagactctctttccttttcaccattgtcatctcccagcctactgtgcaacagacccaagtaaagtgtatttctccagctgggtctctacctcacac

SEQ ID NO: 427247 - DNA, 182 bp, Homo Sapiens
  misc_feature (44)..(124): n is a, c, g, or t
tgcctacatgtccgggcgcacactcatacaccaagatagatacnnnnnnnnnnnnnnnnnnnnnnnnnnnnnnnnnnnnnnnnnnnnnnnnnnnnnnnnnnnnnnnnnnnnnnnnnnnnnnnnntctctcacacagatactacctgggagggatcctgacattcacctaaggggagtcaggg

SEQ ID NO: 427248 - DNA, 314 bp, Homo Sapiens
actcttgccactggttgtctttaaaaggtataattagccctggtgacactgtgcaggcgtgcttgctcccaaagaaagagagagagcaccagatctgtctgtcttgcagcggggagccaggacacagctcagcttgcttgcgctcagagggaaagagttaagctgttgaccccaaagggagagagagccagcagagatctgtgcttgggagtggctggaacaagcagccgagacacacagtgtaagagagctgctgaataaaattgtatttcacctaacccgttagcccccttgagtgttctttcaagctgtct

SEQ ID NO: 427249 - DNA, 293 bp, Homo Sapiens
atacccgataacccccatacctcaccctatgcatgtctttatctgtatcctttctaatattctttctaataaaccagtaaaggtgcttctctgagttctcctagatagtttagcaaattaatcaaatccaaagagagatttgggggaaccccagcttgaaaccaatggattgaggtattgcaaggtggttaaggtaggccctgatccaggatgattctagaggaaatctggacacagactcagagagaaaacaatatgaagacccggagagaagatggccatgtacaaggcaa

SEQ ID NO: 427250 - DNA, 131 bp, Homo Sapiens
tgtaagcccaggggtgcgtgtgagccagggcacgtgtgcgcccgggggtgcgtgtgagccggggtgcatgtgtgccgggggtgcaagctgtcggtgtgagcccgggcctgcgtgagagctgaggtgcctgt

SEQ ID NO: 427251 - DNA, 205 bp, Homo Sapiens
cctctgaccatctattgtctcttcagtcatctaaagagatttataaaaggaaaacggtctagtgtgtgcggtgcacccctagcccaggcctaagaggagcgtcttgtgaaggagctgtacctgccggctcaggtcccttctcggagtgactcctggcagagcagagcaggcctcagccctccttacaggcgcgtccagccagccc

SEQ ID NO: 427252 - DNA, 223 bp, Homo Sapiens
cccggaccgctacacagcttcccaacatggacgagcgtcctctgtctcgtctccccatctggtctggaacctgctttgccaggtaagcaatatctccatgctattgtatagtactaccgctcttgtagccttctgatttctgttactgtagagtaacacagattctttatacacatttgtaagcatttacgccaaacccccgctctcgatctcttcttctccc

SEQ ID NO: 427253 - DNA, 202 bp, Homo Sapiens
gtatagtggcctcataatatgagctaggagtgtccatcctcttctatttctgggggagattgtgtaatactgatgttaattctttaaatgtctgggatgattcttcagtgaacaaagtgatataagcacggagatttctttttttagaagccttttagttatgaattcattttctttaatggttaaaggactattctgatga

SEQ ID NO: 427254 - DNA, 184 bp, Homo Sapiens
gagaggtgacccactctaacatggtcatcattcatgggtacagttttattttatgaccgctccaagcctcttaggacactccacagtgtctttgttattgttccttgtgtttggtgcttctctctgaaaacaggattatacattcctggcctgttaaatacaggctggccatgcgacctgtgtg

SEQ ID NO: 427255 - DNA, 400 bp, Homo Sapiens
  misc_feature (100)..(156): n is a, c, g, or t
acacagaccgggacgcttccttatgaagccccgtaagagctcttgcaggtatggcatcctccttttaaggtgacctagagccatacccaaggtcacaggnnnnnnnnnnnnnnnnnnnnnnnnnnnnnnnnnnnnnnnnnnnnnnnnnnnnnnnnncatagtaatttaagaactagagtccaagactcagggctccgaattaccagtcctccattgtatcacccctattacaaccgtctagccaaatcatctactttcttgaatgccacattagagatggaattttttttcccagaatgattgcagatattaaacttaatgacccaagaatttaacaccaaaatgtacaggacacactcttcctctatttattatctattatttctttaccattaagtac

SEQ ID NO: 427256 - DNA, 464 bp, Homo Sapiens
  misc_feature (46)..(288): n is a, c, g, or t
  misc_feature (312)..(352): n is a, c, g, or t
cgggccacacatcacgcatacattcacacactccctcacgaagccnnnnnnnnnnnnnnnnnnnnnnnnnnnnnnnnnnnnnnnnnnnnnnnnnnnnnnnnnnnnnnnnnnnnnnnnnnnnnnnnnnnnnnnnnnnnnnnnnnnnnnnnnnnnnnnnnnnnnnnnnnnnnnnnnnnnnnnnnnnnnnnnnnnnnnnnnnnnnnnnnnnnnnnnnnnnnnnnnnnnnnnnnnnnnnnnnnnnnnnnnnnnnnnnnnnnnnnnnnnnnnnnnnnnnnnnnnnnnnnnnnncacaacagaaagtgcacggatacnnnnnnnnnnnnnnnnnnnnnnnnnnnnnnnnnnnnnnnnncccatatatacttctttgcacttaaaagcaggagcatgtcaaaggctgcctgcgacgctggccagtgctccagggaggtgcggactatctctcaccacaagtgatcaggacc

SEQ ID NO: 427257 - DNA, 422 bp, Homo Sapiens
  misc_feature (279)..(343): n is a, c, g, or t
gaacgctttattctctattgtgataactctcgggtttatatcgtatccgtcatgatatgactacatgaaatgaaatagtagctacagtcaggtatgtgctaaacacgatacttatgtccgttatttaatattcacaacagtcctatcagatagctattaatagttccattttacagaaaagtaaagagaggcttaaagacattaacttgcccaattcaacactggtaagtggcagatctagaaatgtttgactattaaacaatgacttaattatatatnnnnnnnnnnnnnnnnnnnnnnnnnnnnnnnnnnnnnnnnnnnnnnnnnnnnnnnnnnnnnnnnngcctgatgattaacatgacactagaaaagaacccatatctcccacacagactataagaccctcacctttctacacacac

SEQ ID NO: 427258 - DNA, 167 bp, Homo Sapiens
actggggacccacagtccgggacgcactgtttttcaatgctgggctataatgaagacagtaagtacaaaaatgtctcaggagtcactagggcatccaggagagagccaaatgggtgcttcaactaggatggttctgcgtttatctattttgcgtaagatttcatttt

SEQ ID NO: 427259 - DNA, 356 bp, Homo Sapiens
  misc_feature (113)..(280): n is a, c, g, or t
cgggacccacatcccgggtcgcataatgatagacttaggatgtgaacgcaaagaactgagttgccatcattaaatcttatttgggtggaaagaacttatggagtaatgcaacnnnnnnnnnnnnnnnnnnnnnnnnnnnnnnnnnnnnnnnnnnnnnnnnnnnnnnnnnnnnnnnnnnnnnnnnnnnnnnnnnnnnnnnnnnnnnnnnnnnnnnnnnnnnnnnnnnnnnnnnnnnnnnnnnnnnnnnnnnnnnnnnnnnnnnnnnnnnnnnnnnnnnnnntgcaaaaggactgaggccaatccaaaatatcttacttaacccataccttgttgaaatactgcaatagagaatagtg

SEQ ID NO: 427260 - DNA, 476 bp, Homo Sapiens
gggaccacagtccgggtcgcacttacatttctgaaatgagtatatatcttaaaatcaatgtttacatatttaatgttctcatagtaggctttcctcactcctcagagaagctgttaatacattgatggtgtatggagaatcgaagaattacagtattacctttttaagaaattgaacagaagaagaaaaggaatgcttaatttccttggagatttcttggaaaaggtggtcaccactcttgcttattctaattctcattatttatctttctatgaattccttctccatcaagttcctcaaaaatggtggcactcctgaggctaaaagttcagctgttatcaggttcactcaggccattgtcagttctctgaaatcttctctttcccaccactcctacttattttccctctccttcccaccacccaaccagtttatgcgagagtgctgttttgtaaatgagactgggagctcataaa

SEQ ID NO: 427261 - DNA, 159 bp, Homo Sapiens
gatccctctaacatctcaggccaggtcccactctgacccctgacacttgatccttgggtcctagctggttgctttctgacacataagccttaccagaccccaagtccacagggtgaaggctggaactgcatcccttcctcctctatttctttctccctc

SEQ ID NO: 427262 - DNA, 406 bp, Homo Sapiens
  misc_feature (95)..(240): n is a, c, g, or t
  misc_feature (244)..(258): n is a, c, g, or t
cgtcatcagaaactccgctgcagcagtcacaaaagataaaacacacaaccaccaggtcatcaccaactccactgccaggcacatgcgaaagagcnnnnnnnnnnnnnnnnnnnnnnnnnnnnnnnnnnnnnnnnnnnnnnnnnnnnnnnnnnnnnnnnnnnnnnnnnnnnnnnnnnnnnnnnnnnnnnnnnnnnnnnnnnnnnnnnnnnnnnnnnnnnnnnnnnnnnnnnnnnnnnnnnnatcnnnnnnnnnnnnnnngggagacagagtctcgtcctgcgacccgggttgtgtgcacagccggggttgcacactcaggccgcaccatttgagccccctcttcgtgagaggcaggccacagacgggcccgagggccagtgcagttggcaccaggaggggggctcag

SEQ ID NO: 427263 - DNA, 196 bp, Homo Sapiens
tggtgggcttccaatgccacaggctgcctccatgactctgtaatgtgaacaaatggtgcaaagttggggtcttaaatttccccaaagggcttgagcttttcccagccaggcagaactctgcagttctatctaataggagtctgataattggccaccttaagatgctacagaccaagtccaactatgaagtaggaaa

SEQ ID NO: 427264 - DNA, 291 bp, Homo Sapiens
attggaatggtgatggagggttagagatgcagtgcaccacccacgaggcccctcctttcctgtctctccttgcagccaaatgcaaagggcgtcctgcacccccagcttccctagggcagggtcactgcacccatttacagataagcaaagcaaggcccagaaagggccttcagtgagaggggtaggccaagatgtagaggcctccaggcccatctggcaaaggagttcagcagccaatggtgctgatgtgagagtttcccttcgagggttccagtcctggttccatcgcta

SEQ ID NO: 427265 - DNA, 132 bp, Homo Sapiens
ctagaatgtctgattttgtcagctaattttcagcgaactttctgagggcaaggcaaagatttctcctcgccctacgaggtgcatcagccaacaagaagtccctctatttgcaggtcctctttgtcctgtcaa

SEQ ID NO: 427266 - DNA, 154 bp, Homo Sapiens
cagaagtgatttggccggggtgcgtgtacacgggggtgcgtgtacgcccgggtgcgtgtacgcccggggtgcgtgtacgcctggggtgcgtgtacggggggtgcgtgtgagccggggtgcgtgtacacgggggtgcgtgcaccccgggctgtgt

SEQ ID NO: 427267 - DNA, 204 bp, Homo Sapiens
  misc_feature (74)..(157): n is a, c, g, or t
catctcatcatatggaatctcaaggacccataagaaatatcaagaagaacaagttgtaggtctcacacttcctnnnnnnnnnnnnnnnnnnnnnnnnnnnnnnnnnnnnnnnnnnnnnnnnnnnnnnnnnnnnnnnnnnnnnnnnnnnnnnnnnnnntagccagcctagcctagaaataaacccttacctatatcgtcgagcaa

SEQ ID NO: 427268 - DNA, 120 bp, Homo Sapiens
ggcgagccgacacggtatgggtcagcaaggtaggaagacttggaccaagtctcctgcttatcaggcttgctgagggccggcgtggaggatggtagacactgccttataagtgttaggtga

SEQ ID NO: 427269 - DNA, 192 bp, Homo Sapiens
agccgccacggtatgtgtggttttggaggtacccatttaggagtgcgatgagtactgtggtggtccacggtgagcacgtactgcgcagtgggtgtaatgtggagttcatagtagcctgcagcttgggagaggggtctggacggggtccatgcatatgggagatatcagtgtatagatcgtgtttaaaatttt

SEQ ID NO: 427270 - DNA, 191 bp, Homo Sapiens
  misc_feature (78)..(104): n is a, c, g, or t
gaggatcccagtcgagcgcacggtatcccctttatctcctggcagaatctctggttcctggctcaggcacatccagtnnnnnnnnnnnnnnnnnnnnnnnnnnngaattatcttttgacttaagaagtcacaaaaataatacagagttctccagtacccttcactcaccttcccttatgttaatgccttac

SEQ ID NO: 427271 - DNA, 183 bp, Homo Sapiens
tgggttttccccgtctctagagtattccctgtctcacatgtatgctctgacgggatgcggagctcacacggtaactgctgtgacgggatgcggagttcacacggtaattgctctgacgtgatgcggagcttcacaccgtaatgctctggcgggatgcggagtctcacacggtaatgctgtgac

SEQ ID NO: 427272 - DNA, 234 bp, Homo Sapiens
aagtctaaggtctgacagaagcctttgcagagacacctgctgctttcaggactgcctgggactgagggaatcccccaaacaaaaggcttctgttggatttctatgtgcagttgagaatgcttagatgacccgggaagaaaaccaccagtgcgagagaaagacggactacgagaagtaaatggaaatacggttgacaaaaggctatgccagtgcaaaaagtgagtatgaagcacc

SEQ ID NO: 427273 - DNA, 102 bp, Homo Sapiens
acgccgagcttctgtgtgagctccgcctcccgtccgagcattacctgtgtagagctccgcctggcggcacagcattaccgtgtgagctccgacctcccgtca

SEQ ID NO: 427274 - DNA, 450 bp, Homo Sapiens
agcgagcgccacggtatctataaatttaggtgttcttcctgagagacttctacatggcaccgtcacagatgatgggatcagagtcaaagagcttcacgactcaactcagtgaacctgtgaaggaacgtacgaggtcagaagtgtgggaagccaccgtgtttacccgtatactttattggtcttcgccttgcgtgaggtttgtcagccgggacgaccaggaaaacaggtcgtacagctgctccagcaaggaggaggtgtagagcatcttccactggtaggacttaatcaactcgtacaatttcctggtcaagctcacattgacctgcagggattcatcgaacacccgggcgcagattaccatgagaagggttgttggtggaacagtccacatacaaaatcttccgaaagatgtcagactgatccttcatccgcatgcgtcccgttaagttg

SEQ ID NO: 427275 - DNA, 434 bp, Homo Sapiens
cgcgctcggcccgacttactgcaccactgagcatcaggctgcatgctgggttggactggcgcacacgcactgctgcggacgggctggggaggcccctgtgacggaacttggccctatagttgtcctgtgtacgatatgtggtcgtcttccttccctcgaggcaaggaggcccatctcaggtggagggaccagcatgggcaagtaattgcaaaatgtgtaggacagtaatagtttgtgtgatagaaatcagagggaagcatcatgcagcaggtggacaggcagccagagcaaaaagtgtccctgtgtcttgatgaggagattgggctttccccccaccaaccacaaatgaggagctgtgataagaattacagtagagacatgcagcgaccagtttgcctttagagagagctctgaggcagaagtgtggcagtgtg

SEQ ID NO: 427276 - DNA, 338 bp, Homo Sapiens
aaagacttggacatgcttgggtagttctgatcttttgtgacccagcttcaccttagggatttgctgggccccagttccaggcaggatggacatgagccagtgtcttgtggaggcttcctcaagcctgctctggaagggctggaatttctgccctctcccacggaggaaatgacgtggttgaggctggggcagccggtgggctgccagaggaaaaatccctgactaatgtgcagatgaaacagtgatttctatgaggacttgctcaatcttcaggttgctaaagctgtcacagaaagctgtgtggacccccagctgtatattcttctctatacctgaag

SEQ ID NO: 427277 - DNA, 128 bp, Homo Sapiens
cagtgtacatgacgttatggttatatgaaaatagttttgatttcccggatcccctgaaagtgtctcagaacccacagacgtcctcagactacactttgagaccaccgtattttgtttttgttttatgt

SEQ ID NO: 427278 - DNA, 202 bp, Homo Sapiens
attcggcatcaccaggcctgagtgtatgtgaaatgatcatgtactacttattactaaaccgtaaccccaaaacattccttttatttctgtgaaaccggccaaagtgaggtccacccaccttcacacagctctggcggtgcacctgctcaccttctcttggttctcagaactgagctgggcttgagaacacagctttggcttt

SEQ ID NO: 427279 - DNA, 218 bp, Homo Sapiens
atatctgtctgccagtctagagacacggaacggcacaggtgaatggaaagcagccaagttccccatctagcatatctgcaaatatgatcgagaatgatgggagcttttccaggcagatactgctaaacagggaaatcaaacatgggtggaatacatttattcattcgtctattataatcttatcaactcctaccatgcaaggtacttttgcttataag

SEQ ID NO: 427280 - DNA, 191 bp, Homo Sapiens
ccgaattgaccactgctctcagacccatcactttgtacattttttaaacacatccctacatttaaaccttctgctcatactgcccccactatctagactccctcctccctgccctagtcaatgtttactaaaatccccttcatccctcatcgccccattcaagtactttctcaaataattcacccccctcc

SEQ ID NO: 427281 - DNA, 197 bp, Homo Sapiens
tgtaccaggatcggctgtgtttctctgcaggggatgatggtcacgtatttcccccacatccccctaagacccagaacttttctgttcttcaaccccagcatactaagttgcatttctgggccacttttccattaccaattcctggctcataccccacctttcttcatccttggacatctggatctgcactacctctg

SEQ ID NO: 427282 - DNA, 200 bp, Homo Sapiens
gctacaatacagatcagaccttcctctatttctctattcagctatcagctactcatatactggtatccgtcattcagtagactgcactagcaaagctgaaaacactcttgtgaatgttaaacatctctgaatctgtttagcacatagcacatttatcaatgcacatttaatacattaatagctaattgcagccaaaagtt

SEQ ID NO: 427283 - DNA, 139 bp, Homo Sapiens
tcggcacactcacactgatggtgatgggcagctatgcacaggaaatctggatgccactttgtttgcaaggcctgggacttcagtgttcacgttcggaggccttctgggaacaaacctttggggtacaggtcatgcagca

SEQ ID NO: 427284 - DNA, 166 bp, Homo Sapiens
  misc_feature (105)..(113): n is a, c, g, or t
tagatctcgcttcacctggcatggctgtaagtggtatcacgtgggatgcctttctagttcacctctgtgtctcatcaattcggcgctgaattatatacctgtgannnnnnnnncacttcctttcaatgtcattactttctaattgcaaagcagaaacattcctagt

SEQ ID NO: 427285 - DNA, 234 bp, Homo Sapiens
ttaaccactgcactcagtgctctgttattgaggactgacataggaatacttatgtgctctttggttaacacagcacagactttgtttcatgtattatgtggagggttagaggtgagaacctgattgtgttaacatgctagcgaggcttcagaagcattagtgattggataataacggggcatcgttaaatgtcaggctgaggtgttgggactctctaagcattggggagcccca

SEQ ID NO: 427286 - DNA, 148 bp, Homo Sapiens
acgtctctcttacaatgtcacaatcttaaaataagactttctatcctttaattactaattttcacctggatatgctgtatgcatagcatttatttccataacgatggtcacttctttctccagagcaaaaaacaaacacaacaacaac

SEQ ID NO: 427287 - DNA, 241 bp, Homo Sapiens
gctcagaatattaaacgtactgggaattaatcagaacgtctccatatgactatttccaagtcacaatcataactttcttaatagcaatggttatatatgtggccagatagtattcagtttcacagtaatgtctggtcacataaagatagcaaagcatagacatagtacaacaatttattatttctgctgattgccaaatgtgcataaaactataaagatatcttttccagcccaggtgaca

SEQ ID NO: 427288 - DNA, 317 bp, Homo Sapiens
tagctaattaaccacagagacttgggaagaaatctattacagagaccaaatacaggtgaacaaaaagcaagtggtaatgttgccgcttattactgttatggccattaatattaatattaatgctattatttagttttattattactctgatacatcattattattgctgtctcctagcatcttcaccataaatctatcaccaaatgttttagaggtttaatattgttatagttatgtaattaaacaaatagaaataatcgttgcagaattgcagagttacataattattgctcctcaatggaaacgataaataaaac

SEQ ID NO: 427289 - DNA, 135 bp, Homo Sapiens
taacttcataaacaattatgagggcaaagaagaaaatgtatctaactctctttgggcagtcaggaaggtttcccagaagaagtggcattctttatgagattcagaagctacctgtaattaaaaagaactgtattt

SEQ ID NO: 427290 - DNA, 378 bp, Homo Sapiens
  misc_feature (94)..(224): n is a, c, g, or t
ttatgcaccactgtacagtgaatgaggcatcttagatcattcagccccaagtaacgtcaccaaactgtagccaccatgagactgcaggtgagannnnnnnnnnnnnnnnnnnnnnnnnnnnnnnnnnnnnnnnnnnnnnnnnnnnnnnnnnnnnnnnnnnnnnnnnnnnnnnnnnnnnnnnnnnnnnnnnnnnnnnnnnnnnnnnnnnnnnnnnnnnnnnnnnnacccctataacactcataacaattctatctcccaggtaatactaagccactagacacctacttaatgggcacattctggggccctacactcctcctgccggtgcgcttacataactcggcttgtatacagggggtcaaaacctagcttccaaat

SEQ ID NO: 427291 - DNA, 132 bp, Homo Sapiens
catttactgttggcacctggcttcatacagaggtgaaattacctgttggctcagtaatttgattcccctgtatgccatgtcaaaccagtggagatgtatttgtttaggttatacatagttctttcacacttt

SEQ ID NO: 427292 - DNA, 136 bp, Homo Sapiens
cccaaaagccaagcttctatttccaaattgatttccatagtagtgaagacaatggacaattccaacaccagggaacaggtgccccagccgctccatctactcaccaacacttgtcttgttgggcttttaaatttcc

SEQ ID NO: 427293 - DNA, 188 bp, Homo Sapiens
gaccgacatctgcaccactggaagatctttgaatatatatttgattttgaaaccatcttggaaaagtctacctagttatctaatgagacagataatttgatacatgcattgtttaaaaaaacaatagctttgttacaaagtttaattcaaacttaagatgagtaaaaaccctcttatcctaccagacc

SEQ ID NO: 427294 - DNA, 411 bp, Homo Sapiens
aacgtgcaaactgaccactgatgcacgactttgtaccagttggatgcattggctcccagaaacccagccagcttagtgcacttctgcagccgtccttggagctgtgaacatacctggaggggtcagcaagaaactgaaatcaaattcagatcaaatagaagttaagaaatagaaatctcaacacacaggatgtagatctaaatactcacaaaatattgataatgcgcttcagccttctgtgccttgaaagaggttgttctctcgagttcctgatgtttcctcagggcctcagaataaaaaagggactgagaaaggaactagcatttttggggcacctgctgcgtatcccactgtaactaaagcatatcatttaaccttcacgccagctgagggtaggtattatcccacttg

SEQ ID NO: 427295 - DNA, 181 bp, Homo Sapiens
ctcagctccacagggagagactgaacctgtgtcttttcagaaatcaaccaagtcaccccagcaaagaggatgcaaaggagaggtaaagccatgtcttcctcgagggtgggacccggcaggtccgagtattccttccagacgctggcaatcaggactcctagctctagcgtgcgagtgttac

SEQ ID NO: 427296 - DNA, 228 bp, Homo Sapiens
  misc_feature (86)..(86): n is a, c, g, or t
  misc_feature (158)..(158): n is a, c, g, or t
ggcatcttaagtgggggagtttgaacgacgttgccaagacacgtgctgcagcatttgatcttttctgccgcactggcttctgcaanttaacatgctttcaccagtgaaactcaggttgcggggagagcattcttccaggttcatgcctgttgtcatgngagtaattataattcatgtctccgttcacagtgtcctggtttgtagaataaaatatctggtccacccacc

SEQ ID NO: 427297 - DNA, 421 bp, Homo Sapiens
gtacagctctcccacctcttccccatgaaaagtcactgcaagttcctaggaagcagacttctcttatccctttgccttcgtggcagaccctgtgccatgctttaaggaccacaaagctacgtgatgaaacagacaggagaaagggaggatgggactatgtttactgtttgtactcagagaagtgttcaaacaagaaaagggaggatcccttcctgtgagtgttattttatcttaaatacctttccagttgtcatctttggactgttctcagacactgaaagacttgagctccttcctgcatgccacagaagtataggaacattcttcgcgttgcacttatggctgaactgcacaggctaaattatagcccgctctactagccacacaatccaatctcgtatttataattctcttctatctc

SEQ ID NO: 427298 - DNA, 437 bp, Homo Sapiens
gtgtccacaaagtcacacataatgaacacttaacaagctgcattacaacatcttggatttactcagtaaactgccccactaaaatgcaaccatcatcaaaggaagaactatacctagttactatggctattctattaagatttggattgacaaatcttcgagtgcctaggttagctctaatccttatgatgaccctccagattggtattattacttttccccagttttaatggtatggaaataaactaagaggaattgacttcaccatgctatcaaaactactaaatagtaaaacccaggatagaatctagatctgattcctatacttatgttttaccttcctaattaacctcttttagatatacaatccaatttgtcagttttccttaatatgtgtagcaccccaaacagaatccaatgttcaacaaacaatccaa

SEQ ID NO: 427299 - DNA, 318 bp, Homo Sapiens
ccaccaagtttggcgtgttttgtgttcaatcctggcaatcctaaataagggaggcgatggcaggctgggtcgttgaagtgaggtctcttttccgtttcctgggctgctctggaccccaccttccgtgaaaacaccttgggctaagcagagtgggaacagggaccaacgccacctgcttccagtgctcagcctggtgggaatgactgcagggtgttctggtctcaggatggtccactcttgagctatctggtgtgagccatatggaaactcctctccctctggccccttctgctattaaggagggaaattttaccttaa

SEQ ID NO: 427300 - DNA, 269 bp, Homo Sapiens
gcgctgtctcacagaaaaaacatataaaatctagttaatggaagagctgtcgttgtatctggcaaatacagtgatgctgcctgtcaggaagccgggtgcttgtcctctgtatagacttacagcagtaagcaggtcaggtacacgcagtctcaagtgccctcctagaaaggagctcatagtcttccaggatggctgggaaacaatttcaggactgtatgtgaaatttagtcccatgtccccaatatctcccatatcctgtagcctaccct

SEQ ID NO: 427301 - DNA, 424 bp, Homo Sapiens
  misc_feature (366)..(374): n is a, c, g, or t
atcgtccgacatttgcaccactgggagaagggacagagaaggtgtttcccacaatgtaagaaccacttccacatgggggagtcaaataagaaataagtgagtacgccaagccacacattgtaagccagcagtcagcattccccagaattaaccagccccacagacatagccacaggacttacagacaagcatactgagcctgcatattgcaatgactcttggacacatctttactgagaactcacatcatcaatgtgatcccagcccagctgtcttcagaaataatagaacctaaaacacatcctataaacacacctcttggcacttaaacagagtttttactatgttgatttccgttcactcaannnnnnnnnccttctatatgtttcctatatgtttcctaattccccattagtctggggct

SEQ ID NO: 427302 - DNA, 285 bp, Homo Sapiens
  misc_feature (91)..(213): n is a, c, g, or t
atatgcaccactgccctgggctcaagcagtcctctcacctcagcctcccaagtagctgagatcacagatgcttgccaccacacctggccannnnnnnnnnnnnnnnnnnnnnnnnnnnnnnnnnnnnnnnnnnnnnnnnnnnnnnnnnnnnnnnnnnnnnnnnnnnnnnnnnnnnnnnnnnnnnnnnnnnnnnnnnnnnnnnnnnnnnnnnnntgagccaccgcatctcgctccgtgctgcttattgtatacggttttctgttttttaccacctgtaactccacc

SEQ ID NO: 427303 - DNA, 336 bp, Homo Sapiens
cgacagacatctgcaccactgggaacaaaggctttaagctagttcatgaactcatttctgtattaacctattgggtttctttttttacttgacttcagggctgctgagagatcactgtaatcctcaaaccacttggtatgatgatagtgtccctttctttaaatggcttctattctctccttcgattttaaatttcttaacctttaactgtgctgtttcatatgtgttatcctaatcagacatttcaaattacccacagaagttagaaagaaataatcaaaaaagaaagaactgaggagacgacgtttatttcattttaagaagagaagccaagca

SEQ ID NO: 427304 - DNA, 307 bp, Homo Sapiens
  misc_feature (172)..(225): n is a, c, g, or t
tgccagataaactggctgttgtggaccaattactagccctctttctctgtataaatcgtccacaacatccagtgtactgagcgattacaaagtcaggataatcttgtaacacatggtgcgttagcattaacataactacagaaggagaattggcttataaacctgaagacannnnnnnnnnnnnnnnnnnnnnnnnnnnnnnnnnnnnnnnnnnnnnnnnnnnnnaacctgaactatagaagcatccttgagttgccaacgttcacagtgatgaactttcaaaaatagcgaaactggctgcagagca

SEQ ID NO: 427305 - DNA, 286 bp, Homo Sapiens
cagccacatcgagattgttttatctccaagtacaggctcttatattgctctaccatagagaagattttttttgagatcatagcacacatgctttccattgttcaaacaagacagggaatacagagtttgtttctttcatatgatcaaaaaagaatgactgtgaacgagaagttatgtcaaagatttaggcagccctacctatggagatgagcagttgcttcggaagtgccagggcgcactctggaatgggaacagctttgcagggttggtagaggaagtgtgagat

SEQ ID NO: 427306 - DNA, 211 bp, Homo Sapiens
ggactgggccgacatctgcaccactgtataagaacacgctagagtcaatttcaacactctagacacagtaacaatcttctttttttctctttgccaaaaagagtgcaatacccagattatagtattcatctgcatctctctgtaaagttactttatgagagtgggctctctcaaaggcaccacgtagttgggcctcgactctaatgacacg

SEQ ID NO: 427307 - DNA, 199 bp, Homo Sapiens
atagctggaccgacatctgcaccactgacaaggaaaatgaaagcattaaattcagaacctagccaaaacaattagggtgaagaaaatggaaactttcaaattcactagtatccagcttaacattgttgcaatatcattaatagtacaagccatacaaatttatgtataagtaatccatttggactatacatttgaaatt

SEQ ID NO: 427308 - DNA, 439 bp, Homo Sapiens
gaccactgttgatcatgtcttagaaggagaagacagctattttacttaaatgtgacacaacatttaatcactggaacttaatggtatgcattagaactgtttcttgaggaacacagtctctgacttaatgaattttctagcaagtctcaacctttctcttttgggtgtaccagaattctctcgtcagttttccattagttggatttacctgttgggtttaattctttcattttgtatataggtacctctgcttggtttcattttgctttcctaagcaagggagtagaaacagatgttaagactgaaattctactatatttaggaagaataaataaatatatcttccactatggtataatggaaagatatactgacctgggcatactcatgggcaacgtacctgttgtaaatcctctcctttgcaaattgtacctacttt

SEQ ID NO: 427309 - DNA, 452 bp, Homo Sapiens
  misc_feature (102)..(156): n is a, c, g, or t
gcgcaccactgtgatattcaccctttcgtaacagatcttttcaaccaggctttctcaatttcaccatccccacctcccagcagcacatctgaagcccatctnnnnnnnnnnnnnnnnnnnnnnnnnnnnnnnnnnnnnnnnnnnnnnnnnnnnnnntggttgaactctcatgagttcaattgttttcatttctagaccccacaaataagtgagaacatggaatgtttgtctttctgttcctggcttatttcacttaacataatgatattcagtttcacccatgttgctgcaaatgactgaatctcattcgtgattaaatagtactccattgtgtatatatgttacattctctttatccattcatctgctggtggacacttaggttgcttccaaatcttagctattgtaaacagtgctgcagtaaacataagagtgtacatatctcgtcaata

SEQ ID NO: 427310 - DNA, 438 bp, Homo Sapiens
ccgacatgtcgcaccactggctcttaaatctggcacttcccaggatttcgtctgccctcccagattcaacttccattatctcctaagcctcctacctcagccccagcctgaaccccaggttccaatttctacccacagacccggcctcttccctgggcggtccacagaatcctcgaagtcggcctgagcagcagcaggtcatcagaatcttctcctccttctgtttcccacacaggcttgagaaagccggaaaccagaagccatcctgtactcgtctctccccgtctgcagattcatcactggtctttcgtatggtgccatctctccagttttactgccatctccttagtttagattctcgtctctcattgacctctttgcaatccagtcttctcatgacaaccagagccatgtctctgacatgcagttttgtctgct

SEQ ID NO: 427311 - DNA, 461 bp, Homo Sapiens
actgcaccactgtatcacactgagaagaaaatactgtgtcattcaaagtcaaaggactctaactcaaccaatacttttgcttcttaatatctccttaccaaagactgtacttatccctgtcatatacatttatagttttaaatagttatcagtgtctgaattattcactttgtgatctatttatagctaatactgactcctctgggcactttactggcaggctttcccagaagtctacctgtttagaaattcaagtttaataacttcagttagtctagactgtatgttgttaatactctatagtatggtttagtattggtttacagctttttataaggtctttcttagttatctatgtaagtgtgtgtttctcaactgtaagcattcacagaagactaaacacagtaattcagtacaatgttgcaaaaacactcacattaaaaacagaagttccaggccag

SEQ ID NO: 427312 - DNA, 452 bp, Homo Sapiens
acgacattgcaccactgcctatttcccctattattaacatcttgcatagtgtgatgcttttgttacaattggtaagcaaatattcatacatcattattaactaaggcccacagtttgcattagggctcactctgtgttttacattctgtgggctttgacaaatgtttaataccatgcatccattattgcagtatcattcagaatagttttgctgccctaaaactcccttgtgttccacttattcattcctcccttcctgcttctgacagccactaatatttttactgtcatcatagttttgtctttctagaatgttacatagttagaatcatagagtatgtagccttttcagatttgttcattcacttaacaatatgcatttaaggttccttcatgtctttttgtggcttgatagctcatttctttttagcactgagcaatattccattgta

SEQ ID NO: 427313 - DNA, 362 bp, Homo Sapiens
ttgagttccgtagaccgagcgggttatctatgagggagaagagaaccattatagtggtagaatagtgcacgcaggagtatcacaagacaaaagacaaaggcagccgtactcgttagatgccagggacagtgctaaccacttcatttatatcatccaatttgatcctaaagcaatcttataagctgggtatattctcatttcatagaaaaagaaacaggcctggagtgccctctcagttagtcgatagtggagctgggagctaaactgttgcccaaactggatccatccagctggcacaggtcataggaaccccggggtctcagcacttcccagatgcctctgttagtgcttcctcttacttg

SEQ ID NO: 427314 - DNA, 386 bp, Homo Sapiens
atgagctcgggccatccttcctctctcacgattgatatttcgcagcaggtaggccacctttcctgggcaaatagttgttgattgtgaaggcattgtcttcctccgtacccaagttcagataactaaacgttaggttcctgagactttgctgactttagttatgtttagttcaaaagatgattgaaatatttgggtattcctctttgactttttaagcacctctaatttactggtaacccagctaagagtcttaagcattttaagtgatgttcatctgtgtccatcaatgtttttttattcccttgaaaaataattaagatgtagtaagacagtgaaagcaacagattactaacctagtttctctcttactatagattgcttatgcc

SEQ ID NO: 427315 - DNA, 251 bp, Homo Sapiens
tgagctaaggcaaccggccccacagaacacttttaactttaagatactttttaatttttcagatatctcagccacttcaagagtatggtaataatttctacttagcagtaggaactgaatcaaggtgttggtaggtggggctatgcaggattttgttgtcttctttattaaacaaggtcttgtctatagtgagatttcttttaggcttagaatttaagttaattttgtagttcattttaggctgttcttta

SEQ ID NO: 427316 - DNA, 469 bp, Homo Sapiens
tatttgtacctttgccattattatcccagcagataaacaaatgaccttcaagtggtactctcagcgttactcaagactcagtggttaaacatttcctcctctcaagctctttcacaggtcagcttagtcaggtcactgttcttttgataatttagtgatgagagaactattagattttcagtttcctgttctacaagtgagtttgaacataaatggtgtcggattttggttttgaaatctggctggtcccagaatcacctgaagcttttctttcctcaaacatttccaaaacttaccccaggagattctggtgcaatgagatggttaaatgtggtagacttagcatatgcagtgataaatactgcaatctttcctacatccccactaaaatacctaaaaatgatattcattttaacccacaaggacagatgagagaggagaccatggcagatgaaatagcgaagctgca

SEQ ID NO: 427317 - DNA, 403 bp, Homo Sapiens
aaggcgctagcctctccttggctacagtacaatttcggctacctgtaattattgaattcccattaagcaactacactgggaatcctgttattaaccaatttatcacaccaaggaaccatgtatcacagagtaatctaatctgagttcttgttaacaaaatgactcgactttatctgtcgagttgattcctgtttgcactccccattatgctgccctgggaatctgcaaccagaggcaggttctttggtagagggcacttatgagtctgtgagtgcccacttggaaacgcctgccagcaagttgaccctgaggtccgacccccagcccatctccccatctgtcacatgtgagttgcagtggatctgcctgtgggatgacgcccgtgcaccagccaggcaacgtg

SEQ ID NO: 427318 - DNA, 334 bp, Homo Sapiens
tgtttcggatgaaatggcagcagatttattcattaatttatcaggtagtccttaagtcttatctactgtgtccttggatctgttctaggcactaagacagatacagggacttggtatatacagaatgtatagttatacccaaacatgttaatacaatacatgactaacaatgtagtttaggagagaagactactcacgagaaagcataaggggtctgccatgtgtatgtctggtggtaaagtattccaggtaagggaatgtttcagagcctttgcggaacagcaggggagcgaatgtggctagagccaagttaagtaggaagtgacgtcagaac

SEQ ID NO: 427319 - DNA, 352 bp, Homo Sapiens
ggcgtgctctctcacggatattattatcagctaatatccagagaaggctgggaaattatagaattatttcctacatctaagggactcactggctgtgttcagagtgtcatacttatgtgccatggcgaaataaaaggaaatgatttgggaggtctgcctggaaaggcaaaacctatatgtctatgaagttgcttaggaactctcataagccactcccaacttatcaaatgcgaatttatatttgataaaaagataggaaattgttgaggggaaatactgaaagggtagtcacagttggatagtgttagactagaaagtgtcttagaaatggcataaaggacgagggaaggat

SEQ ID NO: 427320 - DNA, 481 bp, Homo Sapiens
cttgatactcaccgctcttctagacaaagatggtgacttatgtgtccttgtactatgatacttagctggcatattagttaaagcaaaaataccaaatatcatgagtcttaattaactttactattatatgttatcatatacactcttggtttatacgctagtacactttttcattttcttaatacttatacctgctagggatccttcacatttgtttaatacagtccatttaaatcacaggtcctatagcaccttctgtatgctacctatcgtgttaggtactaggaatgtaaaaatgagtaaggttcatcctagctgacaaggggctcacaatggaggagaaaagacagataaacagatacctgccacaatttctactcagtacaaagtgtgatagatgctatgatactaggaagcccagggtgctttgggttagcatatgcatgacggtcatacataatagtataacttgcctagttgc

SEQ ID NO: 427321 - DNA, 401 bp, Homo Sapiens
ttcgagtggtatggggctccaggtgactcataaagcgacatagtgcagttcttccgagaatgtgggacatggctagccattaagggcactctgatgcgtggcagctttggggaaataaatagcagtttgggaaactattctttgtttaggagagactttctcccacggataacgtgtaggatcttattttagactgactgttaagtctctgaagttgccccttttcatggttgtgtatctgactcagcatgggttgttcatctgactcagcatgggttgttccaggagaacgcgggaccaaatttaacagggcagaggatacaggcttgaagcactggctttgccaatagaagactttctaaggaatgactttgtctcattcaacatttaaattttcactc

SEQ ID NO: 427322 - DNA, 269 bp, Homo Sapiens
ctcacggaataaaatgtatccacttcaatccaccgaaggcaaaaaccagctcattacattgtctgttggttgggtgggtgaattttttggcaggggttgtgtatgttacatgaacatttggggaggtgagggagatataaccaatgaagggggaaaggaggacaggaggaagcgcattcttgtaatatcccttagcttctcttttataggtttttgacacctggtttcagatgactccaggtcagaaaatgtttttgggttttggggtt

SEQ ID NO: 427323 - DNA, 312 bp, Homo Sapiens
tcgatctctaccattcctactactggtttgcatagaaagagagaagccagaagtctggtaagaattcctaccagtctaccagcatgcctggctgatggcttctgggttccctttccctgagcagacctagagaccctgcttgccacaaccctggggaccaagccacaacaccaaggaaaaatcatcttttttccatttcatggaaactttgaactagacaaaagtcattttctgttagaaagttaaggtttgtactgcatgttgccatgtgtgtcctgagaagggggagtagataaagcagttgtctacata

SEQ ID NO: 427324 - DNA, 368 bp, Homo Sapiens
  misc_feature (255)..(273): n is a, c, g, or t
gtaatgctttcaaggtttatacacattgaagcatgtatcgatactttatttctttttattgccaaataacattccattgtgtagagtatactgcgttttatttctccattcatcagttgatggatgtttggttgattccacttttcagctactctgaataatgctgctatcaacatttgtggaagggttttcgtaaggatatgtgttttcatttctctcgggctatatgccgtaggattgtcaaatgggtatacnnnnnnnnnnnnnnnnnnnggagacggggccctcactttgtttcccccgggcgtgtagagcaggggcacaaccacggcctcattgaggccttcgacccccaggagtttgctgga

SEQ ID NO: 427325 - DNA, 104 bp, Homo Sapiens
ctcctgtctctcacgatccttccctctcccacgtcattttggtccctagccaaaaagtggtggtcaaccctctaccttataaggcatctcaaaaccaacctccc

SEQ ID NO: 427326 - DNA, 382 bp, Homo Sapiens
gcgtcctatcagtatctcccgtcaattcagtactcacctttgatggctggcacctttactaatgtacaagaataagaactgtaaagaacaataatctgtttcttctcttcacccagctttcttcagaaggacctgacttcagtacacataaatcatcctgcttggctgtgaatgccattagttttactttcacaagaatcgtgtcctcttgttgatctctttccattttcttcatactctacatctactttctaataccgtcacacttcctttctaggccacttctccctttttgccaacttcaggtggccaaagaaactatgctatcagcttcatctctcttgtccgcaggctgatgtgctcctgaacatacagtcctaat

SEQ ID NO: 427327 - DNA, 169 bp, Homo Sapiens
caagctcatattactccctctgactggccccaaatcccatccaactttcaaggcctagccccttagggaaaccgttcccagcccctaacaatggacatcacttcttcctccatgcactcaatatgcagaagtgaaatgaaatgtttgcttttcagctcaagagaatcgt

SEQ ID NO: 427328 - DNA, 271 bp, Homo Sapiens
  misc_feature (35)..(35): n is a, c, g, or t
gggccatctttccctctctcacgtgttggtcaggnctaaggaagagtacaacgtgcacccccagcctgatgcagacgcacaacacctcgccaaagggaagggatgtttctttattataaagttccctctgtgcgcaccactcctcacgtactcgaagttggagaacgttttagctgcaatttgattctctccactgcccctcaacttccacaaaacccccgacctcgaagaaggtaaggaaaatagtgcagcagtgcagcagctgggggag

SEQ ID NO: 427329 - DNA, 211 bp, Homo Sapiens
  misc_feature (74)..(108): n is a, c, g, or t
gagtcggcccatcttccctctctcacgacatacctttccttcagacttatccattttcaaattatacaattatnnnnnnnnnnnnnnnnnnnnnnnnnnnnnnnnnnntataggactaaaagagaaaaatagaggtcaggactctgggattcactccataaaggaataatagctgaaggtttgggagtgaggagagctcagaaaaaccaca

SEQ ID NO: 427330 - DNA, 432 bp, Homo Sapiens
tatatctctcacggcttcacataattcacaggctgccaccagatcacaaaccagcctcaggtctcttccaaggtcagtacccgatttgctgtggcattcatgtaattctcggcacttaatatgcgcgtaacggcgctgctgtttagagtcggtgcctatctttttctaggtgtccctgaggaagtttttgaatgtcataccctgagtctgtttcccatgaacctgcagttcccatcacactttgcaactctgcagagggagctcgtttttagggtcccacttatgttagggcaggactaactgttcatcccagcacacacaggacatgcatacgtggctgtgtaatgggtgacagttacccaggggtgacctgaggcaggcttgtgcctgaactggttgctcagttaacctcactgaacccaggctcattgg

SEQ ID NO: 427331 - DNA, 219 bp, Homo Sapiens
  misc_feature (92)..(114): n is a, c, g, or t
gcccaactctccgactcagactctcgctctgacccccaagtcaaatatggcaggtagcactgccttctttaggggtcttccagattatgctnnnnnnnnnnnnnnnnnnnnnnntccacttttcagaaacatgtgggtttccacttgtcaaaaataaaacaaccctcttgatcattatagacttggggtcttggctagagaacaaatgaaaacagaatt

SEQ ID NO: 427332 - DNA, 356 bp, Homo Sapiens
ccgagtcccactttgactcacactgagctgagtcacctgaagttcttgcctctctcccaccttgtatttagtttttcattttagcccagaagtatagtactttatgtggattcctggtgaatttttaacatccaagttttattctagtctctctgatctttttggatccagcacgtgtcacccaagccattggctcttcaacttcacgtcacccatacattttgtgaggaagccatcgatattttcccatgtaaaccatattaaaatgttttatatggcaaggatcaaatactagtctccacccacaaggctgatatagattatccagcctgttttaagggaagtcatgtttcttt

SEQ ID NO: 427333 - DNA, 315 bp, Homo Sapiens
tttctctctcacggacacattcagaaaccagctcatctcttctttgatacattgcccagctgtcggccctggtgtgttgggtgtgtcagtgacccatgcagtgaatccagaattcacgatgttcaggctgtgtcatagtgcaatctgtgatgctaaaaagtgcacaggttccatagccaagttacaaagacgctcacctcaggattcgataaagagatagtcaggcgctcttttgttatcttcgcatctgccttcctcaacaatgcagctccaggccaatcataactataaatggaggaagttcccctgaagtag

SEQ ID NO: 427334 - DNA, 125 bp, Homo Sapiens
atgcaacacgccaccaccccgaatgaaattctaacaggagtttccaccaagtaaaccttttccctgcctgaatacatcaacactgaaaataagcatcatcttgggtagctgccgaaagtcacgtt

SEQ ID NO: 427335 - DNA, 576 bp, Homo Sapiens
tggaaccacccaccggctgatatgcagcagcagcaaacgaatctaagtcataagatggactttaaaattcgctctctctcatcaatgctggaaatggccagtgaagtgattattcaattatttagttttttatttccacctctgtactaactaattggatttgctattttaaatgtcttactaaaatattaatcattttctattgagcctattgctacagtatttccttatcattctgactccagcgttattattacacattttgccttctaaattcttaacatatttaatcactccaaaaataccagctataaaaggtagttactgggcaacaagagacccactgaactgaatggctggcatgtgagcgggggaggaaaccaccgtctaaacctgcagcaggaagtggccatgaggtcagaggtcctcggcagaaaacacgtgtcacagaattaattatgaatagaagaagtgagtctaaagactgtatgagcaaaggaaaattcacatacaggatggtcaagttgcaaatacccaagtgatggcaccacgctgccgccttcacacgaacaggtg

SEQ ID NO: 427336 - DNA, 193 bp, Homo Sapiens
tggaaccccgaccggcggggagaaccctataggcctcttaacccgagacactatggacagcgtgaagcaaaacgcgggcctgtgcttggtgggcctgtgcaggaagttccccgatcttggccccatgggcgaatggacattccgagtggtgcacctggttaatgaacaacacttgggtgggggaactggaggc

SEQ ID NO: 427337 - DNA, 375 bp, Homo Sapiens
gacggctcccctctcccctatggcccaggcgaatgcacgtgaacctttgccagacctttccctgtgggtagtgctcagctgcctcaaggcaacattcccagaacagaactgaactcttccccgggtccccgctccaccaacccagtcagttccacagtgtctgtgagtgataacgcaacatcacaccatcctccccaagcaccctgtcagaggcccggaagtcattccatgtgcctcgtccattaaggctgagctgtttaggctgctgtagcagaagggcatagactaggtggcttataaacaacagaaattaacttcccccagttccagaggctgtgaagcccaagatcaaggtgccagcagattccgtgtctg

SEQ ID NO: 427338 - DNA, 200 bp, Homo Sapiens
ccgtgcccttagcacgacatctcttgtcgctgttcattgttcgtgcgcacctttgccgcatgcatgtacttctctcgcaggctctaacacagtgctgccacatgtgcctcgcggatctccttagtgagctccatcttgtagctgagcttctcctccgcctgtccagtgaaactgttattctgctccagaggcttttgcaa

SEQ ID NO: 427339 - DNA, 482 bp, Homo Sapiens
ctctctctatagagatactcccctagacaaggacagaggccccaatagcaatatctaccaaaatttcaggggggcccaggttaggctctgaagtgagacaccctaggacagtgggggtcagggatccacatttattgagctcttctttatgggcacggcactgcacaaaacactttccataggagcttatttaagtcctcataaaatcatagaagatcagtatctatcactttccaaactcaggaaccaaatagaattggctagtgagggaagcttgtatttatcccctttgtgtagcacagaaaacagaggggttagtaacttggttaggtttgcacagcacctcccaacaggacagggtccccttctctgtacatcggaaaattcttcttcctcatgaggtttggcaccaacctccctcgcgaaaatttcgccagggatctcacttttgccgagtctgttcaaaccggctcggcctgatc

SEQ ID NO: 427340 - DNA, 674 bp, Homo Sapiens
aagcatcatttgggggcatgtaggtggaggagcgaataagagaagaaggagggatggctggagaggaggccgaggccctggacagttggggtggagcagctcctacttcgctggccaggcgtcgctgttcagccagtacatctcatcagctccgtgcaggctgcactcaggaagacacctttgagcagttccttctgaacggtggtcctcgggctgaaggctggcctgcacctctgtgcccagaatcagttgctctctggtgctcttttctcaggtgtcttatggagcatagcccaggcccatgcagggttaggtttctcccagccttactccctgcctttccacaccgcgtctgtgtcgggggcaatgtgctccagctcctgcgcctgctccctctggcgtccgcggcctctccccttgggtggctggagatccagatgaatgagctgctcctcacccagacgttcgagggcttttgtgcaagcaccaccattcagcttgctgatctttaatactgagccgccagttgctttcccgccccctggcaagctgagccctgagacagagaaggatgagtaatgaggagtaatatcttccttttgatttgtggatggccctgtcactcaagcaacaaaagctggcattgttgctgtagataacaaactctccctcat

SEQ ID NO: 427341 - DNA, 158 bp, Homo Sapiens
ccaggcaaacctgcccttctcggagcctggtggagatcaccaccttaccccaaaaacctcaagggacccacagaatccgatcattctagctcagggtttcttcactttggcaccataggtattccggggctggatgatttttcgttgtgaggggttat

SEQ ID NO: 427342 - DNA, 455 bp, Homo Sapiens
tacccccagaggcctgcagagatttagtactagctccctgtttagctcaatgagccatcttccttctggtttcttgctctaaaggaaaccactgcaggcctcggctccctttcccattaaaagccaccggggccatagttttcaattagctctgtcagcccatcaccctgcagccgcccaagttcaatacgtcctcccttcccccagcttctggtctccaccaagcacttcacaccttcctattgtaaacctgtccagagcaattaccctgcctgcacttggacagcctcaatactgcacttctgtctaattaatagctgcaaagctccgtcggcaaatgcagacctgcctcggaacagatgaaatgccgagaaaacggtcaagctctttcataaatgcttatgcacagccaatttccttaagttacaggaaagcaaattcttccattcttctag

SEQ ID NO: 427343 - DNA, 280 bp, Homo Sapiens
gcatcaccttggacaagcacaccagctgggcacaggcggtttccgccacgcaccagtacgcagcggcagcggcatgcaagcccaggcatcagcagagcccccgctgcacgctggtggataccgggcatcagcggagcccccgctgcatgctggcaatcaatcccaggcatcagtggagtccccgctgcatgctggcaatcaatcccaggcatcagcggagtccccgctgcaccctggtgatcctgagcatcagcggagccccactgcactggcaatcccg

SEQ ID NO: 427344 - DNA, 224 bp, Homo Sapiens
ctgcttcctccaacttaaatttgtccaacggcggccttttactataggctaacgtactagggaaatgcccacagcaccacctttcgcctctcctggctttgactccaaagggctgggcacaccaagcttgcagaactgaattaaatcagagaaccatctcgccacttacatgaatttcccaggtagcaaagctttaagcccctcaagcttctcttacgatgcct

SEQ ID NO: 427345 - DNA, 142 bp, Homo Sapiens
ggtgcagggaccttacctgctccaaggccagaggggacctgctaaacggggccaaacagaatcacagatgaacgggagagagccaggcatggggtcagaaagactaaaattacggtccggttcacttactctgcctgggctg

SEQ ID NO: 427346 - DNA, 352 bp, Homo Sapiens
  misc_feature (56)..(56): n is a, c, g, or t
  misc_feature (75)..(154): n is a, c, g, or t
ggaacccccgaccgtacttagcagaccacggtagttagaagctcaggctgtgtggncagaccctattgcaagctnnnnnnnnnnnnnnnnnnnnnnnnnnnnnnnnnnnnnnnnnnnnnnnnnnnnnnnnnnnnnnnnnnnnnnnnnnnnnnnngcacgacaccggtgtgtaactcataagcactgtgagaattggttgggacaaagcatatcaagggcctgccacatagtaagcaggtcacaaaaagcagcttgcagaggatatcacaggtctactggtgagaaaaaggacgctcggaggagtacccagcccacgctgagtatttgaaccggaacgtatcacttagtcttt

SEQ ID NO: 427347 - DNA, 264 bp, Homo Sapiens
gccatggtgcaaccccgcagtcagaggccgaggggtccttcatccaccggaaccggacgcagggcagggccaccggatcccccgccatgccctcacccacaaagctggacgccagacgctgtgttccatgaatcgttccccagaaaacccactggtgaactgcttctagttcttcgcgtgggcagtcagacacgcatgatgcggcgcttgggtttccgtggatcccttatccagccgcccccaacccctaggtatatctccgcc

SEQ ID NO: 427348 - DNA, 135 bp, Homo Sapiens
tattgccagcagatttcacggaaaaccactatctgcaagacggtactgactgtctccctcgctcgaaattacacgggtcactgttactaccactggacatgtacggggatattcctgagttcagcagctcacgtc

SEQ ID NO: 427349 - DNA, 252 bp, Homo Sapiens
agtcctagtacagatgtggatgggtgtggctcctaacacgggaactgcggtggtggtatcgttagaagtgccgtgtatgtgtgcttgtgtattcccacacacacacttatagcagagtgcagtttcctggattcaccttggatgcacataagcaaatgtgaaattggtgttatgctcaaattgttccctgatatatcaactgcattggaataaattcacattttcaaaataagcattatagcagaactgatg

SEQ ID NO: 427350 - DNA, 117 bp, Homo Sapiens
acggatatataaaggtatatggtactacataacacatgatgaaaactaaatatgtactcaggtggtaccatgtaaagcaaacatgtaaataatactaacggcaagacataggaatat

SEQ ID NO: 427351 - DNA, 160 bp, Homo Sapiens
ggcagtaccggcagaggaacagctagtgcacaggagacgcatatatccactgtttcggggagaaccagacacagaggaggccaacaatcaaaacctgcaggtggcatgcgtggatgactacaatgatggctaacagcacactccctccgtgcatcgggcc

SEQ ID NO: 427352 - DNA, 186 bp, Homo Sapiens
agcaggttggatggcttggtcaggggtgcccaggactcatgcacaccaggctgttggcaacaaagctaataattccagagcccagcagcccacgaaggctcagggagcagcctggttacagagtggtaggatcggtgcctgcagcagcaggagggagagactacgagaccacattgccacaagcta

SEQ ID NO: 427353 - DNA, 228 bp, Homo Sapiens
acgacgagaactgaagacatatgccataacgtgagcttagttttctcactgaaaaatgaggatgataacagccctacttggcctaggaagtgattgcatgagagagtacataacaatgtctagaaacgtttggttaagaaagccatttgttccttctcaaccctacaaacctgactcaccagatcctcccgtgttacatccataccgcgttccatccgtgccacagtc

SEQ ID NO: 427354 - DNA, 389 bp, Homo Sapiens
gacaagtagaatgaaggcagaacaagaggactgaggggccactcaaggcttgggcaaggcaatgtcagatgaggtctgtattttgtactgaaagagtaagtctggaggctggcacactaagctaagctaaagattgagagtaacccacaaataggatctggggggtgatgtatttgcaacactgtaaggaggcaaaagcaatagatgctgtacagatgacctgtgccagacgttataattgggaaagcactttcacatatgaaaagctattggactcaatgagctcggtgggcataactcaactggtaattcagattgcatggcaaagggagagcaaggggcgaccaatgggcagatatagagagtgatctgtaccgaatatgtcagtg

SEQ ID NO: 427355 - DNA, 138 bp, Homo Sapiens
aaagaaaaagaagtttggggaaaaggcaaagcctcacaatatcaccatgggaggtttttgtagttgctggtgggagatccaaggtgcatagttcatctctgtggacagagaggtagaactatggacttcactccgttg

SEQ ID NO: 427356 - DNA, 384 bp, Homo Sapiens
cacatcgtaatgtcagagtactgtctaggtaccaagctcacagtttttctctcgtttcaatgacctggagccctgttaaaatccccgtgcctgtgaaactgtaagctattattatggtatattaaaatggtctttgtgtggtttactaccttaagaaaatgttgatagtttttcagtcactgtagaagtacacctccattttaaatgtgctgcaatatgaatgaagtgacctgtgtttcatcacttgttcaaatgattcttatccatgtttttgtacttagtaagggccatacgtagtgggattaaatatttgtgcccttgctttgaaaacaaaactgaaagtgaatgacacataagggcagggatttcagaacagatttttct

SEQ ID NO: 427357 - DNA, 144 bp, Homo Sapiens
agtagtgcacaggactagaactggaggaagaagaaggtcaagagatgaggttacagctaagcaggggcatacaaagaaggtcatgagatgaagttacagctaagcaggggtcatacgatgcagagttttctaagggcaggacaa

SEQ ID NO: 427358 - DNA, 268 bp, Homo Sapiens
cagagagatttaatttgcatcggcgtacagctactgggggactatcagagaaccaggacttcactgtctgtgttcgtgtgctcacatgtctctctgtgtgcatcgcgtgctggccatggacatgcatgtgtgtatctctctgtgtgcatatagtgtctgcaaatacatgtcatgtgtacatgtaactcgtgcagctctcacatgcatgccggcaagctctggcggctccctgcataactcgttctcatctggctacagactgtgctga

SEQ ID NO: 427359 - DNA, 439 bp, Homo Sapiens
  misc_feature (276)..(276): n is a, c, g, or t
ctgagtgctgttatcgtctcgcagcaggccaggcgctcagatgactgttagtaagacggagcagccgtcacctcctgaggtgaggcagctgcagtgaggtgcgggctgaggggaacaaagaggcctgagatggaaggaagggaaagggccgaggctgtcccaggaccccagccgcagagcgggagactcagagcaagcctgcaggccacgcactgcaaatgctggcctagggggcctaaggaatggagacctggttccagccgtcgtcctgcccanccccagtgttgaccctgcttgcttggtggcttgtgggccctggggtctgtttccttgagtggtaaacaaggcagaggcctgaggaggccgtgggagagtcgctccctgtgccatgtgctgcagttctctctccctggagggtaacgagcgtcgaattggtaat

SEQ ID NO: 427360 - DNA, 417 bp, Homo Sapiens
gtggccagaaaagaacattttggttagaggaaagctaaaacaagttaaattatggaaacctaggaatgagagaatttcagtacagatgtatattacagtgccagtgctgctgagaggtcaagaggctgaggtgctggatttgacttgtaataaagtagttggactggatgataccaaaaatccaattcagttatcacattggcccctaatttgggaagttttctgtagatttttgaaagggaaaatgataatatgaggtaagtaggccaatttggaaaaagcctttaattcaaaaaatcatcaccagagggttattcccacttatatacaggcatacatttggtactgtcattgttaattctgacatttaaatctctagaaagaattttgtgactggttggttgtatagaatatgta

SEQ ID NO: 427361 - DNA, 124 bp, Homo Sapiens
agagacagagtacggggtatagttcaggacaacactcctgctaagttgggggtggtctggcggcgtatggctggggctactgggaaaaggaaggcatgagaacgcagagaactaggccagcagc

SEQ ID NO: 427362 - DNA, 427 bp, Homo Sapiens
ttaatatttgctgaatgaaacccaaggtcctttccagcccagttgagagtgagtagtataaaataaccattttcctgcttaataacattagctaaaatattttcaggagtactaaagacattttcctccaatttttccagatatattctcttttggtcctttaccaatttctcactttgtcttcctgtaatgctgaacgacttgagtttaaataggtacttgtattgattgacagtattgacattgttcagcacttaagagtctcacctatcatatatagtgggtgctcattaagtatttgtaggaacagtgcagcttgtctgattacctatcaggtctcttctgtacatggccacctttttgctcattagtatttataagccaaggctgtatgcaattatgcccaggtctttcataccagcctcat

SEQ ID NO: 427363 - DNA, 271 bp, Homo Sapiens
aacagggaatcctgggtctttttccagggtgtatactggaaggattggagcctcaaacctgatgacacaaatggaacacaggattcacggaagcgttttcacagatatttccctccatgccttcacttccaaatatagtgttgatttatgatatgtctactctccagcccctaaactccaacagggaaggagttaaattgagacctaatcaaatgacttctatgcttgttaattctagcacagcaaagaggaaggggtctccttgtgatag

SEQ ID NO: 427364 - DNA, 155 bp, Homo Sapiens
ttcctcccagtaccggttgcacaggagcctggagggcacaggcaggaggctggtcatacctggcgcaacctgggctcaggttccccagtggcaaaggtaggataggggctttggtcgcctctgtgctatgagtctttgtccagtttgtcagtcac

SEQ ID NO: 427365 - DNA, 307 bp, Homo Sapiens
ttctgaggtactctaaggactctatcagttgctatgaagagccaggaggcaggatgaagtgcctggcatccctatcagtatgtgaggaagcgagggttccactctgaggtcagacaaatggaaggtgaatgcaaatgatgcctccttgcaaatgatgccagggaaagcctccttgggccccgtgtgttgtgcggacaggtggccaggccagaggtcccactggacttcactctgaaattccagacagcattaagtaaacaaagtgctttacgagcgagctcccgcggtctgctggtctttccctgca

SEQ ID NO: 427366 - DNA, 131 bp, Homo Sapiens
caggagcatgatttaagcaattccagtttctcatgatattggccagggccggagattttaaaatggccatctttcaattcacctaagccacactggttcaaacattggcttctatccacatgccccttctt

SEQ ID NO: 427367 - DNA, 111 bp, Homo Sapiens
gatgcttgtagtcgggatgagagggggtctctgcaccgatctcaggatgggatgtgcctctcaccccagtgtcagctgaggtaggatacataatcagtaatattcctgcaa

SEQ ID NO: 427368 - DNA, 117 bp, Homo Sapiens
tggtatatggggtcagccacctgtatgtgaaggcagaggcttccctgccagcacccagcaccactttgtacaccacaaagttttatttgtcaaaaaatagtcgtaacgtcacccgtt

SEQ ID NO: 427369 - DNA, 215 bp, Homo Sapiens
  misc_feature (179)..(179): n is a, c, g, or t
agagagaactggagatatggtttagctttgtcaagaccttgaagtgctagcaggtaaaaccagagagggactagctggaaggcaggcgggagcgtaggcatcaggattcctggttgtaaccactgtgtcaagaggagggcctggagcagcgctactgtgcaggagagaggagtcccagntgctgggacggcggacggggtgtgcacggcatccca

SEQ ID NO: 427370 - DNA, 206 bp, Homo Sapiens
cagagagacgagatgtgaggttaagtgtgtgtcagccgctgggagctgcagccaactgattgcagagggccaaatatgggactcatttgtgggttctgcaagaagaaatagcctgctggttatgagtaaccctaagtccccgttctgagagcctcttgcggctcacagcgaaattcaatcctgttctcactggactttctggagct

SEQ ID NO: 427371 - DNA, 191 bp, Homo Sapiens
cagagagaatgtgcggagagagtatgttacgtgcaatgcttagaggcaggaatcctgtaattagtagaggagaaagaattcaattagctgaacaggagtagggagagcacaggaaacagagttggatgggagggtagaccctggccgactgaatacgcttcgacatggcagcactactgcaatcagcgact

SEQ ID NO: 427372 - DNA, 451 bp, Homo Sapiens
agccacaaatggagataatccaagaaattttttaaaaaggccaaaatctcacttccttagcatacacactgtgtaggtttgattactgaatagagagatgaaatatgtgctaaataattcttctgaacagctcattaggcctaaatccatctctgatttctatgagtccattaattccaaatacgtgcctactgatacttacacacacattcatacatgatcgtaaaatggcagcttaatttcacaatgtaatatcttgggaatggcaacaggtaaaacgtcaaattggatatcatgcacattttaaacgtttataacttgcagatgtgataagtgaaaatgacaagagtggacccaagaaggatgacatttcagttagaaaaacccggatcctcgcggctggatgtgtgtgctgcaggggtgacacatcaaatatgggttgccacaaatc

SEQ ID NO: 427373 - DNA, 359 bp, Homo Sapiens
atggatgggagacagttttcatattgttcttaatgttcaactttgtacccaaagtcagagcatttatgaaattccaaacactggcctgattaatgctatctggcagccttccctgttgttagatttctgttaacattaacgaacagaccttgctatataaggcgagaagagtgttaagtataacctagagaaaggacacaagtcaggacagagtgagtgaacatgaagcaaaagtaagagcaccagtgagcaagcgcgagcagggagacccactcctggaacatctgatacatttccataaaggccaaagtgttatttaaaggccatccgacctcccttcctctggcaagcagcaacag

SEQ ID NO: 427374 - DNA, 555 bp, Homo Sapiens
  misc_feature (157)..(157): n is a, c, g, or t
  misc_feature (198)..(198): n is a, c, g, or t
  misc_feature (221)..(221): n is a, c, g, or t
  misc_feature (356)..(356): n is a, c, g, or t
  misc_feature (363)..(363): n is a, c, g, or t
gttgagtgtcatgcactatgagacagagtaggtagatgttcagtcagtgttttccttgtctctcttatgttcacacgagagtgtcagtaagtgagagtgtgtgaggactcctacacacagcagctgcattagtcctaggtctcacttggagaatcanctttatctttccttcaagcataagaaaacaaaatcctgtgnaacaattcggcgggaaggcccanggtatgattatgtgagcatggcagagatcacgatcccaggagatagtccactatctctaggacccaccatgagggaaaggggcagggggcgaagggtgcatgcacaccattccagagccatctagccctctccanctccagncacactggcctcagagaggatcctgtgtaggaactggagttagaggcaaaacacagagagggcttgagtctttgctgaaagcttctccttataggagttagtggtcactaatactgattcaatacttagtatgtaacgggcagtgcctacatcttttgtgtgaccatctcattaatcttataacaacttata

SEQ ID NO: 427375 - DNA, 203 bp, Homo Sapiens
tagcgagagtattgtgtgaatgtcgagtgagaagtgtggacgatcatagtgtgcatgcagttgtgtgtgtaactgcaggtgtgcattgttctgtgtgtgaaggccagagtgtgtgttgtagtacttgtgtattgaggaggcatggcaggagtagtgcgggttgcgcagaggcatagaacaggagagtagcagtgacttgcggt

SEQ ID NO: 427376 - DNA, 514 bp, Homo Sapiens
acgatcgttgcggagacgagaactgacattttgtagacaaccccaaacagaatggctctgcgtgtcagcctgtttcatctcctccgtgcatcctcacttagctgtgctgcaccaggaatttgcatggctgggtgcggacaaaggaacccctgaagtgctttggggagtcatgtccccactggaggctctccccagtgtgctcgttaggcatccgcccgaactggcagcggcagatagggctctgtgtagtcaggctgtggcggtacacaacaattccatctcacataggtctctggtgttctgttaaggggttcatggccagacagattggagaatggagacatgccatttagcacaccgaatcacacaccaagccactgtgcaggatgaggcttgcaatgctcttgtgggtcacaagcgggacaggttcgataaggcccaaaatgaaagatccctctccccaacctctgaaccctgagcgatgaacagtacatgccacaaattgccttatggg

SEQ ID NO: 427377 - DNA, 418 bp, Homo Sapiens
gtactcttaagcgcgaagcaggcagatctgattgtgtccaggtttgggagggggttgtcagagtgcagccacaaaagccaccagcctgtcctaatttcctttcgttctcctcatctcatatttaaaacaaccacctcccactgccagctgctatctccaatccttagaaaggccgtgggggtggaaggagagcacgcctagaaggcagaagactcgaatcattttgaataatattcccaaactattagattcctcagacgtgctaggcacagcaccaagcatttcaccaaccccatcttccctaatgtgtacgtccattctgtgaggagatgccctcagtgtccccctcatgcagatgagaagacccacaacctaagtggcagagccagggttccccgcaggcctgtgacagttctga

SEQ ID NO: 427378 - DNA, 483 bp, Homo Sapiens
gcagagagaactggggggcaataaattccttcttccacacctgtgatgttgcagactgttgctggagtgtagtcttctttctgttagttgaggggatagtttttttgatctagctgtaacccctgatgagtgatgtacctcttagtaaattgtgggcaaacataaggaaaaaggacctctttagtaaatgagccttctaagattcagtcgtgtggtgaaataactaaactgagtggaggacaaagaagtcacagaaccaatccttcaaatccagcccgcagcagcagaggtgtaaacagttactatctaatgtccactccggggtctacctgaattgaattgttggtttccttccaattctcaatgattttctggccattttcatagaaaccatcaatgtaactgatacttctggtttcaaataatatgctagatcaaaagcataaattaccttgaaaatgtgaccatttttctagctctcct

SEQ ID NO: 427379 - DNA, 435 bp, Homo Sapiens
tgagatcaccaatgacaggtgcatagcactaacactgacaggcttgtggggccgtcctcatgcccctagtgaaatgcccagcttaagggcaagtgtcctgtgtcaggggctaagcatggagagagtaaggcagtctcagcactgcagccttggcaggcaggagtggggcctgcttccctctcacatcccagtcccagtaaggctcactccctaaaccagactgtgtccgccaatctgcatatttattcagtcactgcagtttccttctactctgcaatgcaggcccaggcaataggagtcattgcctggctcaataacatgtctccccagaagttctccccctgctccagtcagaacgtggggacagaccagttcaagtgcaagcagctggagcacacaccagacttgattctccattctggctgtaggagtacc

SEQ ID NO: 427380 - DNA, 124 bp, Homo Sapiens
tctctcgtggtatactttactatctagagtccagccttctggggtgtcaacccaatgtgagagaagcatattaggctctcacaattcttggtgggccctgaacttattattctgttgggggaat

SEQ ID NO: 427381 - DNA, 216 bp, Homo Sapiens
cagaactggaactggtgaaggggtcaggaataacgtcaattgctccgtgttctaaggcagtaatcagtggcactaaatattgaaaaatgataaggaaagcaaccatttatgtcaccatggcactgcagaaaacaaaccttcccagggactcctgggaaaccccctgcctggatctgacgacccgtctctgagcgaagcagacgggtagcgcttggg

SEQ ID NO: 427382 - DNA, 416 bp, Homo Sapiens
atctgtgcaggagagagaacggagggcctgagcacgctgctgtcggggcgggccgcggtgactcgggagccaggaatcagcggagtagggagggggagcggatcctggggcggggccgactttccccggccaggaccactccggctccctctggttgcaaaatctgaccttggagtcggacccccaggatgtgcttttagagactcacgcccaacatctctagtctgggacctgactccgtcccgaaccttgtatctcagatcagaactcttccccagtctccaatagagatttacgtggatcagcattgctgatcagagctcctcaccattgaatgccgttaaagacctgccccgagaatctccgtttgagacacttcctaagcttctcagctatttgtcctacaacggcttcca

SEQ ID NO: 427383 - DNA, 378 bp, Homo Sapiens
  misc_feature (173)..(173): n is a, c, g, or t
tgcaggagagagaactggtgacagggaaacaagtcaaattaagcacccagacaatggctgaggtgaatagtaagaacatgaacccagccagtaggctgtgtcggcaggaggctggctgggtacataacaagaggaagaaggccctaaccaatgcttcctgcactctcagtgtngggccatgtgtgctggaaggatccattctgagtccaagggacaggaagggggctcctgagggcaaagaacagaggcctatgtagtcctctctacatgcctgtagattataggccagccttctgctttcctcttttcttcacagctgctaccacctgccctgtcttttccaccctatcaatctgagtggctgaaatgggttcagtt

SEQ ID NO: 427384 - DNA, 117 bp, Homo Sapiens
aaacctttggcagcctcgttaatctgtctgttcagaggaggagtcatgaggcagggggccagcagttgagccctgttaactttcaccaaatagttgcttgcaccatatttcagccct

SEQ ID NO: 427385 - DNA, 295 bp, Homo Sapiens
atccgctctaggagctactgcagatgggcattgtcaggagatgatcctgacattctttgcaggccaggtcctttcttttgcagttctgcctcaaggtggctgtcatcgccatccctgtgcctgagagtgtttgtcacagaaaacaaactcccgtctcccaggctcccccatactcagagctatgtgcccccgccccttctccttgataagcaaacataaactacagaaagtaaatccaggtgacctctggctcctgactgtagctttgaagacaaccaactcaacctccttcagg

SEQ ID NO: 427386 - DNA, 216 bp, Homo Sapiens
  misc_feature (136)..(136): n is a, c, g, or t
  misc_feature (142)..(142): n is a, c, g, or t
  misc_feature (156)..(156): n is a, c, g, or t
  misc_feature (162)..(162): n is a, c, g, or t
gtgcctagaggatataaggaattagggcctccttctctcggtgccgaagcaaagttattatgtataacaacagcagttcaaaatcccaactcagccacggggtgatggcaggttagcttgtgctcctccctcctanacctgnctgtgccacagggncatcanaactgggtacccctaagaacgtggcgggcttgctccaaggtcttacaggctggt

SEQ ID NO: 427387 - DNA, 214 bp, Homo Sapiens
agagagaacgggaatggcgagggaggcatgatccagcgacgtgagggtaaggactgaaatgtgctcatgagaacgtcaccaaaccagcaaaactggtgtcacagactgggaccgcaagagatgggcaaaaatagcttagcagaggcttgaaaacctttgcttcttccacaggcttgacgggcatacaaagtacactgtgtcccccaaccttcaa

SEQ ID NO: 427388 - DNA, 191 bp, Homo Sapiens
tgttgtcacagactaactgctgaactctgtacgtgagtagggtgtttctaatcagctgtgtcattctagtcctgaaggtatgtgctgatgcggggagatacagctgtgggggcccccgttgtgtctactgtggtttcaggaagccatgcttgccacggcccctggagatgggatggaccattctggaattg

SEQ ID NO: 427389 - DNA, 151 bp, Homo Sapiens
agaaaataccaagctattgcagtatgagtggctgaaacaaggtaagaaagtggctggaaaagggtgagatgaatccatgtggactgaattcagccctggccaacctgctgcatcccaaagttgaatagtttccacgtccctgagatgggtc

SEQ ID NO: 427390 - DNA, 104 bp, Homo Sapiens
atgtgtactctgtgtgttgtgttgctggaggactgcgctgcttgcctctttctggacgcaggtctgcctggctggtggctgcgggaccctgtgcaggtgcctct

SEQ ID NO: 427391 - DNA, 225 bp, Homo Sapiens
aggtcgactctaccgatctttgcaggagagagaactgcagacatgaaatggcacatgatacttttacccttttggccatgtcttgtccaagaatttatgggatgattcatttttgccgaactatttcacatggtagtgctttacactttacgatgaagtctgttaaacattcacatgttcctaaaatggcatgcaataagtaatttaattatttctgtatcatat

SEQ ID NO: 427392 - DNA, 304 bp, Homo Sapiens
agtgtctttcagactcactgctaccgatctaaactcccctcggactccagtatgggtggacactgaccttggcatgacagtggcagggaacagtaagatattctgaaagagagcctatccctagaagccatgagacctgggcctgatctaagagggcagggaaaccgtgagattcctgtgaaccagctgggactagattttaaactagaactgagtgactgcataattactttgactggactcggatgtccagtaagtccctctttactcagtggaatggagaggctagaaacatgtcaggctg

SEQ ID NO: 427393 - DNA, 113 bp, Homo Sapiens
ggcagagtgaacacgccacaggcagagggaaccgctaccaggcagagagaaccataaccaggtagagagaactgcaaccacgtgaagggaacacgtactggattgaaggaaaa

SEQ ID NO: 427394 - DNA, 498 bp, Homo Sapiens
catggcatttgataacaaatacacaacaaaagtttttcagtgacataaaaacagagtaacaaggacactaaagggattcgtttcatctttttggaaaaagtgattagagaattcctgaattttccattagaacagataagcaacatatattactttaaataaataagcctttgacctaactcatgaactgaacaaaacgttctcaccgggaacaaaaatcctccactcagcttgctttgcaggtgctacaagacaacctgttggacaaaatgcacttccgatatttgcaaatggccaccatgcttcagaatgagtgtgttttcaatgggtgccatccaaaaggggaactctaggtaggtcatgaaattaaagccagagagtctcactgctatgtctaaaaaactgagagaatgtgctgggacaagtacttcgtgcattaccaaatacaaactaggatcagaaatgcagaatgatctctggaaagaaaaagaatgcgat

SEQ ID NO: 427395 - DNA, 250 bp, Homo Sapiens
  misc_feature (178)..(178): n is a, c, g, or t
  misc_feature (203)..(203): n is a, c, g, or t
  misc_feature (209)..(209): n is a, c, g, or t
  misc_feature (224)..(224): n is a, c, g, or t
tactgctcctagaatcagtagtatcgtggttactctttcgaaacttaattggttctttctgttgttgtcccaagggtggttggacaatttccctttggcttccgggggggtgtcatcatagccgtggtcaatgagaagttgggtaacttcccagagggtcacggagggagtgggtggncaaggcaggaagaacagaagccaancctcgnccacaggtgggaacnccaggcgttagtgtagagtcctcacg

SEQ ID NO: 427396 - DNA, 359 bp, Homo Sapiens
gagagagagactggtcagtgattctcggctcagctctgagttgtgggatacagggacacgccacccaacccggctggatgtgatccttgaaacaatctctcaactctctgagcacttgtgcccattttcaataaaggaggagatataattaatactcagtgcatagagcatttgggagggataaaacacaaaatccaaaagacttgttaacaggagctctgattggacattaatatggattctcacggtgaaggggatgtgaggctggcaaggtatatgcagaaaaaaagtgtgagggagaagagggggtgtggtgggcacctgtgatgtggtccctgggttagtccccctaaagccag

SEQ ID NO: 427397 - DNA, 553 bp, Homo Sapiens
gggtgtccggatctgcggagagagacgactaggcatgacgtctgagtgacacgaaatgataacgttgtcattactatttctgctctgtctcctgcagactgaactctttgatggcagaaacaagttctgtttaactttgtactcccatggggctgtttctacagtattggctgaattgatttatccctcacagccacatgcaatttggctcaaatcccaaggctaaaatcttagtgcaactgatgaaggccaaaaatgaccccgtttgcccccttcttccaagctagtgggcttgggaatgggccctgcagcctgggctgtgtcatgcacactctccacgctgtgcttctccaccctgagtctgagcaaccatcgtggtaattccctggcgggtgaggcaaccccatggggcttttctgaatcattgatgagagagaggtggggcgagggtgtgggggggcagaatgtacaatgtacctatgttcataaaagaaaacactggtcaactgctttatgtcaagccccgactccacagttctctctccctgaaggc

SEQ ID NO: 427398 - DNA, 130 bp, Homo Sapiens
gggagagagaactggttggcgctaatatttggaagctacatgcatacaggtgatgagagaagcatggggtggatgggacagccccgtggatgagctatgagaatgacgaaaggtggatgcatggatgacg

SEQ ID NO: 427399 - DNA, 149 bp, Homo Sapiens
aatttaccatgccagaggtgaggaaggagtacaggcagaggaacagctagtgcacaggacctacagtggaaataaggtgggacactggaggaaacaaagaggaagaaggtcaagagatgagagttacagactaagacagggcggcacta

SEQ ID NO: 427400 - DNA, 258 bp, Homo Sapiens
ccttcaagaggctgacaatgccctgtgtacaggatagcagtaagagcatgaaactgagatctgattcagagaagactgaagtcattgcacgtcatttcttcctaatctttgagaaacaacccactccttcattctgtcttatggtgggcacttgtaagtgggctgctacttcttatatattttttaaccatattgtgtgaaacaagagtatgtggtgtcttctcgtgtgggttgttacttctcaagagagaaggatgt

SEQ ID NO: 427401 - DNA, 202 bp, Homo Sapiens
agtagtagagctgggtcatgagttaaattaaacaaatcctgagaagccccattgagatttaatacatagactcctgtggcacccctgtcattgagcaaggttcaccctaaatcttggtggggaggattataagcctttcgacttggagtggtggccccatttctgaggacattacggttgaacgtcttacgttggaccaagg

SEQ ID NO: 427402 - DNA, 418 bp, Homo Sapiens
cgacgtatacgggctacaatggactgggcagtcatgaacctacttacaagatcaagagctggcaagccttaaaaataagaatagttactgcttcactgggcactcttaacgactgcctggcactgtactgcgcactccacgtggattacctagttgaagcctcccaacagtactaagaggtaggtacaatcgttattcccattggcaaatgagaaaacggagacacaggaggtggagcgactggctcaaaggaacacaccgagccgctaccgaacgggggagtcgaaaccaggtctggaaggctcatgggcatctccttaagtcctcctaggcaggcctggctgaaccgaagccagaaaaagcccacgttttacgcgagaggcaggcgggcccggcacaagcgcgggacgcggtgact

SEQ ID NO: 427403 - DNA, 224 bp, Homo Sapiens
cggtagcgagaactgatatgtgaaggcgtcagctgctgagccaggcatagggcctgccactgtgcatgcccgtgatgatcattcacttccatttagctgcatcctgagtaaaagggtttacttgaacctcttctcctggcgatttcacgtggagaaatgccttctgcttccttttgtaggggcaggttcagggaggctgcaagcaatttggcttttccagccag

SEQ ID NO: 427404 - DNA, 294 bp, Homo Sapiens
agagagactgtggtgtgagagataagtggcagatgtatgcatgtccctatttattccattactggcttgtccagtaacctccaagggactgagggcactgcgtgggtaatagatctagctcattttgaaggaagcaacttcaagatgctcccttcaagaaaaggggaactggaatttttatacattcctctaacaggccattttcttctttgcaagcaaataataaggtagcccccacctccggcagctctcccacttttccacctcatgtctcattagacattttacaccctg

SEQ ID NO: 427405 - DNA, 529 bp, Homo Sapiens
ccctgtcggagagagaactgcctctgggtgtcattagagactcttcatgcagtttccagttagaattaattaatgctggaatcagacacgcattaggagtgatggtgcttttaggattgtctgacctaccctccctgccgtgtcattctctttgagtgaaatagtcttatgaggaattcacaacacctgcctttgtcctggtcagggtagtgttgccgattgagtccgatgatgtctgagaacatgctttgatcattgcgaaaacctgtatgaatatagtatctgacaatattatcactcatttaatatgtatgtaggaactagacagcaagcacattttaaaaacaggacaggtagtttgaaaatcggtttaaccttttaggtatcatcctctagagcaggtatgtgcacagcccctccaaggccgtggtcaggggcccatcagcatccaagcttcaaagccagccattgctggtcactctatactttacccagtggcttgcagactgttcacgaagtagcaggccag

SEQ ID NO: 427406 - DNA, 504 bp, Homo Sapiens
agagagaactgtatcatctaagcgtggggcagcaggcatactggctttaacaggagggaagccctcctctgtaggctcaaagaatttcaggtaatctgagaatttgaggttctccaggcctagaagtttgtatgccatgagtcatagtctctttccttcccatctagggcctcaccttggccttgcagccttcttgggttgggggtttagcttctccggcagccattcatttctggtcctggcccctggctgtaggagagcacagcttggtgcccttggcttttggtcacatgttgctgcctcttagccctctttatcttttccctagaccgtctgcagagctacagtgcagccgacaaccgctacgtccttacttccctcctccatgttcacaacacatcacctagtgagtgccctcccactggtccccaccatatggacccacctcttgacttcttgagctgctcctgggaacaactcccataggtaagttctctgggaagc

SEQ ID NO: 427407 - DNA, 523 bp, Homo Sapiens
ctgcaggagagtgaactgagtgagcccacgaaggaagaagttcaatttcaagtgtggtgctacagaaagcctcgctaacttcggagaacagccatgtagctctctggaagaagagcaaagccccccaggctggggatctggatgttggaggaacagtaaagagggtgaaacggtgtgagccaagggaaggagcaggaggtgagctcagctaggtcctggaggccaagtggagaggcctttcgaggtcattcccagaacctgcgcttcactctgagtgtgacagagatgcctggcgttcagcaggatagggtaatctggacgacattttcagaggcacacggaggctgatatgctgagaacacattatggagtcaacagtgaaaatgctactgcagcaatgcaggccaggggtgctgctagcaggcaactgcttaggcctgtagggattccaggagcactgggagataaagcaaacaatggcttaggtgccaggcggaatggagaggagctcacagtcactacc

SEQ ID NO: 427408 - DNA, 424 bp, Homo Sapiens
cgcgataaggaatcagagcactaaagcagaacactgtgatatcatttctagatgtgttcatttctatagcctcgtacaataggcagccccacctactacactgcctagaagacagggcatgtccgacaaatgtttgctgtatttattcgatgaatcaattaaagggacagacttggctagagtgaatggtgaagcccttcattgagatcacaacatacaggaggatatacagatcggcgggaccggggaaggctgacgatgacagtaagcaggtctgagctcaggaaagcaggtctggctggagtagtttggcgagtcaacgctgcaaaagctgctaacgcaagagatggcagtgcgccgagtagcaaggagctttctactgccaaggactgcgttaggagaacggacagggcgtcgctgaagc

SEQ ID NO: 427409 - DNA, 226 bp, Homo Sapiens
gtcaagcagacaagaccatctctctgcagtgaggatgaacaacaagaattgactggcttctgccagcatcacattagccaggctctgtgaatcacatactcactggctcccctggccagccgtcagtaccacgggacggctaagattgggagttgcagagaaaaccaattttttctaacattcaagctgataggagaaacaaatttgccaagtgaacaccatgtac

SEQ ID NO: 427410 - DNA, 392 bp, Homo Sapiens
agagagaactgactgaaatgctttttgtacagcttctggtacaccagagggtatcaggaagtcctcctggagattgtaattgctacgagcatggctggcggctgagaggctagcagtgagaactgcaaggtgtcatattagacacagggccaccaaagtccttaggaactctacagttctgaacaagccatgttatccagccaagccgcagatacaggaattgaatgcaggcctctccagccactgccaccgtcttccaccctgaggagagtagccaccagaacatgtgaccttgaggagtataaaggtcaaagctggcatgctgagttcaaattgaggcacaaattaaagaaacaaggtggcaagtggaaggcagaaaatgggaaaatggg

SEQ ID NO: 427411 - DNA, 214 bp, Homo Sapiens
tagtcaggagagagaactgggtatcagagtagctggggggctgtggggagggcaacaccccatttcctgtgctctgaggcacctccccagactgatcacccctggagattcattttggttaccaggctcccgtttccacatgcccgtgtatttatgacatcagtccagcttagactttctagcagggctcagcattttgaaccattctgtccag

SEQ ID NO: 427412 - DNA, 149 bp, Homo Sapiens
  misc_feature (74)..(74): n is a, c, g, or t
tctagaggatctcctgcaggagagagaactggtggaagggactatggagaacaaagaggggatggtgggcaganggctcgaagagccagaaaagggtccctgcaggtcgacatgcctaggcaggggccggtacattggcggactaaagg

SEQ ID NO: 427413 - DNA, 215 bp, Homo Sapiens
cgagaactgcaaatcacacagcaagtctttgtgggtgcaggaggggtgaggaattgggtttgataatgtgctgcaatagtcatgtcctgtctgatatgtccgcagaaccctgcgtttctttctaaagccttttttcatccatggtggcaacaccgtaacagcccttgagaaatgtcagggcaaggaagatcatctccatctgaccagggaggcaa

SEQ ID NO: 427414 - DNA, 564 bp, Homo Sapiens
  misc_feature (262)..(428): n is a, c, g, or t
gtcaggccagaaggaggtcagatgccaacaattgcaggtcctggctcagtggtgactgtagcagcagagagggcgtggtgatgctgcctttgctttcttcctcagctgctgctacctgaaggtctgttcaggcctgcgtgtatcacttgacgctgagggaaatgagggaagcgagcttgttttcttccacatcgtctctattggtagcgcaaagcccaaaagcaaaagggtgcttcatagttccacagtgataacaacacannnnnnnnnnnnnnnnnnnnnnnnnnnnnnnnnnnnnnnnnnnnnnnnnnnnnnnnnnnnnnnnnnnnnnnnnnnnnnnnnnnnnnnnnnnnnnnnnnnnnnnnnnnnnnnnnnnnnnnnnnnnnnnnnnnnnnnnnnnnnnnnnnnnnnnnnnnnnnnnnnnnnnnacgtgcttccaaatcatatgagtgcttactggccctttgctgaaatgcatgaaggaccactcagcagtcccctgtggaggctggcctccctcagagcctgggtccacactaaggctgctgaaagagaacatcggga

SEQ ID NO: 427415 - DNA, 362 bp, Homo Sapiens
atggccaggaatagtgagatatgcctggaggaaagagcaagagtgacattagtgagacattgcaagtcacccatttgcagtggagcaagaaccacaatcaaatggcacagggaatgctggtttttagacaaatgccagctccctgagggatggtctttcatgttcttggatctagtttaggtaatccacagggaaacaacatttttccaaggctgtatcaccccaaggaccttcacaacatagcctctagaagatgaattacaacacatcaagtgcaaagttccagcccacccaaaaccctggaccactcaacaagacaggaactctttcccatgaggctcccatgttaaattataaatgga

SEQ ID NO: 427416 - DNA, 290 bp, Homo Sapiens
ttatcacatctaagaaaataacaataattcaatattcagaatagggcaggaagatcaaaacctgaacccatgccaggtgctgagagcagatgaggggcatcagagggtgggcgcccgagccgaggggtgtcgggcgcatccgctgcccagcggaacgtggcggcctgagtggagtcaccgtgcagtgggtgggtgtggctttgtgagccaagccccaggagaaccagaacccaccttttcctcggtgccctgaccagctgtcccgcagctgtggcttaaatgccaacttc

SEQ ID NO: 427417 - DNA, 407 bp, Homo Sapiens
tgaggtcgggtgggggcacagctcatgttcttaggaagattgtgacagatcagcaggctgttagacactgctggtgaattccaggctgcctaaatgattgcagtcaggatttttcttcattttgaaaagtttttaatacatttagaatgactttctctccaccagagtgtcactgtgacagaggcagtgggctttcctgctttatttacgatgcacctggccatgcaagtttgtgatgggttaacttgtcttctagagttaatgaggtcagggtcacaggttcaattcttgggaagaccagttagctttgctttgttctgtgagcgcatattgtactcttaacccaggccagccatctggtgaaggcggatcattgatcacaaaggcattaataagcaagacagtgt

SEQ ID NO: 427418 - DNA, 319 bp, Homo Sapiens
cgggaggggaggggaaagtagggagggagtcatatgggaggaatgagctaaccctccacacagatcctttttggaagttgtcagggtataaataaaacacaaatactattaaagtgctaattattgacaaattgttgtcaagcagaagtcctgcttcgcctatttaaatgcctaggctatacttaaaatgtttatatgcataaattaatgtaattggtgaatggagtatgaaatgaacagaacttaacaataccttatagtttggaccaggtgcagggaaacattctcaaacatctgacttgtcaaatattttaaagcg

SEQ ID NO: 427419 - DNA, 362 bp, Homo Sapiens
tttcgccgattaaacgaataaaaacctcgtcgagcaaagaaggcaggttgaaaagtactcagctcgacaccggagaaaaaagaaacccccataggaactccggttgttcgggtgtgtcctaacagcctcactctggacctcttggacctcgtgagtccgtgtccccagtccctgcggggacagctcaggaagagagcgggttccaggacagcccaagcatccgaatcaagttatctacaccttcgagactgagcaatagatgaacgaatcgagtctatttgggtaagctttttctttggtttggttttcctccttaattgtttagttacaagcaaggattcgttcctcagggctctcatctt

SEQ ID NO: 427420 - DNA, 352 bp, Homo Sapiens
ggcactttctcaattctgtagaaaaggattaggatcattactgtcacattttttaggatcaaaaacaatcttatgatatcctactgctgtagaaatcttggagttgggttttattctacttagttgctggcttagtacgtttgtcactgatgatagtgcttaagtcaccctcaagcatgatgtctaagtgaagtccaccctttcccccgttctgtctataaggagggcactaagggctcaaatgatactcagcagctgctaggctgactcagaagagaggggaataagagtccacctatttcacttgaccattgcatttatccagcaggcggccattatttaacttgctggt

SEQ ID NO: 427421 - DNA, 243 bp, Homo Sapiens
tgagaggtgatctatcggtcgggtggagcttcgagttgtagattgtttcccagtgacgtgcagacacaaagccctgactgcaggatccccagtgataaaagtgatcaaaggcgagtgtgatcagacgtgcgctgcaacgcgagttgaggtttcatccgagcctcattcagtggctcctgggggcagttgtgtggattgaagaggggcatgtcctgtgaagttgctccagggattggagctagg

SEQ ID NO: 427422 - DNA, 343 bp, Homo Sapiens
cgggaagagtagagctagcatgtgccagtttgtgggagttccaagaactgcaatggttgtggtgataatggaagaggcagtggggaaagacaagttgagccttcttaaaaacctagaaggaattaatttataggtaaagtgggactgtaggtactgtccttccccatgtggctaaaaagagcctaggaagctcccatgagatagggcaccttgtagggctcctccaaaccctgggagccaaagtagctcgcaggaaggaggagagagtgaaggggtcccgggaggaagcagctctactccaaaagtaatgaaagtcagccctctgcccacccggaccttattt

SEQ ID NO: 427423 - DNA, 174 bp, Homo Sapiens
ttctgtgtagagctgtgtctgtgtggagatgcttgtgtgtgtgctgaggggtatgcaaaggaagagggacagcagggagtatcctgtaagtaaccagagtagtccagacccactcctgattagcctgtgattggaggaaaacttcctccctttctggtattcaaagtgcccact

SEQ ID NO: 427424 - DNA, 233 bp, Homo Sapiens
gtgtatctatattatcatcatcatctgctagagacaactcgattttcttgggagccagtgaaaaggaagttggccagtcggatgtgcctcacagcagagcaaacgcatcccaaatgagccaccggaagggttggggagtcactgaggtggaggaggaagggctgagggtatttcaggccaagagggactcggtgaggaggcggagcacagggtacaaaagggcctgccaaggg

SEQ ID NO: 427425 - DNA, 268 bp, Homo Sapiens
tgagcatcacattccacatatctacgacaagctgttgctctcaagcataacaatttcctcatactgtcaggaggtaagggaaggagcagttgcactgctttgaacctgactagttccaaaccaagactaggagttcatccatactagcactctccactgatgagaggtcatcagaactgcagctcagtggtctgctttccacccaccagtgggagcagacagaaagaaaggaagtgtcccataatctcaaagccctatctgtaagtga

SEQ ID NO: 427426 - DNA, 175 bp, Homo Sapiens
ccaaacagcacatgtgtgctagcagcagacaggctggatcttttgtgaggctatcctgatggtgcacacacatgcctaggacaacagatgggacaaggcaatcccgaggcccccttgatagttgtgtttgggcactgggacgaggtggcaccagtgtatatgcaggccgtgttct

SEQ ID NO: 427427 - DNA, 220 bp, Homo Sapiens
  misc_feature (178)..(178): n is a, c, g, or t
caagatcgagaagcaaggctactgggtgccggctttgccctgaacgtctggctttaagtcggtgtgtgagagaatcacaagcgtgtattggacacccagtcaagggagaagctcttctccgaaggagagatttttcatggaaaagaaaatttggcgacaggcaggggactgtgcccgnggatgataacatgagggagagaacctactaattggagactcc

SEQ ID NO: 427428 - DNA, 550 bp, Homo Sapiens
  misc_feature (25)..(25): n is a, c, g, or t
  misc_feature (439)..(439): n is a, c, g, or t
cttaagaccaatgaggcggtggtantccagcctgggacgactaatgtgtgttagtgcgatacgatatagctgaaaatatcacagttaggcagtcaacaggaaaaagaaaggcaagctccagcaactctttttttgggtcttccttcctgtgccctcatcgccggtttccagagtcatactctttatggttttaccctcttttggaactctcacctgactcattcatattaaggtgtttccttctctagaagcactgaatttaacagggaaaaaaaccttaaagaaatgataccccagctggagggatgttagaggacatcctaaatcacaccactagggtagtcatttcagaatggcactttcaggcgcaacaggtatagaggaaatgggtgctggcagcagggatgggttcccttaagcaaatctctgtgctctttanacattactcaaggtaaggaggggaaaggcagggagcaatatggctgccatcagggtccttggttttgtttagaggaagtgagtttgcagggcttattcattactatagtga

SEQ ID NO: 427429 - DNA, 337 bp, Homo Sapiens
ctgaaacagatctagataacgctctgtgggggagctgctggttagttatggtgtagatttcttggcctactaggacagttctgtgcttcaccatgaggtgtcgctgtgtggaacactggtgacagtgagaatataaactcaaggtgaatcacgtgatacttcgcacgcgtgtgttacggtagagtcagctgacagtattgcgctttacaactctattggtgcctttccaagtgccctcttcttcttcttttaaaaaaagaacactttctgctcatatcatacccaggtccaacccagcttcttggcatgaggttcaccctggtaaccactcatgtgc

SEQ ID NO: 427430 - DNA, 224 bp, Homo Sapiens
ggggtgacaacaggaccagcatatagtgcgacgaagacaggcgccaatgcggcaaggcagaccgttgagtccatctttgccaggagaccagcagagccaggggacctcggggacaagagaccagaggtccagagggaacttgtaaccaggagagccaggagggcagggggaccctgaaggacacaagaagccacggtgacccctttattgcctctgtcggccct

SEQ ID NO: 427431 - DNA, 505 bp, Homo Sapiens
tgaaaatgaggtgctgggtggtagggagaaaacagatctggaaaatgctttattattacgtgtggaacaactgggcagtctggagagtacacgtagcactggtgggcacggccgtatgatattacacggagcatggccaggactcgggggcgtcagatcaatagataataattatggacttacggtactgcaagagactcatgttatcaaaatcaattactatcacacaggtgggcttacttaggaagttcacgtttctaatgaataacaactgcatatgcaatcaatactacccaaaaaacctgcatgctcaatataatagtgcacttttagtcttctcctttttaaaggaagcacatatcacctgtataaacactccaacacaaatgatgttgcttgcggcttttcagaacaacgagctagttcattccgaccctggaccatattatttatttgccagcagacaatttatctacaggcaatgattatacacaaatactcacaa

SEQ ID NO: 427432 - DNA, 135 bp, Homo Sapiens
tctctttgtattcacttattataggctacaattccatcccattgtgtcatttaatacatgatttccagactgaggattattctaaactgaaacaaaacaggttctgtggtcaaaattccaacagggcaaaattca

SEQ ID NO: 427433 - DNA, 248 bp, Homo Sapiens
cacgggaagaactagtggggttgtggcattgggagaagctggaagggacaggacactgggattctgtgctatcctgtgtaggtcaacaaccttgataaatgttggaaataaaagctttcccccactctccaggtttgttacttaagctacactttgaaaatcagccacaacatgatgacgaggatgggaggatcccgagaaactaaagaaggtggacaaggacgaaggaagcagaaagaaaggggatc

SEQ ID NO: 427434 - DNA, 444 bp, Homo Sapiens
  misc_feature (75)..(195): n is a, c, g, or t
ctcctggcgccaagtgattctcccgcttcagcctccctagatagttgggactactggagcgtaccaccacacctnnnnnnnnnnnnnnnnnnnnnnnnnnnnnnnnnnnnnnnnnnnnnnnnnnnnnnnnnnnnnnnnnnnnnnnnnnnnnnnnnnnnnnnnnnnnnnnnnnnnnnnnnnnnnnnnnnnnnnnnntgatgcaaccgcaccttggcccattttctttattttcgtaacgtcatccagtcacatgataaataagtacacaagggtatagagtggcaaaataaatccttccctggactccccttccctggactccctgtaggctcccctcccaaggcaaccagtagtccccaagtcgcgctttgttgtacttttgtgttcatccaggaatattctaggtctatgcaacactagatgtgtatcttaaatcttttatag

SEQ ID NO: 427435 - DNA, 262 bp, Homo Sapiens
aactggcaatcgaatcaagcccaggctgatgcagccaatactgctgcctctcagcttttcttgaaatacattcagaggactcacacacacctctagtgtaacaccccagagctccaggcttcttggcttgctggactcattagagggatcaggacatgatcagaatcagaggtgattacaccccaatgccacccaccaagccctgcatccgtaatttcctgtagaactggaccacgataccaggtgcttagtgttcccgtgc

SEQ ID NO: 427436 - DNA, 216 bp, Homo Sapiens
taagagcagaaaattgttgctgatgacatggagcccttcctggaggagaggtggggtggcgggtaaagtgtgcagggagaacatgggcaggcaatgttttgggacactggtgggtgaccaggtcctggtaacagaggctgtggttccatgaaagattcccagtcacccctgcttgcacctgcagggagagctgagctcagtccacacccaggtgcg

SEQ ID NO: 427437 - DNA, 569 bp, Homo Sapiens
atactctacaggatctcaaatgaggtcgggtggggtctggtaatggaaacaagttcatggaccacctttgagaagtgctagattaaaacctcatcattaccaagagggagattttgtatggatagaagagagaactttctaatagtcatatctatattttgatccaactattgctgcgtgccagcatttggattggtgctttcatatacacaatttcatctcctcttggtggctctttgagtaggtgcctgcagtttgcagatgaggataccaggctctgataccttcaagagagtattaatctctccctcctttcttctaacttggggccctgcacctgcttcatttggcattccattatgtgcttatggtgagtctccctatggaaattgtgcaccatgatgttgttgaaggcctttgagtgttgtctggcgaaggtcacagattgtatctgttgagctgaaatgccccatctgctgtgaacaggcttgagcgatgaggaactgagggacctatggagcagctgccccatgtgtcactaaggtgacatcaatcctggtatctggagc

SEQ ID NO: 427438 - DNA, 559 bp, Homo Sapiens
  misc_feature (264)..(340): n is a, c, g, or t
  misc_feature (373)..(441): n is a, c, g, or t
tctaaggatcgttaatgggtcgggtggcagttggtccccagtagcagaaatgaaatgtgctcccacccctggggaaactcaggtgtggaggccgtgggccaggcaagatccaggaaccacactgggcttgggaaacttggtgatttctaagaagactcaatgtcctttatttcctctctctgcagccttttgatatttaatcaagttaggggtgctaggaaggtggcagagcaaagcgtatgacctttggagggccttaaaagnnnnnnnnnnnnnnnnnnnnnnnnnnnnnnnnnnnnnnnnnnnnnnnnnnnnnnnnnnnnnnnnnnnnnnnnnnnnnatgttattaatgtccgccacagggctaccggtnnnnnnnnnnnnnnnnnnnnnnnnnnnnnnnnnnnnnnnnnnnnnnnnnnnnnnnnnnnnnnnnnnnnngcaactgctatcattatgattaatttcaaatgctagtcaatctcagttgtccttaaaggaacaaaggaggttttgtggtccattctttggtggggtttgaagctggggggcaggtgca

SEQ ID NO: 427439 - DNA, 221 bp, Homo Sapiens
tacctgaggatcccaaattgaggtcgggtggctgaaacagaggggcagaccgaagttaccctcctctgtggatcttgggcttcctgtcttgagtctggttcatcagtcatagttcttcttgcctccaagttattttgtttctaagagctcatttaccctttcttaccacctgaccttgtccagtccacacccataactttccttaatttcaaatatcagtg

SEQ ID NO: 427440 - DNA, 247 bp, Homo Sapiens
ttaaggatccctaaattgaggtccgggtggctagcaagctttgattgaggaatttgacttgcttaaaatcgggtacctgtgggttgtcttgaaagcaagccaggaaatttatctgcctcacttttgttttgaaagtgtctaacttaccgaaagattgaaagggtatgcatccttatactttttccctggattcacccctgttgttaacttttgctacattcatgtattctctatttacgcttatttt

SEQ ID NO: 427441 - DNA, 459 bp, Homo Sapiens
tgaggtccgggtggctccacgtacagttatggtgaccatcttgctctcaggagtgcaacgaggtaaaagcaagaagctctattcaacgcattttttaggtaagcactgcattgggtagggtgaaaaacagacgcagaaagttctggtactcatccaaacacacaggaagacacagtcttccacccaactgtttgcacagggtcatccacaggctcctgaggggtacaagggaccccagtgagacctcagggtgcactgttcacactgttcggtttttgtttctgtttttaatctttttatctccataggttattggggaacaggtggtgttcagttacatgagcaagttctttagtggggatctgtgaaattttggtgcatccatcacccgagcagtaaacaatgcaccccatttgtagtcttttatttctcacccccttcccacccggacctcaattt

SEQ ID NO: 427442 - DNA, 361 bp, Homo Sapiens
gaggtcgggtggcacacttgagatagaaggaagttctgtagcttggactgtagtaatggaaacaaaggatgacagagagaatgacaagaaggcagacatcccaaagggaatagcaaaggggagggtgtagttacataatgttgaggccaggatgtggtgagtgtgtgacatctatggccttgagcttctgatgtccgtgtgtataatgttaacatggtttggattgaaaataaattgtaaaggaaaggagtgatagatgaatataccacagcccaggatttgatatgagattaatggaacattgcatggcagaagtgcaaactttctctacttggtatactccccaaccggacctcaatat

SEQ ID NO: 427443 - DNA, 337 bp, Homo Sapiens
gagggtggaaacagcagttgcaggaaccataagttgctcctggagctgacgtggtggaggacagacatcaccttggctttgggcttgatgggtcaaggggtcttaagatgctaagctcaggagggatgggaaccccgaaaccttgaaggtggataaggaaggggagatggggtcttaggaatatgtgtctggtggcgcgtgtggaacatgacggtgctaaggctgggaggacttagaggccagtggggaggcccaggtgctgatgccactgtggacattcctgagcctctcagatacctgaggccgcacttccacccaaaaagagtccttgggttgg

SEQ ID NO: 427444 - DNA, 141 bp, Homo Sapiens
ggggtggtcagttgtgtctggattccagagggaggaaggtagaatgaggcatgtcgacacctccccttcccaatcatggcctaagctggtcttttcagtttactttggaactgtccttgctccaacaggaagggtccattc

SEQ ID NO: 427445 - DNA, 274 bp, Homo Sapiens
  misc_feature (193)..(193): n is a, c, g, or t
cccctgctgtagagctgaggctacaaacattaatactcctagagagtaccccagctgcaagatgtcaggatggagataccccaaaggaaacaagtatttgggggtggggcttgggggctctggagggcgaagggaaagagaggagctagggagatttccagtcttctacaactttacaagagtggaccccagngcaatcttggccttcctctccttttaacttacatactatctatagtctctggcttcctggcaatttctaatcacagaatcc

SEQ ID NO: 427446 - DNA, 341 bp, Homo Sapiens
ccctgagctactcaggaggcagggtgtgaggtggttgtggctggatgggccggacggagaaaggccttctgaggtgggagctctaagccagtagctgaaacagaatggaagggaggggggtggaaggttcaggctggaggaacggggacgtgcaggagctgagaggtgagtgagcagggtcttcagggaaacgccactgggggcctcctgcaagggggccttcccttgtgctgtgggagccgcctcatgcccacccggtgctctgtgcctgccattcccttcccacactgccactccccagcacttggctacgtgttcgttttgtctccccactaggatgt

SEQ ID NO: 427447 - DNA, 115 bp, Homo Sapiens
ggacttcattttgtagagaatggagaggcattgcctgttttgaatagtagagtgacttagattaaaagggaggttttacatggattaaatctgggtaacaaggtgctccaggatt

SEQ ID NO: 427448 - DNA, 277 bp, Homo Sapiens
acgggcggacgaagagacaggacctgacctgggctgctgcctttcttaatttatcagatggtttctgctggacacctctggcttcacaactagtctcagcagtactcgcgggctcagcagggagaagcagcccctgccctcaccaagtttgcatttattcaggcatttctattttgaagtcagctctcttgtgctgtggtctgtgtataatgcctaaatgccaaatgctttctctgtggaaaagggcttttgagttacctgagattaaccccttcaa

SEQ ID NO: 427449 - DNA, 259 bp, Homo Sapiens
  misc_feature (69)..(69): n is a, c, g, or t
caggaggctggagacctatggtgtcgccagttcagtggtcaccaccacctatgttaggtccatgtatcncgatatattttacctcaaaggagatgactgaagaattcaccaatatagttattatttcctttctgcctgtttaacatttgtctttaagaaatattggctttagaaacttctcccttggatatcaaccatcaggcaccaagtacaaacagactcattgaatcaagagtctccagcctcatcctgtgaatag

SEQ ID NO: 427450 - DNA, 272 bp, Homo Sapiens
caaaaatttcaaattttatctttccaaaaaggcacaacgaaagtacaccgagggctcattttacattcattaatagaacgctgttttgtggaaagacttggctgctcctctgaaattttcctcacttcagagtatctcagcatcaccaagcattcttttcattacttatctacaagggaaagtagattagaatcggaaaacaatagaagccaagacaccggctatttaagtttttctctctttgctgaaaatgaatagaactttggcaagct

SEQ ID NO: 427451 - DNA, 131 bp, Homo Sapiens
cccaatgccaggattttatcaatcgtgcttgcatactacagcctctataaacaccctgaacaacagggattgcagagcttctgggttgctgaacataggagatgtctgggagggtagcatgtacaacaaag

SEQ ID NO: 427452 - DNA, 129 bp, Homo Sapiens
  misc_feature (45)..(45): n is a, c, g, or t
atctaccgagcttaagctactcaggaggcagtaccttcgaggtangaggtggtaatgtcagtttgagatttgctgagtttgatacatggcaaatgaatgctctgtttaaaaaatctctgcataaaagta

SEQ ID NO: 427453 - DNA, 252 bp, Homo Sapiens
tcacttcttcacgaacttcaaaagaggttggtccctagaagaaccacccaccttggtgggcatgagctttctgactggccacgggtccttcctttgggataccatccatattctaactcactccttggggcacatgtttgttgagaggcactgctgtggtccacagatgggttgtggagggtactcttttgtggggcactagcaaaaaagcttaagttccaagccatcacccacattttcactggaggccat

SEQ ID NO: 427454 - DNA, 160 bp, Homo Sapiens
  misc_feature (140)..(140): n is a, c, g, or t
  misc_feature (150)..(150): n is a, c, g, or t
ggaggctaatatcactattgagtgaggagaatgtaaggaagtgaaaatccatcagtataatctgagaagtgttaaaaagggaacttcagaatgagaaatgagctgaactttaagatggttttgaactcctgtgcttcaanctgatccacnccactttggc

SEQ ID NO: 427455 - DNA, 187 bp, Homo Sapiens
ggggaaatgccagctgctgaaacactatagacaacaaagaacaagctactcctgcactgggggtcgtaagctctagactggaaagcctaaaaagaacggtcgcctccaccagtgttcttctggacatcaactcggcacagccacaaggggtgcctcctaggtttttaccccaaaaaccaagggcccc

SEQ ID NO: 427456 - DNA, 332 bp, Homo Sapiens
acagaatattgtactgcacagagaagtgctgtccaaatttacacagtaaattgcagacctggacttacacagaagcagtctgtgtcttgagtctagtctcttagccaccattaatcctaagacgctgtcctggatacatagcaccttttcatagactaagcaaatgaatggtgcaaaaatcacttcatgtggctttcaacagataaatcaagccactatatgatggattcctaggttgattatatattccacggagaattggagtaaagggttccactctaccgtggtaatctcaattgcattgatgctgcatggcctcttttctttctctt

SEQ ID NO: 427457 - DNA, 175 bp, Homo Sapiens
ctgttacacaccagataattttatatttaacggtattgaaggctcacttaccctgaaatagagtgaagtgtttagactgcctggattaaaaatacttcaaatctcacatttccacctaccaagggtcactatgtcaagtttgcaaaaagcaaaaataacagagctttggcaggtc

SEQ ID NO: 427458 - DNA, 212 bp, Homo Sapiens
gagtttgtagtttctcattcccaagaatcagaagctactactggaagatgtacatcatctagattctcatgcataacactctagcttctagggtagagaacagactgctgaaagacaagaatagaaacagggagagcaggtaggaggatattgaaattgcccaggcacaagactagtggtatctcgacagcagggtatactaccagagatgg

SEQ ID NO: 427459 - DNA, 426 bp, Homo Sapiens
  misc_feature (162)..(180): n is a, c, g, or t
  misc_feature (200)..(257): n is a, c, g, or t
tcctgtctacttaccactttctcagctcttccatttataggaatatcaaacttcaaaagaagacttttattacattagatctgttgtgagttacagcaacagaacagtcttataaaaactaaatttggcaagcttcctattcctctactttcttcctgtgannnnnnnnnnnnnnnnnnnaaaatcgaaatctcgcctgnnnnnnnnnnnnnnnnnnnnnnnnnnnnnnnnnnnnnnnnnnnnnnnnnnnnnnnnnngtgggtcacgccatttctcccgcctaagccttcccgagcagtgggaactacaggcgcccgcaaccaggcccggttaatttttgggtatattaagtagagatgggtttcacagtgctagccaaggatgttctcgatctcctgacctcgtgatctgcctccatgaggggat

SEQ ID NO: 427460 - DNA, 491 bp, Homo Sapiens
ccagctactcaggaggctgtggtttgtttaaacgggcactggagggaaagcaggcagtgtctggtgtgcacaagcacccactgaaatacaaaccttagtgaacacaggtaacaccccttgatgtgtgctgtatccagttgttctgtgggattgacatgtgttcactcatttaagcctcacactaaatctaagatgttatccccattttccttacaagaaaaccgaggcatagggattccaactgggctgggtgcaacgagggaggacttggaaacaggattctgagctcctgaccaggggctgaacttgtggctatttgtttatctgattagccaacaaatacctactctgtgaaattctttttattatttggagatgaagtctcgatcatgttgcccaagcttgaattgcaatggcgcgatcttggcccattgaggcctctgcatccgtgggtcaagcgattctccggcctcagcctcctgagtagctgg

SEQ ID NO: 427461 - DNA, 245 bp, Homo Sapiens
aggatcctttccagctactcagtgaggctcatcgaagggatagaggtgggaggagctcacaggttggccatgctgaagggtgggccgaaggctgtgggtgagcactgtctgagggtgagcacttggctgtggtccggcagcaggcccaggaggccgggcctccttcttagcctgagggacgttgccatgtgaacatttggctccccaagcctttccggtcccacggctccacagagtgtgttggg

SEQ ID NO: 427462 - DNA, 264 bp, Homo Sapiens
ggaggtatgtttaggtctggatggccaggtggactgggctaatactgaactccagaatctaagagctgttgagttgcaggctgcactgggctaggggcaagccctggagagaacagcagataatgtttttcccttaggggtctgtctccccagaggaagaaggcaatgaagctgagcccaatatgctcagttaccctgctcagatggactctacattatcagaggggaatgacgaaggcactgaaagaggccaggaaatagtcc

SEQ ID NO: 427463 - DNA, 356 bp, Homo Sapiens
tcgttaagctactcaggaggcgaacaggaggatattggaggagatgttctttagaaagcccacacctccttctcaggtaatacatggttgacttctcccagggaaactaaacattaccccagcactcaaggatcccagctccacccatccctcccctcctagaatgggcttaaagattacaaaggggacctggatagcaatgaagactgctccttggccaacggtcctggaatgcagttttgattttagaagagtattgatatcacatgttctatttggagtaggagattaaaggcaagctgcctgcttcaggtaggggacaagatgaggaacagggagtgcaacagaataactgc

SEQ ID NO: 427464 - DNA, 207 bp, Homo Sapiens
aattttgctttttgtggctttgtagaaaagtgatgaaacgtatatgcccaatttaaaatgaagaataatcctgattttaactttttagataataatcttatcccaggtacccagggctacgtctcttgtgtccatctattctcctacaggttacttgtttccctaatagatatttaagtttcctctatgtctaactgtggcttgata

SEQ ID NO: 427465 - DNA, 523 bp, Homo Sapiens
agtgttctagaggatctcccggatacaccagcgtctcattgttccttttttaatgcaggatttctatgcatttttaataggagcacctgttgactttagctagaagctgtcatatgccgggaagtttcaattgttgtgtacagttacatagctgcaacctctgttaacctctgaaagcctctgttctcattcttgtccttcctgctctctgccaaagctgaattagagtctgccatcgtccttctgggtagactggctgcctctctttatatacattatagactttttttattctgtgtctttcatcagtgctcttcttttcacttggccgttgaggaacgtgtccaaattttgtttcggccaatgccccaggcacattcttatctccgttgtggttttaatccttttttattttgtactattatttattgaggtctctagagttggaagaaaacaatgtgttcttcagtctactgtcttcaaagagagctcaactgagctgtcagtgccgctgtgtattccg

SEQ ID NO: 427466 - DNA, 399 bp, Homo Sapiens
accagcgaagaggaaacaacttaagtggtgtttcttgttggttgagaacatattatatgtattttgggggctgaggacatatcagggatatttctacagggaaggatttgagataaggaaaaaaatatttcttagaaatctcaaaactatagtctgaaattccatgaaaagaaaattgaagaattttgtaatccaagtcattggagataaagggtcagaaggaacgcggtgtattccattctcttcacagcaactagagtggttataatgattgctaccttgcttgaggtagttacatcgttttccattgaactcaggaaaaaaatcaacctaactcttggacctgtaaggtcttacacatgctacctcctgcctacctctccagcgctgtgtattccg

SEQ ID NO: 427467 - DNA, 342 bp, Homo Sapiens
aatacaccacgtgcggcaggtcatcttttcatccaagctgctcacaatgtttccgcacaccaaccaatctcttaatccttaccacaatgatcaggcagtaaaaactattactcttacttcccatttgggaaaactaaagctgagaaactcaaaaacttgtgtagcattaagtatgaattgcctacgtcaacgctgtgtccctaattttcagaccctatccttctttaattcccaactgattctagtaagcacccgaaagagaaccagaacatgttacaactcttttttctacctggagaaaggcataattctcaagaaataacatagttcatatcttatgtt

SEQ ID NO: 427468 - DNA, 213 bp, Homo Sapiens
tctagagtgatccccggaaatacaccatgaaaaagcactggacatgtaattagagtcaacagataaatttatctaaaatccatatgaaaagtccatgccaatttacactcatttctctaactccttttaccactggatattattaaatttattgtttataatgacaatagatattaaaaattagcgtcttattttaacttacatttcctcgtc

SEQ ID NO: 427469 - DNA, 179 bp, Homo Sapiens
tgagaatttacacaaggttcatcctttgtttcacaaaagtatacagtggcttcagctctccattccttagaacatcgtttcctgccctgcattgattagctttggctagaaggtgcttctgtaacatctcacattgtgtatctcacatccctctttgtacctcagcgctgtgtattccg

SEQ ID NO: 427470 - DNA, 250 bp, Homo Sapiens
tctacaggatctccggatcacagcggaagatgatttgggtctttaacctgcaatctctgagaaccattgacttggctactgtgcagttagtaaaagatgctgtgccagccccaactcggaaaaacgactcattcacgccccaaataattccagatgtgtaatatgagtcatactcaccactgccatgtctttgatgaatgtggaaaaggccagtattcccaaaacattcaactgcttccaggtcgctggt

SEQ ID NO: 427471 - DNA, 103 bp, Homo Sapiens
atagcggacgccattgcagaatggcgccagtcgaatacgcgatacgtcgcgaaccgcggaacatgtacagagactcgagtaaagtacatagtggccacagtgg

SEQ ID NO: 427472 - DNA, 125 bp, Homo Sapiens
ctagggctgcactatggctggccgccgtgcagactggctgccagtcgattacgcgatacgctcgcgtaccgcgggacatggtacagacgctcgacgaaggtactagatggaccacgatggggccg

SEQ ID NO: 427473 - DNA, 113 bp, Homo Sapiens
ggacggccgcctgcagactgacgccatcagatacgcgtacgtcgctgaccgcgagacatgtacagacgctcgagtaagtactaagtggccacagtgggccgtgcaccttaaaa

SEQ ID NO: 427474 - DNA, 103 bp, Homo Sapiens
actgagcgccatcgtatacgctgtacgtcgcagaccgcggtacatgtacacgagctcgaggaagtactagatggccacgatgggccagtgcacctctaagctt

SEQ ID NO: 427475 - DNA, 158 bp, Homo Sapiens
  misc_feature (34)..(34): n is a, c, g, or t
  misc_feature (41)..(41): n is a, c, g, or t
  misc_feature (123)..(124): n is a, c, g, or t
atacacaactaagttcaaataaaaaaaccaaatnaaaaatnggcagggaagctagagccagaatcaggaaaatctgtttcctcgtccccagactcccgccaagcctactccactaactaacanngactctatcaagtttctatcaagacttgcatctg

SEQ ID NO: 427476 - DNA, 291 bp, Homo Sapiens
  misc_feature (70)..(70): n is a, c, g, or t
aaactgttctttaaaaggcctctcctggttattaagccaggaagagaagtagaatctcgaatcacctaanggaaatggtgacacaggttgtcctttctcagccgttggtttcctttcatctctgaaggcctgtagtaccatgaggaaaacatttaatttagagggtgaacccaacagtaggaagctgaaagcagaagtgtttatctccctctgcattcagaccaggctccttagtgcactcatcagactatcgctgcccctgctgtctgctgttgagccttcaccaccact

SEQ ID NO: 427477 - DNA, 150 bp, Homo Sapiens
  misc_feature (34)..(34): n is a, c, g, or t
  misc_feature (103)..(103): n is a, c, g, or t
ctcatcctctcctattacatagtgaagcccatgncaaataggaagaagctcagtatcgctcctcccaccataaccccccttaatgcctcctgaaccatagttncctccactatatatccccccatgttcctgctaccccaagttttcact

SEQ ID NO: 427478 - DNA, 233 bp, Homo Sapiens
  misc_feature (41)..(41): n is a, c, g, or t
  misc_feature (154)..(154): n is a, c, g, or t
  misc_feature (171)..(172): n is a, c, g, or t
  misc_feature (176)..(176): n is a, c, g, or t
  misc_feature (190)..(190): n is a, c, g, or t
gcaggagaaggaaaagacagcaactcatcccagaattgccnaatgaagatgaggagaatcccctcaaagggatctgtgtgcttacagtggtgacagtgacaatgaggaggactgatgagagactcaagagtgaggaagagagctagctgactgnaagaaatgacctgtctnntctncagcgccattcccnaacagatgccctagtcaggaccacaactcttaaacctcatagc

SEQ ID NO: 427479 - DNA, 169 bp, Homo Sapiens
  misc_feature (116)..(125): n is a, c, g, or t
gggtcgctctccccccctctttcttcgggttgtgtgcgtctccgctttcgtgatgtgaggaactctggggtgggcgacgggtccaactcgcgttgtcatctcccaggttggtacannnnnnnnnngtttccccagccacactccacggccagggtggaggcagatgtct

SEQ ID NO: 427480 - DNA, 198 bp, Homo Sapiens
  misc_feature (62)..(62): n is a, c, g, or t
  misc_feature (111)..(113): n is a, c, g, or t
  misc_feature (123)..(123): n is a, c, g, or t
  misc_feature (145)..(145): n is a, c, g, or t
agagggggaccaatctaaccatcgctcttccagtcctaccagcacactcttgcagcgccatnccactccctgagctcaggatcctagcccgcccgcccgcggatgctagtnnnctccaccctncccacctgtcatacctgtgtantacacacccacccgtatcacgcaggacatgaaccagcaccactaaggccccgg

SEQ ID NO: 427481 - DNA, 239 bp, Homo Sapiens
  misc_feature (80)..(81): n is a, c, g, or t
  misc_feature (223)..(223): n is a, c, g, or t
aggaaaaattgacattacttgttagaagagcaactctgaaagaaaacaagcaaattccaaaacagaaaagattcacaatnnaaaggtgcatacattaaagggccacactgtgtaatactgtgccaacttatgcgagtctcattgttcaggatgaaatgtgagattgtagtttgaatgctataagcaggttccaagataccccaaatgactgtaagccagactngaagcatgtcaaaaag

SEQ ID NO: 427482 - DNA, 130 bp, Homo Sapiens
  misc_feature (27)..(27): n is a, c, g, or t
  misc_feature (55)..(55): n is a, c, g, or t
  misc_feature (80)..(80): n is a, c, g, or t
ggcccagaggtcctttactcttacggnacaccttagccacattcacagggaatgntccagcactcaggctccttcccatnggttttcaaaagcgcgtttttctgggggagcggccgcctttagtcgaccc

SEQ ID NO: 427483 - DNA, 125 bp, Homo Sapiens
  misc_feature (52)..(52): n is a, c, g, or t
  misc_feature (73)..(73): n is a, c, g, or t
  misc_feature (100)..(100): n is a, c, g, or t
ggggccctcaggacatccacgtgagcgtctgcccagctgcactgatattgtnttgcaaatccagatttgttgncattactgatgggcgcgtgaaaccagngagagatgcacaagatttacaggcc

SEQ ID NO: 427484 - DNA, 107 bp, Homo Sapiens
aggtaaggttgtcacgtggaacaactgataaaggtcagctatatatgtagagctatatatgtgagtcacaaggtgtgtgacatacgtgtatacgtataatatgcgtt

SEQ ID NO: 427485 - DNA, 113 bp, Homo Sapiens
gtcgcaggagaaaaaagtcgtcacgtcatgcgagtgcgcagggggcgtggagagtagcagtagagcaacaaagtacatataggacagtgcagcgaggacaaggacttcccgca

SEQ ID NO: 427486 - DNA, 173 bp, Homo Sapiens
gaaagattggacatgattgcgtttataagaatgagagtgttaaattggatttcttgctttatttgtgacatttcagtttattagaaatcatgttaccattagaaaaattgaagtttcctagtaacaaagtaatttgatttgtgtaacttgataaaagatttactgacttaagc

SEQ ID NO: 427487 - DNA, 169 bp, Homo Sapiens
tgctatttccctttcataaaggcacacatttgatcttatcttctcttacccaacacgcagtggcagtgtgtattttccttctctttttttgttaaatattctggtttgtggaggttcacagacatgtgttagtatatccttgcctgcatgtagttgttcattactagac

SEQ ID NO: 427488 - DNA, 175 bp, Homo Sapiens
aattgaattcttaagaagctgtcaaatatggcagtcttttgatgttagtaattttgttttcttctgtgttattggttcaaagtactggccttttccttcatttccagtaattattttataactatcacttttaattgagtggaaattagatgatttggttatactgtgaaacagc

SEQ ID NO: 427489 - DNA, 107 bp, Homo Sapiens
aaaggagttgagtactgtaaacgcagagctacatagaaaaaacgggcttcaaaaatctgcacagaggtttgcttgagaatttagctacacaaatatgtgtagaagtg

SEQ ID NO: 427490 - DNA, 235 bp, Homo Sapiens
  misc_feature (14)..(14): n is a, c, g, or t
  misc_feature (28)..(28): n is a, c, g, or t
  misc_feature (37)..(37): n is a, c, g, or t
  misc_feature (105)..(105): n is a, c, g, or t
  misc_feature (147)..(147): n is a, c, g, or t
  misc_feature (187)..(187): n is a, c, g, or t
aagttgttcatggnaggcatttatcctntcaataatncaaacgaggcttctggaataaccagtgccccattccatcagagtctttgcgcgactaaagcctccatntttgccaatttcaattgtttgggattctagcactccttaccngcagtaatgcccttgctgcagacaacaacacctggactgngagatggaccaattctcaatggcaatccagggaaagagtgatccttct

SEQ ID NO: 427491 - DNA, 198 bp, Homo Sapiens
  misc_feature (182)..(182): n is a, c, g, or t
tgtgggctcagtaatgtccccgctgatgacaatttcgagagtccatgttctatagaaaccttgaggtcggccagccgtgtcttggccaatgagatgtagttgtgaggagggggcgtacttggggaccaggggtgggtggagatgtgccctgtaggcacagggagactcaaaagcacgagttntgaaagcgtaaatggg

SEQ ID NO: 427492 - DNA, 162 bp, Homo Sapiens
  misc_feature (49)..(49): n is a, c, g, or t
  misc_feature (56)..(56): n is a, c, g, or t
  misc_feature (107)..(107): n is a, c, g, or t
  misc_feature (116)..(116): n is a, c, g, or t
  misc_feature (133)..(133): n is a, c, g, or t
atggatcaaactacctctataatgaagactgttctcaaaaacgcgaggnaatgtgngacgacactgacctatcagacaagagggcatgcccccctggccacctttgncgctgtttntgcaacgttcgcagtgntactctgcgtgaaccggtagactgcttgg

SEQ ID NO: 427493 - DNA, 121 bp, Homo Sapiens
  misc_feature (46)..(46): n is a, c, g, or t
  misc_feature (88)..(88): n is a, c, g, or t
aggaaaagatgggaatatgtttctttcctttgagaattcacaaaanggggtcaaaaacaaagcaatgctgaaagcgaacatccatttngcctgcaattcaaggcgaaaatccaaaggcatc

SEQ ID NO: 427494 - DNA, 114 bp, Homo Sapiens
  misc_feature (40)..(40): n is a, c, g, or t
aacatcctgtcgcagaaactcccaatataaacgcccccanacactaacacaaaacagccttattaaccagataagttctccactaccactcctagatttgatgtaaccctgaat

SEQ ID NO: 427495 - DNA, 193 bp, Homo Sapiens
  misc_feature (138)..(138): n is a, c, g, or t
cagaaactaatcaaaagaaagtctgacaactgcactcccccttgcatgccattctctcaagcccataatcttggagtatccacaacgtgcgaaggcctaccctttgtgtgtactcatctcacgtttacgtattttgtngttgaggagctcctctacaaatgttgcgtatcttccgaatcactcatttagaaaa

SEQ ID NO: 427496 - DNA, 189 bp, Homo Sapiens
  misc_feature (116)..(117): n is a, c, g, or t
  misc_feature (158)..(158): n is a, c, g, or t
acagaaggactttgtctctttagcttgtttagctcaatgaacattatctcggcaaatgactctgctttctcgaaggtccttctccgctccaggtttacttgcatctctcatacttnntacagccaacatgaacactctatgtattttctaagctttcntctgttcaagaactttgaatttaaaacgtct

SEQ ID NO: 427497 - DNA, 113 bp, Homo Sapiens
atataaaaaagatccgcataataaaccaaatcagaaaataataccttgtaatacctctgtaagaagcagaatacaccatatgttattcacatgtataggagtgataagaaaat

SEQ ID NO: 427498 - DNA, 182 bp, Homo Sapiens
  misc_feature (25)..(25): n is a, c, g, or t
  misc_feature (54)..(54): n is a, c, g, or t
  misc_feature (61)..(61): n is a, c, g, or t
  misc_feature (63)..(64): n is a, c, g, or t
  misc_feature (67)..(67): n is a, c, g, or t
  misc_feature (71)..(71): n is a, c, g, or t
  misc_feature (138)..(138): n is a, c, g, or t
  misc_feature (143)..(143): n is a, c, g, or t
  misc_feature (151)..(151): n is a, c, g, or t
aatctaccaaccttaaagctcccgngataaagctgtatttccaaaagacctgtntttattngnnggngttngctttctttgtcatctagagccttgttgtacatgcaatgggtgggagatagtggtacctactgttgnttctntctgtgtnttcatcatggtgttgtctaggtctcctgagg

SEQ ID NO: 427499 - DNA, 159 bp, Homo Sapiens
  misc_feature (21)..(21): n is a, c, g, or t
  misc_feature (29)..(29): n is a, c, g, or t
  misc_feature (44)..(44): n is a, c, g, or t
  misc_feature (100)..(100): n is a, c, g, or t
gccacatctcaacactatacnactcgctnttcgaattcgccgtnttagaaccgcaagagaccttgatttagtcacgcgagttcgtcttcctgttccacangaaaataaagctagggaggtgatttatctatccgagaaaaaagccggggactggtggaa

SEQ ID NO: 427500 - DNA, 193 bp, Homo Sapiens
  misc_feature (39)..(39): n is a, c, g, or t
  misc_feature (43)..(44): n is a, c, g, or t
ggcactaaagcctttaataatacgagatgaaatgcaacngtgnnatgacaagtaagtgagcctgacctggcattgcctcgcctcaccgctggctttgaccagggtatgatctttaacttttctgagctgatttgatcgtggtctttacacacaggtggtcgttcctgtttggacactgttttatttgtttgac

SEQ ID NO: 427501 - DNA, 101 bp, Homo Sapiens
  misc_feature (88)..(88): n is a, c, g, or t
gcagttggcaggtgcactatcccagatgggccactaatagaaagttccgcaaatgcaccccgttcccctgtgcgagatcgtttgaatnagaccagaaactg

SEQ ID NO: 427502 - DNA, 128 bp, Homo Sapiens
  misc_feature (63)..(63): n is a, c, g, or t
  misc_feature (71)..(71): n is a, c, g, or t
gaagatacagaaccatccgtgaaaatcatttagcactggagaccttctttgtattacttcctngttactangacctctaattcaatggggccctgctggtttgtcgatgaattgagcaactgagaacg

SEQ ID NO: 427503 - DNA, 147 bp, Homo Sapiens
  misc_feature (81)..(81): n is a, c, g, or t
  misc_feature (98)..(99): n is a, c, g, or t
  misc_feature (101)..(101): n is a, c, g, or t
  misc_feature (119)..(119): n is a, c, g, or t
  misc_feature (131)..(131): n is a, c, g, or t
atcccttgggagtttattctcctggtaagctgtaattgcatatccagtttaactggactgggctgtgttgggcgaggatcngcagggttttttcctcnntngaaagatgaaatagattnttgagcactggntgcagagccaaaatgc

SEQ ID NO: 427504 - DNA, 166 bp, Homo Sapiens
  misc_feature (47)..(47): n is a, c, g, or t
  misc_feature (68)..(68): n is a, c, g, or t
  misc_feature (108)..(108): n is a, c, g, or t
caatgcccaatctgagtgtatacacatcttaggaaaaataatctaangtaacttttgagggtgagagnggaaataagagatcacatttattcaagactgatccctatnaggaaggagaggcccaggcacagataccacaaaagagcacagtacccagctgtcctgg

SEQ ID NO: 427505 - DNA, 207 bp, Homo Sapiens
  misc_feature (154)..(154): n is a, c, g, or t
  misc_feature (197)..(197): n is a, c, g, or t
ggccaaactcacaggagcctaggcacagagcactgaacactggctctgcagcgggaaggaattagagccttctgcttttgcacctgctttgagttaggaagcaagctctcttccttgccagacttccctttggggcaggacacttttttatacnctgaggcaaggcaaacagtcatagaacagttattaaacaatanaaaatgtgtt

SEQ ID NO: 427506 - DNA, 142 bp, Homo Sapiens
  misc_feature (127)..(127): n is a, c, g, or t
tagcaaatgtggattacaagcaaatacaacaagtcgtgcccctccaacccaccacaaacttctaaacgccactcagcagatgcataggattcgttacacgcaacgattgaaataaaaataaaagctncaaatgcaataccca

SEQ ID NO: 427507 - DNA, 175 bp, Homo Sapiens
  misc_feature (15)..(15): n is a, c, g, or t
  misc_feature (27)..(27): n is a, c, g, or t
cgcatatagcgtgcnataatactacgnctaaggagaaacaatttcctacacataaagtagtgagaacatcatcctataacagggaactgtgattatttaaaaaacgcagaacttatttatttggctttagaaataactgcatacaatgtcataagtcgaaaagaactcaaaataa

SEQ ID NO: 427508 - DNA, 186 bp, Homo Sapiens
  misc_feature (164)..(164): n is a, c, g, or t
aactgccatgaagtaacctgaaggaggcgctgactggagggattgattacaggatcggaacactccacactcgccattctctgcatataccggttagcgaggcgagcctggcgctcttcttcgcgctgagctaaagctacacacaatgctttgcgaccacaatncacccttcatttcgtaactgct

SEQ ID NO: 427509 - DNA, 143 bp, Homo Sapiens
ctgttggcgcgaagagagtctaacccaaaattgcaaaactcccgttgatttccaggccctaccacacggcgatgtcaacttgtcctccagacatggacgactaccaaagatcccagctacgaagcatggccttgcttagaaac

SEQ ID NO: 427510 - DNA, 222 bp, Homo Sapiens
  misc_feature (202)..(202): n is a, c, g, or t
  misc_feature (205)..(205): n is a, c, g, or t
gcctaactgtcaaagcacagaaaagttaacaaagggtgggactcgccatttcgaaatagcacatttttagcaataggctctctacactagagagccagtagactgatattctttaatgccagtttcctagttaatcgtaaagatagacacaattcccccctttataaaagcttctgtcgtttcacataatgactttaactanaanggaaatggggcaggaca

SEQ ID NO: 427511 - DNA, 159 bp, Homo Sapiens
  misc_feature (51)..(51): n is a, c, g, or t
  misc_feature (53)..(53): n is a, c, g, or t
  misc_feature (74)..(74): n is a, c, g, or t
  misc_feature (82)..(82): n is a, c, g, or t
  misc_feature (84)..(84): n is a, c, g, or t
  misc_feature (143)..(143): n is a, c, g, or t
cgtgcctagcaaacttaaactcgaacgcacgtaatagtgctcataattctntnaaggactttaaactttactcngtatgctntnttgatgactctagcagcctcgctaacctagtttaccccactgtccccaccggcgaactntttgtgttagtacgcg

SEQ ID NO: 427512 - DNA, 149 bp, Homo Sapiens
  misc_feature (30)..(30): n is a, c, g, or t
  misc_feature (57)..(57): n is a, c, g, or t
  misc_feature (121)..(121): n is a, c, g, or t
  misc_feature (136)..(136): n is a, c, g, or t
aattcactatgcgtggccgccacagctatncttgtcctcctggatcctgaaccttgnaagctgcactaatgagttcaacgggagtgctctgggcccaggtgtcagctgtagcaatgccccngctgcaactgaaggngccagcaatgcta

SEQ ID NO: 427513 - DNA, 229 bp, Homo Sapiens
  misc_feature (60)..(60): n is a, c, g, or t
  misc_feature (99)..(99): n is a, c, g, or t
  misc_feature (113)..(114): n is a, c, g, or t
  misc_feature (165)..(165): n is a, c, g, or t
  misc_feature (167)..(167): n is a, c, g, or t
aaaagcaaccaggttcgagaaacaatagtgtatgtgttcctataggtatgagttattcantgtagattcgtttttctgcaatcctctgccgaaatgatntacacttacaatgnngaatgccataggacactacaatctgaatcaaaacagtcgcgtctgaaatgntngtgtggtagaccacccccattcaagccttcatacttcgtaaaaatgcaaatgttgaagatcg

SEQ ID NO: 427514 - DNA, 143 bp, Homo Sapiens
  misc_feature (105)..(105): n is a, c, g, or t
gccgggtgatggccaggaaggtgccctctgttttttgtaaaacagccattggcctttgtcattgagtcaccacctgcagggcttgggagtgagcgttgggtaggntcaggcccccagaaccgcctgggtactcaccgctagca

SEQ ID NO: 427515 - DNA, 234 bp, Homo Sapiens
  misc_feature (62)..(62): n is a, c, g, or t
  misc_feature (104)..(104): n is a, c, g, or t
  misc_feature (135)..(135): n is a, c, g, or t
  misc_feature (154)..(154): n is a, c, g, or t
  misc_feature (172)..(172): n is a, c, g, or t
  misc_feature (175)..(176): n is a, c, g, or t
ggaggggagtagaggaaattttcattctggaaaaaaatgcatactgtttgatatattactcntcatgctttccacagatattatacacagatattatattccanggattacgttgcaatgtcttcaaaaataganaattcattttatatttctngatgaaatataatagtanctnngctacctttgggaatgtgacaaaatactatgatgattacaactcattaaagcataaat

SEQ ID NO: 427516 - DNA, 160 bp, Homo Sapiens
  misc_feature (37)..(37): n is a, c, g, or t
  misc_feature (42)..(42): n is a, c, g, or t
  misc_feature (57)..(57): n is a, c, g, or t
  misc_feature (63)..(63): n is a, c, g, or t
  misc_feature (65)..(65): n is a, c, g, or t
  misc_feature (68)..(68): n is a, c, g, or t
  misc_feature (74)..(74): n is a, c, g, or t
  misc_feature (78)..(78): n is a, c, g, or t
  misc_feature (98)..(98): n is a, c, g, or t
  misc_feature (150)..(150): n is a, c, g, or t
tagagttactgagagccgacctgacgtctccaacatnccgtntcttatatctcatcncggttntngangaatgnagtnagggtttccgggagagaccnaacttgctctagccctttccagccgctgttgttaaactgacctcgtagggcntgagggaggt

SEQ ID NO: 427517 - DNA, 146 bp, Homo Sapiens
  misc_feature (19)..(19): n is a, c, g, or t
  misc_feature (61)..(62): n is a, c, g, or t
  misc_feature (67)..(67): n is a, c, g, or t
tcgcaggagaagaaacctngttgctccacaatgcaaccacactgattttctcttttctctnnagttntccttgtctgtaacaggaatgtcccttactatagcaggcggacacggccatgggtcaagcaccctgcttctggaacttg

SEQ ID NO: 427518 - DNA, 259 bp, Homo Sapiens
  misc_feature (58)..(58): n is a, c, g, or t
  misc_feature (90)..(90): n is a, c, g, or t
  misc_feature (113)..(113): n is a, c, g, or t
  misc_feature (190)..(190): n is a, c, g, or t
  misc_feature (236)..(236): n is a, c, g, or t
attggttttcctcatccactgagaatgctgctggttactgcaaacgttcaccaaccanagctttggtccatacagctttcttctagattnggagactctcaaggacagcaggngctttaaaatccctggactgtgttgagagggcttctttaggcttttcatgatgtgaatagccagtcatgaactttgngtctgtttcttttaggctctttttgcagcagcagagccatgctatngaaggagtgagaacctatgcgag

SEQ ID NO: 427519 - DNA, 163 bp, Homo Sapiens
attctgtacctgttctgaacctcgccataagggacttgcagcttcgatttgctaacctgaaattctgctgctgccatggaacaagcctgggctagcttgggggaggaggagagaccatgtggagtagagccaagctctggacatttgagagagcccggtaata

SEQ ID NO: 427520 - DNA, 179 bp, Homo Sapiens
  misc_feature (50)..(51): n is a, c, g, or t
  misc_feature (92)..(92): n is a, c, g, or t
  misc_feature (107)..(107): n is a, c, g, or t
  misc_feature (122)..(122): n is a, c, g, or t
aaccgctctccacaccgctcccacgagctccaagcttaaacgtccagatnnactttgttgctttgctgattttaacagcttgattctaagcncttactagtatcatntgtggcaggacttgntccatatcagtgttacttttgctactgttttgtagaacgatgtacatgaatgagcct

SEQ ID NO: 427521 - DNA, 122 bp, Homo Sapiens
  misc_feature (65)..(65): n is a, c, g, or t
attttgaggtatacaaaaatacattatagtaattacttggcatggtttatggcacgcagtatgtnctgaataaatgctagctttttttcctgggacttttcaataacgtttgtagagcacta

SEQ ID NO: 427522 - DNA, 270 bp, Homo Sapiens
  misc_feature (48)..(48): n is a, c, g, or t
  misc_feature (193)..(193): n is a, c, g, or t
  misc_feature (228)..(228): n is a, c, g, or t
ctgaggtgctgcctgtaatcgctttgtgggtaggtctgcttataaganttcgcaaagaggagttcctctgaaactccctagccccgggaaacagaaagaagaacagtgctggggcttcttttcctgttcctgtcttttccttccagttcccccttcccagaatttcctgtctctcaacctccactctgttttntccgccccagtgttcccccactctctttcattttnattgtcttaaatccacttctcccacttattccagctttctgg

SEQ ID NO: 427523 - DNA, 124 bp, Homo Sapiens
  misc_feature (72)..(72): n is a, c, g, or t
cggcactctactgcttcttgagacatgggaaagtggcttttgcctggaagaacacgagtggttgcagttttntaacaaatgcttgataagtaacattctcttgagtaacctaatggtaataagt

SEQ ID NO: 427524 - DNA, 300 bp, Homo Sapiens
  misc_feature (246)..(246): n is a, c, g, or t
tataaaggaaagaggtttaattgactcacagttcagcatggttagggaggcctcaggaaacttacaatcgtgttggaaggggaagcaaacaagtccttcttcacctggcagcagcaaggagaaatgtggagtgacgcaggggaaaagccccttataaaaccatcaggtctcatgagaactcaatcactatcaagagaacagcatggaggtaaccgcccccatgattcatttacctcccaccaggtncttcccatgacatgtggagattataggactacagttcaagatgagattttgggt

SEQ ID NO: 427525 - DNA, 316 bp, Homo Sapiens
  misc_feature (86)..(86): n is a, c, g, or t
  misc_feature (100)..(100): n is a, c, g, or t
  misc_feature (158)..(158): n is a, c, g, or t
ggaaggggtaagaaagagggtctatgcgagagaaggattaggaaattaaacctcctaggaatttcctggaagtttttattgttgtnaaatctggcctctntgggaacccagaaaagggaaatccggcttcagaatgtgagaagctgggagcccctttnttggcacagccaggctgccgttcccttgggttcagaggctttagtagggtagtagttatggaaggacttagaaaggagccatcagtcttggtccaaacacttgatagcagtgcctgataattgccatatcccccagtaaagtgggtagaagagatttt

SEQ ID NO: 427526 - DNA, 313 bp, Homo Sapiens
  misc_feature (115)..(115): n is a, c, g, or t
  misc_feature (246)..(246): n is a, c, g, or t
atgttattgtaggaagaaaaggaagctaatttgtgagatacccaaaatttggtgctgtagtttagcaacaagttgattgtctaaacaagcaaaagttccttgctcacagttgacntgaaaaaaagaagtagaaagattaaaagcaaaggacagtaactatgataattttggtttcttgcttgggagttaggtgatgtgatgccattgatttctatgatggtggatggacagatataaaggaaaaantaagtaatcattataataatagtaataatccacatttgttgaggtctaactatagtatatagtatgc

SEQ ID NO: 427527 - DNA, 175 bp, Homo Sapiens
  misc_feature (60)..(60): n is a, c, g, or t
  misc_feature (70)..(70): n is a, c, g, or t
  misc_feature (103)..(103): n is a, c, g, or t
gcgagccccatctagagcaggttccctctgaacatgccagttccatgcatcaataaagtntccttatgantgaaaaagagtcctgaccaataaaactgttgtnagcctgtgcacctggtgagttgaggatagactggactttagcttgtggatacccaggctctcaaacagattt

SEQ ID NO: 427528 - DNA, 159 bp, Homo Sapiens
  misc_feature (90)..(90): n is a, c, g, or t
ttaggaacaatgaaccaacgcttgtggtccctacctcatggcctctgctgccttttggagaggaaggtagtaggttatagagtttcaagngaatggtgtaattttggaatatctcttgtgggaaatgggagaaagagttgagaaagagcccatgtaagg

SEQ ID NO: 427529 - DNA, 212 bp, Homo Sapiens
  misc_feature (18)..(18): n is a, c, g, or t
  misc_feature (27)..(27): n is a, c, g, or t
ttctcgccgaagcaaggngcggctctncggcctggcgccggttagttagtgtggtgcaaaagccggaaggagacacatttggtcctggcctcccggcagtcaccgtgccaaggacgaatggactatcgcttgatttggagtacacttcctcctctttaaagattacagatgagggggatctcgcgttctggggtgccctaaagccctctttt

SEQ ID NO: 427530 - DNA, 335 bp, Homo Sapiens
  misc_feature (47)..(47): n is a, c, g, or t
  misc_feature (144)..(144): n is a, c, g, or t
  misc_feature (165)..(165): n is a, c, g, or t
  misc_feature (284)..(284): n is a, c, g, or t
cttgggactagcctatcccgtgctccaccttcaaaccgcagctagtntgaacagccatgggcagtcgctgcatggctgggatgggcatcaagtcctggagctgccagccttatgatgagaagcaacccaggccgcccgcctggnattggggtttgagcagctgtntgcatttgacactggcaaagcatccctcctccccgagcatctggcccaaataagggagtggggactttgggacccacatatgttctgagggggagggcagcatccacagggggaggttntgttttcagccgagccattgacatggtcacatctggttctaagttgtttgg

SEQ ID NO: 427531 - DNA, 169 bp, Homo Sapiens
caacacagaatatacagtttgatgtgagaaaaaacatgcaacacttctaaggaagtaaaatttaaatgcagaatgagcatctgaaaaaaattattagtttgacagattcagtacttttctgctagctgaaatcaaggacggcaagaagcagaggacatttgacaggaat

SEQ ID NO: 427532 - DNA, 408 bp, Homo Sapiens
  misc_feature (63)..(63): n is a, c, g, or t
  misc_feature (115)..(115): n is a, c, g, or t
  misc_feature (125)..(125): n is a, c, g, or t
  misc_feature (152)..(152): n is a, c, g, or t
cagatttcctgagaagcctcttatcacagccagcacagacatctgtgcctttcctcgcctganatgtcaccagctcagggccactccctgccccagccagatcaatgggcctttnacggcttctnagggtggatcctaggagtgcccctgtnacgaatgctcagatgactgcctctctaggatttctgtttgtttctgcttcgcagtcttccctccacccagaagctcccgaatgtccaggaagaattgactaattctctccatgagtttcttgcccacaggacgaatggagccattgctgtaacaaccttattttccactaagtcagaataaggagacctggacagaaagagagtaatgggttgaggcacaaggaggcgagtattttaaatcaggttatggaatgtg

SEQ ID NO: 427533 - DNA, 227 bp, Homo Sapiens
  misc_feature (31)..(31): n is a, c, g, or t
  misc_feature (95)..(95): n is a, c, g, or t
  misc_feature (144)..(144): n is a, c, g, or t
gtttttttaaataatgctatccaattatttncagtagcaattgatttgtgagggcattttgaaccttgtaagacaccaaataatgacgtgttttnattagtcttgtgatactagtatccacctaggtcattagatatttaaaanctgcactttatataggaccaacgatatttaaaaaaatagtgaagtatctttcttacactagtgttgatgatgtgtatatttct

SEQ ID NO: 427534 - DNA, 137 bp, Homo Sapiens
  misc_feature (12)..(12): n is a, c, g, or t
taaatatctttnctttctaatatacacaatatgatgacatttttaacttaaatgatatgcagcactttttgaacctagaaacttatttaataatgaagctttataactctttgctatagattaataactttccaaac

SEQ ID NO: 427535 - DNA, 336 bp, Homo Sapiens
  misc_feature (34)..(34): n is a, c, g, or t
  misc_feature (274)..(274): n is a, c, g, or t
ataagatgtccaaaatagctggttaaagcatgtntattaaaaatctccctttgaacaagtcattaaattctgagcctcatgtttcacatgctaaaggcccagattctttctcatcaaaattttcccttcctcagtacccagctcctcacctctgaaaacaattaatcagattagttgattcacccccagatactcaaagagctctcaggctccccagggtaggttggtttcttcccgcggtgagaggaatcagcatgtggcagagaagttctcnccaaatgctgccttcacaagggctattcagacctggtgagcagcaggaagagaggggttctt

SEQ ID NO: 427536 - DNA, 151 bp, Homo Sapiens
  misc_feature (56)..(56): n is a, c, g, or t
  misc_feature (80)..(80): n is a, c, g, or t
ccctgaagctggagttcggtgtctggataacaggaaaggcctgcatagctgatgtntgccagaggggagagagatctgtnacacaggggggccgccatgtttaatttggagttttgtgtggaagggggtcattcattgagtctgaattggg

SEQ ID NO: 427537 - DNA, 405 bp, Homo Sapiens
  misc_feature (26)..(26): n is a, c, g, or t
  misc_feature (28)..(28): n is a, c, g, or t
  misc_feature (77)..(77): n is a, c, g, or t
  misc_feature (86)..(86): n is a, c, g, or t
  misc_feature (131)..(131): n is a, c, g, or t
  misc_feature (346)..(346): n is a, c, g, or t
  misc_feature (382)..(382): n is a, c, g, or t
ccatccttggcctctggagctaattnanaaggctagggggagttccgctgtagggagaaggatgttgcatccctttntagattgtntagcattcaaaacctgctgaacactcaccctcaatgtatattctntgttctggcctgcttcaaggtcagttacactacttcctgggatgggcctttctctggcttaagcttggttgtccctggctttcccaaggatcacagcccaaaaggcacagtggggaaaatttatggcctattccagaaggagtgagcagcctaaatcaagccaagccttgatttggggttctccacttcactggtaattttccctctgtcccctnaattgggttttcctattagttactagttttccaggnctccaagggaggttctgaggctt

SEQ ID NO: 427538 - DNA, 364 bp, Homo Sapiens
  misc_feature (22)..(22): n is a, c, g, or t
  misc_feature (40)..(40): n is a, c, g, or t
  misc_feature (55)..(55): n is a, c, g, or t
  misc_feature (260)..(260): n is a, c, g, or t
  misc_feature (326)..(326): n is a, c, g, or t
  misc_feature (354)..(354): n is a, c, g, or t
gtttaattggctgatggttctncaggctacacaggaagcntggtgctggcatctnctcagcttctggggaggcctcgggaaactttaaatcacagcagaaagtgaagggggagctggcacttcacatggccggagcaagaggaagagagagagggggcaggtgccccacacctttaaacaaccagatctcatgatgacttaactcactcactgactatcatgagaacagtactaaagggggtaatgccattatgatcgantcacctctcaccaggccccacattcaacatttgggattacaatccagcatgaaatttgagcggggncacagatccaaaccaaatcactcccttnttcctagttt

SEQ ID NO: 427539 - DNA, 369 bp, Homo Sapiens
  misc_feature (28)..(28): n is a, c, g, or t
  misc_feature (95)..(95): n is a, c, g, or t
  misc_feature (302)..(302): n is a, c, g, or t
  misc_feature (316)..(316): n is a, c, g, or t
  misc_feature (325)..(325): n is a, c, g, or t
  misc_feature (344)..(344): n is a, c, g, or t
ggaaactaaaaaggagggaacataaaantatgaggtcaaaatttgactgtaaagtcctctttaaaaaactaagaaatattgggtaaacttaaganctgggcagagatttgtatgtaggactagggaggagagtttgaagtccaaattctaccaagttagagaaccaaattacaatattgagctttatctacttgaaagcacattagggtcttggtttaggaattagaaccatatagctagactgaagaatgcatcatacaccagagagaaaatctgaaataggtcgactcaaaccaaacctnaatcctaatttgancagtttgantagcatttgatctttgctnacctgttggagcaaaggttcaatgg

SEQ ID NO: 427540 - DNA, 284 bp, Homo Sapiens
  misc_feature (68)..(68): n is a, c, g, or t
  misc_feature (114)..(114): n is a, c, g, or t
  misc_feature (120)..(120): n is a, c, g, or t
  misc_feature (122)..(122): n is a, c, g, or t
  misc_feature (128)..(128): n is a, c, g, or t
  misc_feature (143)..(236): n is a, c, g, or t
  misc_feature (246)..(246): n is a, c, g, or t
cagccactttggaaaacaacatgacatcagtaaagtagaagataagcagttccactgtcgggtatgtnccctaaagatactcgtccacatgcacaccagcatccatataaaaancatttntntcagcnttgttcatgatgacnnnnnnnnnnnnnnnnnnnnnnnnnnnnnnnnnnnnnnnnnnnnnnnnnnnnnnnnnnnnnnnnnnnnnnnnnnnnnnnnnnnnnnnnnnnnnncacttaaaantggttaattttatgctatatgaggtttcatttcatttg

SEQ ID NO: 427541 - DNA, 130 bp, Homo Sapiens
  misc_feature (45)..(45): n is a, c, g, or t
tgagagtgagcacttagaaatgtttatattaacttgacataactntgacatccaagcatgggagccttggaaaagagttttattatatttcacaaatatatcagtccacagtcgagttgactgtgacttt

SEQ ID NO: 427542 - DNA, 270 bp, Homo Sapiens
  misc_feature (40)..(40): n is a, c, g, or t
  misc_feature (70)..(70): n is a, c, g, or t
ctcgtgcgcaaaaaaccttgtaaaggccctagtgaaaganctttttccatcctgtatttcctcatttttnaatctgttaggttttcagccttttttcccacctactgttcctcctcaaactgccccaacagattttaagtagagttacattaccaatccatttcacaatcttgatgttctaattcaaaacctatgtattaatgtgtgcccatctgcattcctggaaagcttaatccaataaatgtatcctgggaaaatgaccaatgaagg

SEQ ID NO: 427543 - DNA, 337 bp, Homo Sapiens
gtcatttcatttctaagactcattgttttaaaatttaactcttcatgcccaaagagacatcttctttcacaggccccttcatgatgaatgatactccttccttgactcttccaatgtacagtcattttccaatggcagactgcaaaagactagatgtttcaactaaaccaaacactaacagtcctttgagtgctgagcaccataactggtgaagacaatggctgcttggaaaagtgactttatccttaggagatttctccattcccttgaggtttcttccctttcatacaactgtggaccactttgttcagatcttagagggtcaatctctctatag

SEQ ID NO: 427544 - DNA, 392 bp, Homo Sapiens
  misc_feature (209)..(209): n is a, c, g, or t
  misc_feature (271)..(271): n is a, c, g, or t
  misc_feature (330)..(330): n is a, c, g, or t
ctttcctggagggagtcagcagggtccccttgagtggtgggtaaccctaagatggtcttgttggctaacccttggacctggacacaggagaacattcgaaattggccttagcctggagaatctgggatggattcttgtagtttatataggagtccgtgctggggaggagcagttggggctatattcctactgctgggacctcatttttncctttcctcccagaagctcaagtgtaatgggaagggaaaggtgctgaagtcagggtaaggtnacggggccgccaagacaggaggcgcggggcacacccagggccagctttgcagcaagttngggctgcagcctggtggtttgtggggatttctgcacctggtgcttaacaggtgtcaagagtt

SEQ ID NO: 427545 - DNA, 330 bp, Homo Sapiens
  misc_feature (109)..(109): n is a, c, g, or t
  misc_feature (111)..(111): n is a, c, g, or t
  misc_feature (145)..(145): n is a, c, g, or t
  misc_feature (171)..(171): n is a, c, g, or t
  misc_feature (298)..(298): n is a, c, g, or t
cagcaacggacaagttagttaacttaaaggggggcatcctcaaggcagtaaactggagccaagtgggttaaatccttcttgctgctattaaggggaggagacaggtttntncagactctacattttggagagaaacagaaaagantgtccccaagtttcctttgccctgcnatgctggggcagattggcaaggtcccaagagaagcacaatggtaaccgacgctgcccttggctgaacttcttctgttaaatccttcggatggatgctggaatcgaccttggtctctaagttcgactnccgtgcaagtgttgagggaggagccaccttct

SEQ ID NO: 427546 - DNA, 219 bp, Homo Sapiens
  misc_feature (161)..(161): n is a, c, g, or t
  misc_feature (207)..(207): n is a, c, g, or t
tccccatctatctatcaaaaatagcggcagggcactgattgtccttactcggttaatgaagccatccccttacctacaaattgagaggggatagtacatatttgacggttcaggtttatgtgacatactcactcccacaggccaggaagcagaatgctgtntgctatctacctcatccaggaatttttaaaattagttttttcctgnctatttctatct

SEQ ID NO: 427547 - DNA, 372 bp, Homo Sapiens
  misc_feature (41)..(41): n is a, c, g, or t
  misc_feature (56)..(149): n is a, c, g, or t
ataatttgtactgtctccccctactagaggtaacttatttnagtccaagaacattnnnnnnnnnnnnnnnnnnnnnnnnnnnnnnnnnnnnnnnnnnnnnnnnnnnnnnnnnnnnnnnnnnnnnnnnnnnnnnnnnnnnnnnnnnnnnnagtgattaaagcaaaggctctgacttagaaccgaaattgagtcctggtgctggcactcgtctgctttgtgatcttaggcatgtcattaacctatctggcctgcttactcttctctgaaatggagatagtagaaccaagtaggtttgtcttgaggattcaatgcaagaatctgtgtaaagctctccagctccagaatcttggtgcataataaccagtcaataag

SEQ ID NO: 427548 - DNA, 116 bp, Homo Sapiens
  misc_feature (25)..(25): n is a, c, g, or t
  misc_feature (51)..(51): n is a, c, g, or t
  misc_feature (53)..(53): n is a, c, g, or t
gttattttagtcttcaatatatttnctttagctctacagtttctctgtctntnattgtcctctcatctgaatagtaacttttaaaatttaattagtaatcttattttgaagagttt

SEQ ID NO: 427549 - DNA, 116 bp, Homo Sapiens
  misc_feature (45)..(45): n is a, c, g, or t
  misc_feature (49)..(49): n is a, c, g, or t
aatcagggtaattgtgcatccatctcctcaagcatgtatcatttntttntgttggaaacattccaattacactcttttagttattttaaaatataagaaaaattattgctaattct

SEQ ID NO: 427550 - DNA, 274 bp, Homo Sapiens
  misc_feature (75)..(75): n is a, c, g, or t
  misc_feature (100)..(100): n is a, c, g, or t
  misc_feature (158)..(158): n is a, c, g, or t
tctttgcacccatgaatgggcgtgcccaccagaggaccccccccagaggtgaactggctaggcaaaacgtttgtntgtttaaactgggataggtgttgtnggttgctcctcaaagaggctacaccatcgtgtgtgccccccatgatgggtgggtacanctgcttcccatgcccttatttggccaactttggtgattacactcatacttgtaacccactgagggcagctctaacagcatgatcaaagaataatggatttgcctttggggaggccg

SEQ ID NO: 427551 - DNA, 216 bp, Homo Sapiens
cagactagaaagtgaaataatatccaagcattttatatccccataaatatcctcatagtagtaatggggagagggggcacatttatctcaatgaacctgccattgcactaattttttttggaactctgcttttggaaaaagttctaaacttttttgtgtaatcgtaccctttggcagtctggtgaggcctatgggctctttctcaacatagtttgt

SEQ ID NO: 427552 - DNA, 374 bp, Homo Sapiens
  misc_feature (228)..(228): n is a, c, g, or t
  misc_feature (318)..(318): n is a, c, g, or t
  misc_feature (347)..(347): n is a, c, g, or t
aaaatgtgtagtggttttgtgtcagtatttcctgatgatgttgaacagggacagcgtaaaaagtgatatacattccaaaaaatcagttgataaagtagttttattttcaccttttatcagaaactttgcagatctgccaataagagatgtaatagatttgagttttacctaatcttgtttgtacaaggataagaattattgaaatatgttactagttagctttttccnttgtatttcaattctttttgaaatcttggaagtttggcttagtctttgattacaccaaggatacagggcttttgaagacctgggaggaanctagtgagtattccattccaaaagcaagncttaagactggttcaggaccacaagca

SEQ ID NO: 427553 - DNA, 327 bp, Homo Sapiens
  misc_feature (253)..(253): n is a, c, g, or t
cccagaggaaggatcttctaatcaaaagtattagcatgttaaaggccaggagctgagagggaacacactgtcatccaggcatgggggcagtacctcctacctacactcccctatcccaagcctgctctccaggagccattacaaggaatctggcaagctcatcacattaattataaatggtgaatgaaggattaacttgttggccatggtagcttacattttcaacagagaagcctcttgccagataaatgangctctcatagtaggatctcaggcataaatgataggtcaattaaagctagtaaattttgttggggggtacctccc

SEQ ID NO: 427554 - DNA, 295 bp, Homo Sapiens
cagggctgtatgggtcctggggcactctgcttacccactcacccactgtgcatcattttcagaagagtaagctgcatcctaatatccctcaataatccaatatgtttcttttcatctctgaattattagaccttcctggaattctatttgcagctgataggaatccaagttctaggtttcctgccaactcttcagtgaagcattttgctcattaaccaccaaaactcattcgggctggagtagtcaaatcccctcatcataggaacacatgagtgggagggcaacagtggggttt

SEQ ID NO: 427555 - DNA, 191 bp, Homo Sapiens
ctttttatggctcttaagtcccgaacaattatacacacccattacagttttttggctgggaggatgagaatgttacagggactgatagagatttagggagtctaataatgtgctttccactacaggttttagtcctttatagcttctggttgttgatgatattatgcaggtttgataaagatttagatggg

SEQ ID NO: 427556 - DNA, 295 bp, Homo Sapiens
  misc_feature (245)..(245): n is a, c, g, or t
ccggctcccagcaggcgtcgttgcctctgccctcctgctcgctctatgctctgccaccagcatttcatcctgtggatgacaacgccaggtggatgcagtgttcttccattggttacttagctccccagattatctgtggaaaggagtgggggcttctaaactgtccactgccaatggggtgcagggtgactgttcctgaaggcagcccttcagggcacagctggccaggggtggccttgtgagtngacacaacaggcttttaggtctctttcttgggcaagggcatctcttgcca

SEQ ID NO: 427557 - DNA, 262 bp, Homo Sapiens
  misc_feature (78)..(189): n is a, c, g, or t
tttttttaaaaaaagctagaagcaataatcaattcattagcaaaaagcaccactagcaatgagattgtggtctgaaannnnnnnnnnnnnnnnnnnnnnnnnnnnnnnnnnnnnnnnnnnnnnnnnnnnnnnnnnnnnnnnnnnnnnnnnnnnnnnnnnnnnnnnnnnnnnnnnnnnnnnnnnnnnnnnctattgaatagtctaggattatttccaaaagaactcagaagcaagttgaagggtctcccactggcttggccaa

SEQ ID NO: 427558 - DNA, 262 bp, Homo Sapiens
tgtctgcttacactacaaatgtccaaagagtggggggctcccagcccttgggggaggcagacaggacgagccagcacttccaatcccaccaggacatggcagggggccggctctgcgccaagcccacaggactggaccaaggctcgtcccactcatcagagggacaggaccagcccacagtcctgtgcaccccgggccaagcctctcctcccccactgccacgttctcaggttaatgacaagcgaataaaagggaagatcct

SEQ ID NO: 427559 - DNA, 127 bp, Homo Sapiens
  misc_feature (32)..(32): n is a, c, g, or t
  misc_feature (63)..(63): n is a, c, g, or t
cacatacatgtccccctcttactccatttctncttcccatcccaacaaaacttcttgaaagtnctgattagcccctcattctctcagccattctgttgggctttcatcctcactggtctacgggaat

SEQ ID NO: 427560 - DNA, 264 bp, Homo Sapiens
gtaactttcatttcagaaacggccacctgtggtaaaaagttatgccagtttatgtgagcagatgaaaatgatacacctcatcaatttttaaaattagggtactgacaatatagtcctccatgctgtccttttattgttgaaaacaaaggaaaactgagtatcagtggatcagtaagaaatgagtgttcccttttgtaagtggaatctgaccagctttgtctggaatttgactggttgtatggaaaaggttcctaaataggctgg

SEQ ID NO: 427561 - DNA, 147 bp, Homo Sapiens
  misc_feature (46)..(46): n is a, c, g, or t
  misc_feature (78)..(78): n is a, c, g, or t
  misc_feature (81)..(81): n is a, c, g, or t
  misc_feature (96)..(96): n is a, c, g, or t
ctcatgtcttagtagagaaatatttatttattatgatacattcaantgattgtcaagttaaattaaatggttgtgtcngtnctattgagaatgcanatgtgattatcttttgaaggctgtattactgcatagcttcacccaccctcg

SEQ ID NO: 427562 - DNA, 322 bp, Homo Sapiens
  misc_feature (167)..(167): n is a, c, g, or t
agaagtttctgcaaccagcccattgaattttcacaatttccattaattttcagttcatagcaacagatctttctttgttttatgattagcgtaccattgagtggcatgtgttcactgtgatgttaacaggtcaattctagcaatacacaatagggatcttcattttnaactttaagtttataaaatgttttataaactgatgttcattattttcagcatacaccttcaagagtttattcttctgtttcttcaggtcatgtttggtgatcactctactaccctactcttcttttaagactcataccactgttcagggtctcca

SEQ ID NO: 427563 - DNA, 197 bp, Homo Sapiens
  misc_feature (33)..(33): n is a, c, g, or t
  misc_feature (102)..(102): n is a, c, g, or t
  misc_feature (169)..(169): n is a, c, g, or t
ttcacaaggacgtgaggcattcacaccctcctntttcctactagggaaggcactgacgtcagttttcacacattggaagcctggggccaggcgtgcattttnattttggtgaagaattctttatgctccttgatgttcctataaaacacaagcagaacgctagaatttnctcgtggtgcgtccgaggtctgttgctc

SEQ ID NO: 427564 - DNA, 225 bp, Homo Sapiens
  misc_feature (116)..(116): n is a, c, g, or t
  misc_feature (175)..(175): n is a, c, g, or t
ccagtgtgctaagcttccagtcttttacttgatcctttataacacagtgatgtttgagctgtagtcagattccaaatcaagtatcaagaattacagaatgtactcttctgtttttnaatactcttagttatttcttgaacttaaaagcaaatatatacatagatatgtgattaancaagtatagtaaaaagttaattgtaaggtttgggtagtagacatctaagt

SEQ ID NO: 427565 - DNA, 224 bp, Homo Sapiens
  misc_feature (172)..(172): n is a, c, g, or t
  misc_feature (203)..(203): n is a, c, g, or t
ctagaatccacacaaattaaatggcttccccaacactgcctttcaacacacacacaaagctactgattagacacagggaaactatctccgactaggcttgcccgcaaaaacaatagaaaatgtaggctgtgtctcactgccaccttctgaatcccacatgagtgtatctgantggccgaactacgctcacatccagaaccctnagtgcaagggcatttgggaat

SEQ ID NO: 427566 - DNA, 331 bp, Homo Sapiens
  misc_feature (188)..(289): n is a, c, g, or t
tggaaggggctagattgctccaggttcataactctgattgcaaccaccctctttctcagcctttctggaatgtggctgtttatgctccatgtacccctgggaacttcctgattgcccaacaaagattcaataccccaggctttggagtcattagactggagtttgaatcccaggttcctgactcaagnnnnnnnnnnnnnnnnnnnnnnnnnnnnnnnnnnnnnnnnnnnnnnnnnnnnnnnnnnnnnnnnnnnnnnnnnnnnnnnnnnnnnnnnnnnnnnnnnnnnnngactgtagagtgcttagcacccaatcaatgtcaactattagg

SEQ ID NO: 427567 - DNA, 138 bp, Homo Sapiens
  misc_feature (50)..(50): n is a, c, g, or t
  misc_feature (52)..(52): n is a, c, g, or t
  misc_feature (65)..(65): n is a, c, g, or t
  misc_feature (96)..(96): n is a, c, g, or t
acaagtcttgaggaaaggaggttatttccaaaggtcatagaggaaacagncnaaagaagcctggncttttgggccagagaaccccacccaactgtntttgttttaagccggctatatgagtttaagcaagtcacttta

SEQ ID NO: 427568 - DNA, 251 bp, Homo Sapiens
  misc_feature (101)..(101): n is a, c, g, or t
actacattttggagtgatgtgtgacacagccagagggaacaaaggcagtcacgcgggctggcacggaaagatgcaggagaagcggaaggaaactgtgtgtnatgcaccccgctgagaaacgaacagagtgggcgcccacggaggtgcagtgagccaggcggctggcagagcagcaccccgggtcagcttctgcctcccgcatttccgatggtctgaatcgtttgtggcagccaccatatattgtttttgga

SEQ ID NO: 427569 - DNA, 262 bp, Homo Sapiens
  misc_feature (12)..(12): n is a, c, g, or t
cagccgtgactnaccttagcttggcctctacattcttcagaccgtgggtttcttcccccagccccaggggtgggggctttctgaagccttctgtgctgtagcagagagaggctaagagactggcctgaggtcgctcagcaggtccgggggacagatgggtctagaattcctccttttttgtctacagtttctttccatgatcctccatcctaggtggtctctctctaggcagaatatagccttccttattcctgaacgttta

SEQ ID NO: 427570 - DNA, 150 bp, Homo Sapiens
  misc_feature (63)..(63): n is a, c, g, or t
gaaaactgagtgatatacatgggaattctaaggattttaaactaagaggaatatatcattganttgggttgaatttattgacatcggtgcatgaacctgagattctgggtgtgatatgttggcttgtgtgctaataataatatgtagtct

SEQ ID NO: 427571 - DNA, 315 bp, Homo Sapiens
  misc_feature (61)..(61): n is a, c, g, or t
ctgtatacgtgctgctgtctgccaggaaaaatccctgcttcctcccacttgtttgtctttnagatctcacctaaggggttattccaagaaaagttccctaacccttgtctcccagtctcctcaagtctgtaaaggatgttcctttttaatcctcctaagtctgcctatgacttacccaattatatttttaatatattgcacagttacttgaatgcactggatttttgaatgtcttccccttataagatttccttaagaagagggaacttttgtatgaccacgggtagcagtgtttaggcatacaacaggcaactg

SEQ ID NO: 427572 - DNA, 225 bp, Homo Sapiens
  misc_feature (42)..(42): n is a, c, g, or t
  misc_feature (77)..(77): n is a, c, g, or t
  misc_feature (97)..(97): n is a, c, g, or t
  misc_feature (104)..(104): n is a, c, g, or t
  misc_feature (191)..(191): n is a, c, g, or t
atttctgcagtatcagttgcaatgtctccttttacatttctnattttatttatttggatcttctctccttatttctnagtctggctataggtttgtngattttnttcaacttttcaaaaaacctactttttgtttcattgatcttttgtattattgtcttcatttcaatcatttatttctgctctgatctntataattactttacttccactattttgggtttgg

SEQ ID NO: 427573 - DNA, 362 bp, Homo Sapiens
  misc_feature (171)..(171): n is a, c, g, or t
cctctgtgttcctcacataagaaatttaacaccagcacttacccacacacactaaaaccaaataatttggatagcctcgttgtgattcacgtacatgtttcccaattgccggcaattttcactgtcaggctgactaaatgcagatcattaacttacagggtcatgtttttnaggccgttttggtattatgtaagaacattctcaaatctataatagcaagctctacccagtaatatttatagaagcgtatgtgtaattgttagtaggagaaatatctgaagacggttttattcgctctgtaaatatgtaggtcagggtctttaaggaaaatgctccattgtaaaacatttcttttttttggg

SEQ ID NO: 427574 - DNA, 318 bp, Homo Sapiens
cccccaccccatccccctgggagagtgtacttccctgctcccaatgcagagggatatgcacaggcatgagctgtcctgcgtctgacagaagcctgaagagtcatgtgtggttggcctgtgctcttccctctgctgtgagaacacatttcccacagaggagccgttccatggagccgagctacagcagctggcctgcagccactgagtgtcacagcaatgagagagcaatgtttgctgtagtaagcagtgagatttaggggttggttgttactatagcagagctaatacatgagtaaactgaagccagctgctgtcctt

SEQ ID NO: 427575 - DNA, 261 bp, Homo Sapiens
  misc_feature (87)..(87): n is a, c, g, or t
  misc_feature (125)..(125): n is a, c, g, or t
  misc_feature (139)..(139): n is a, c, g, or t
gtgggctggacttatttattcaattttaatgagtagaccacagaagcagctatgggaactcacttccaaggttatgttataaaagangagtgacttccatcttaagatgtctttatctgtccttnttgaatcacttgcnttggtgaatgccaacttccatggcatgaggtgtcactgtgcagagacccacccacctgccaaggaaacaaggcctgtaagaagcatgtgaataagcttggaggaagatacctccatacctac

SEQ ID NO: 427576 - DNA, 219 bp, Homo Sapiens
  misc_feature (96)..(96): n is a, c, g, or t
  misc_feature (107)..(107): n is a, c, g, or t
  misc_feature (120)..(120): n is a, c, g, or t
  misc_feature (136)..(136): n is a, c, g, or t
  misc_feature (164)..(164): n is a, c, g, or t
cctggtgctcccctgtggtggtttcttggtggattaggtagcaagggaagaggtgagaactgtggcaccagccacgccaactatggcacagttttntcatcaaaaanttccctgaaattnatggcaaacaatcgantagcaaagttctagttttatttattttnatatagtgagtgagtgatagtggtaaaggataggcacaatttagtctcgatttat

SEQ ID NO: 427577 - DNA, 381 bp, Homo Sapiens
  misc_feature (35)..(36): n is a, c, g, or t
  misc_feature (123)..(123): n is a, c, g, or t
  misc_feature (249)..(249): n is a, c, g, or t
  misc_feature (272)..(272): n is a, c, g, or t
  misc_feature (297)..(297): n is a, c, g, or t
  misc_feature (305)..(305): n is a, c, g, or t
  misc_feature (329)..(329): n is a, c, g, or t
ggaaagcaaagcaaaccagttcatcagcaggtttnntttgcctgcatgtcctgtgcccagccttgcagttgacacgagagaaatataaaacatggccctggccttccttcatttaaacatttntttttcccaagcacttactctgtgcaaggagctggagaagccaaagctggagaaaaacaaaggagggcctgccctcgagaagttagtggtctaatgttgtggttctcaaactcaggcgtgcgtttnattcgtctgggggccttgccagnccacagaacccatcccctgagtttntgaatcantgggtcttgaggttgggttcgtgngaatttgcaactttataaatttccagataatggtcttgcggttgggtaggga

SEQ ID NO: 427578 - DNA, 336 bp, Homo Sapiens
  misc_feature (33)..(33): n is a, c, g, or t
  misc_feature (62)..(62): n is a, c, g, or t
  misc_feature (83)..(83): n is a, c, g, or t
  misc_feature (111)..(111): n is a, c, g, or t
  misc_feature (269)..(269): n is a, c, g, or t
  misc_feature (271)..(271): n is a, c, g, or t
gaacagcgctccatgggctgttggatcaaattnattcctagatcccagtgctgtggaatctnagaatggttcatatgaatcantgtgatgatggctaagggatagtttggnctttttgtacctaatgcagcctcttggctgggaacaaagatggaggtgccttggcccacttcgagttctgctttccccggccttccctggtctccaggctttgaagtcccccatgttgtttgaatgtctcagaagaccatcacagtctaatggttaananttgggttctgggggccaggcacggttggcctgtaagccccgtaattttgagaggcccgatgcagg

SEQ ID NO: 427579 - DNA, 234 bp, Homo Sapiens
  misc_feature (121)..(121): n is a, c, g, or t
  misc_feature (195)..(195): n is a, c, g, or t
  misc_feature (214)..(214): n is a, c, g, or t
actcccaagctgcatgctgaattcctgggacaacaggactggcttgtggttccattctccagatccttgggttggcttctgggtacactaggagatctgaaatgctctcaggccaccaggnaagtactcagatgcaagaaagcacccagacactctgagcttttggtgttataactgcaatttataccatttgantgacaccaccctctttttnatatgtccatgcccctagta

SEQ ID NO: 427580 - DNA, 189 bp, Homo Sapiens
  misc_feature (134)..(134): n is a, c, g, or t
  misc_feature (148)..(148): n is a, c, g, or t
attccattgaacagagagtagagcattaggatttggatggctttaagagatgtggtaattttggaccaaaaaagcctgaggaatttagtcttcgctttcttaagagtatatctacacctttccagtatatttcnatcatgtagaaatnatgtctctcactgaggaaaagtgctggacagacctagaaaa

SEQ ID NO: 427581 - DNA, 264 bp, Homo Sapiens
  misc_feature (33)..(33): n is a, c, g, or t
  misc_feature (91)..(91): n is a, c, g, or t
  misc_feature (93)..(93): n is a, c, g, or t
  misc_feature (135)..(135): n is a, c, g, or t
ctgccacgtgacaatcgactagacgtgcctctntagcgctcggtgccttgctggcccagggcggccgctctgtacgctggagccgcgtctntntggttcttccggactccgttgccagggcgacgagtgcacctntcgattggagacagggcattccgtggcgctccccaaacggtgacaaacggtgataggacagggacaggccaactgaacctcgcagagaaagcactgggccctatccctttcgctgctcaacctaaacta

SEQ ID NO: 427582 - DNA, 217 bp, Homo Sapiens
tggaggtacgagggaaattgcctatcagtggtcagcagccatcttttcccatgttgagatagagccctatacaaacatcatggtgaagacacttatcttggtgacattgagccacacttgaggggattctttggtgactgacatgatagcaaggcatccttggaccagggagaaaagctcaggagttggaagatcagaattcaaattagatcttcca

SEQ ID NO: 427583 - DNA, 208 bp, Homo Sapiens
  misc_feature (104)..(104): n is a, c, g, or t
ctggaactcaatgtgcatagaagtccctgagactgacgccattctagatctaccactagatggtttgcgatgtacggaattaaaggcagtcacttctacctganttgtgatgaaagtagtttacctgaacatgctgggaaagtgtgctaccctgttttgtattagaaaccagtttccaagtaaattgaaaagcaaattttcagacttg

SEQ ID NO: 427584 - DNA, 305 bp, Homo Sapiens
  misc_feature (262)..(262): n is a, c, g, or t
aaaaagagcagattaactcgaaatgcatttaggtcatctggaaattgaattcctgtcagttcttatctttgcataatttatcttctcccctttagttaatgcttatggtattttgaagctgatgacatactttattttccaggagagcattaatacagtgtagttgtttgttagtgttggttaaaagaacttatcaacctttcattcccacctccatcttctagttaatgctccacagaagaggctctcagtaatccatttnaaaatattcagcttcagaaacctaacatgtacatttcctatcc

SEQ ID NO: 427585 - DNA, 185 bp, Homo Sapiens
  misc_feature (26)..(26): n is a, c, g, or t
  misc_feature (52)..(52): n is a, c, g, or t
  misc_feature (94)..(94): n is a, c, g, or t
  misc_feature (108)..(108): n is a, c, g, or t
cttttgaaacagggtctcactctgtnacctaggcttgagtgcagtggcaggntcatagctgccactgcaacctcgaactcctcagctcaaaggntcctcctgcctctnagctttccaactagccgggaccacagacacatgccaccatgcccagctaattttttgtttgtttgagatggagactc

SEQ ID NO: 427586 - DNA, 333 bp, Homo Sapiens
  misc_feature (124)..(124): n is a, c, g, or t
  misc_feature (164)..(164): n is a, c, g, or t
  misc_feature (194)..(194): n is a, c, g, or t
  misc_feature (239)..(239): n is a, c, g, or t
  misc_feature (296)..(296): n is a, c, g, or t
ccgcagcatgcccactcctgagctgccaggctgagccatggaggactgaaaggaggtcgcccggcatcacctcccgaggtgagacctgctgcaaaagccaagccagcagcattgacgccctttnatatcttcgccatttttgctgctgaaagacttggcttttnagtctgaccctggccctctgtgaccatgtntctgtaaagccagtgggtcaggcccttccatgcagggccagaggnaaagcgggcccagggctgcagtgagagcggggcaggggaccagcctaccagattggnttggaaacatggcttcagaaggaccaacttacccctt

SEQ ID NO: 427587 - DNA, 261 bp, Homo Sapiens
  misc_feature (110)..(110): n is a, c, g, or t
  misc_feature (208)..(208): n is a, c, g, or t
  misc_feature (243)..(243): n is a, c, g, or t
gaaaaatgcgcttttccttcccgcccacatcaccaccccgacttgaagacagtaggtgcttgattggaaagtgagtaggcatctttaatcgccctgattaaaggaaagtnttagcctgagagggcctgactgaaaagtaaccaaaggcttaatatcaaacactaattagctttttagtgccttaaccctgacctggttaccagttttntgtagtttctacacccaagccactgaagtcatctntggcccaagaggtaggac

SEQ ID NO: 427588 - DNA, 217 bp, Homo Sapiens
  misc_feature (21)..(21): n is a, c, g, or t
  misc_feature (26)..(26): n is a, c, g, or t
  misc_feature (54)..(54): n is a, c, g, or t
aaattacggtcccgaaaactncaganttccagaacttaatggtaaagcaagggnttaacagcagaatagaaatagccagagagaactaggaagtaagtcagatgacactacccagaataaggcactgagaaggccaaggaatggaaaatgcagaagaaaggatatggtgagaggttctaatatacatttatttggagtaccagggagagagagaagg

SEQ ID NO: 427589 - DNA, 190 bp, Homo Sapiens
  misc_feature (59)..(59): n is a, c, g, or t
gtgctctctgaggcccacagtcctttgtacattgccaaacaaatatgcccatccatttnattacatctcagaaacagcacaattctaattttagtgacaaaatcaagaaaatgaattccctcctgagggtggcttgggggaaaaagtgctgagaaaaaggctggaattaacactataggtcaatagttgt

SEQ ID NO: 427590 - DNA, 356 bp, Homo Sapiens
  misc_feature (84)..(84): n is a, c, g, or t
  misc_feature (320)..(320): n is a, c, g, or t
  misc_feature (332)..(332): n is a, c, g, or t
ctgccgcctctagggtggtcagagaatagcagctgggattttggagagggagaggataggtaaagcagcgtattgaagcatttncggaggggtgtattagtcctcccaccctgagcacaccaggacggggatgcatccttgccttgtgtgcttgtaaaggcttctttcccttggtatagcaacttcaactgcacctgaacctccaacctctgcccagcctctggtgcagggtggatagaggtctagccagcccttacttcctgaagagagcttctgtgggaaacttcgaggcttacagtagctttcccggctcccagctnctaccctaaccnccaccaaagcaagaaaccgggaga

SEQ ID NO: 427591 - DNA, 215 bp, Homo Sapiens
gccattcggattccttctttagccgtggtttgctgcttctctaaatgaacactcttccaggcatgctccccatttccaagcacatcatgtgtgttttaacttgagcgattttccttatgtcatgctgcaaacctggagttctttttccctccgtttatctctgtcctggctttccttcagtgaagcctgacattagctgtgtgcccagcccttct

SEQ ID NO: 427592 - DNA, 218 bp, Homo Sapiens
  misc_feature (101)..(101): n is a, c, g, or t
  misc_feature (117)..(117): n is a, c, g, or t
  misc_feature (142)..(142): n is a, c, g, or t
gaggcaaaccatccattttatttagagggtcaactgcctatcctttgcatatgagtctaaaccttacagcatataaatcttttcaattgacagtttaaagnttagatttactacagntgtacacaaagcagtcaatgtatgnaactcctgtgactctcattttaagtcattggacaaaataatttcactgaagggatgccgtggaaggaaaccttcct

SEQ ID NO: 427593 - DNA, 313 bp, Homo Sapiens
  misc_feature (43)..(43): n is a, c, g, or t
  misc_feature (102)..(102): n is a, c, g, or t
  misc_feature (260)..(260): n is a, c, g, or t
ctgatttaaggtgggcccagccagtggttcagttttgcctgtnttcgagtgattggaatgtacagccaagagagtgtaattatggtgctggcagaagtattnacctatctggatgtcactgtcttcactttctgactaggctgcttccagggaatctttccacctcaatatttatgagatatctataattttataacaaacttttaaaggagcctcggtttccttaaacacaattgatgacaccagttttctgggttttnttccatttttgtttatagaggccaggggtctcactgttgttgccccaggttgg

SEQ ID NO: 427594 - DNA, 172 bp, Homo Sapiens
  misc_feature (14)..(14): n is a, c, g, or t
  misc_feature (35)..(35): n is a, c, g, or t
  misc_feature (93)..(93): n is a, c, g, or t
  misc_feature (126)..(126): n is a, c, g, or t
gaaagcaacttggnaatgtctgtcagaagccttgnaaaatggatagcctttgatctggtgactccacatccaggaactcatttgaaaggaatnatccaaaacatagaaaagccatatggacaatgncattaattggtagtatttttaaaaatgaagcaaaaagtaccagggt

SEQ ID NO: 427595 - DNA, 283 bp, Homo Sapiens
  misc_feature (137)..(137): n is a, c, g, or t
aaaatgttcacacctccatagctggaggccccaaagactgataaatatgtagtgtataagctcagttacatgatgttgttaacattaacagttccaagattaaattcaacaggtggtcctaatccccagcacctgantttcacaaattacagcctgtctgcaatgatggtcttgtctcatatggctgcagactgaattactgttgagattaaatcactgtgtgcttttgttgaaatatatgctgcaagtccaagtcagtgatgagcggcatgtgttgaggctt

SEQ ID NO: 427596 - DNA, 126 bp, Homo Sapiens
  misc_feature (35)..(35): n is a, c, g, or t
  misc_feature (81)..(81): n is a, c, g, or t
acactgaagctgtaggcgagccatcccgtatcgantttatactcaaagaaggaaaagccagattgcagtgagtgggtaggnctagctcagatccaaatgaaagtagggtctcaagtaacccaaggg

SEQ ID NO: 427597 - DNA, 173 bp, Homo Sapiens
  misc_feature (42)..(42): n is a, c, g, or t
  misc_feature (116)..(116): n is a, c, g, or t
actcggtacacgagtggcctcttccccatgctccaggccttnactctgcgcccagcaaattcagagaccttggtaggcaggggtgggacagatgaggaaagggcaggcagcaagtntggtctgacgtcttcctcccagctgccacctccatgaagggaccactcacattcctt

SEQ ID NO: 427598 - DNA, 329 bp, Homo Sapiens
  misc_feature (63)..(63): n is a, c, g, or t
  misc_feature (243)..(243): n is a, c, g, or t
cccatcttccaaagccagaaggtgaaactttaacaagttttctaaaagcaaattgtgtttttnaaaagtgcatgtgtcatccaatcccatatgattgatctgtgctgggtgcagccttagaatgtaaattcttttgaattctaggcagagaatgcaggattggcattctaaatatttgtacatgataaacaaatgcttctttaggttacagcaaatagtttacttatcaagatcacggttgtnagatactgttgtccaattacagaggttttagatgaggctttctggaatgatttagtttccctgtaagggaggcctgtctattggga

SEQ ID NO: 427599 - DNA, 445 bp, Homo Sapiens
agggcaggcattgccttccacaaaggaaaaagcctataaaaccataagggacttcaatgtcacctatgtgctggtcatttttgaaggcctaactgggtattcccctgataatatcaccacgtttctttgaatggcccgaattggaggaagcccagatccaggcaaccttataagggaaaatgactattatactccaactgggaagttccgggtggaccgtaaaggttctccagtgttgttaaactgcctaatgtccaaaatgggtaactatcgctttgaacaggtttacacaaaacccaagcgtcctccagcctttgaccgggtccaaaaggctgaaattggaaataaagactttgaccttgatgtcctgaaggaagcatatacaacaaacctttgcctggtcaggatatccaaggtaaaggacctgaataatctaggcttgtca

SEQ ID NO: 427600 - DNA, 401 bp, Homo Sapiens
agctcaggtcttcctcttaattcaccagatacaatgatgatgacatcacagcttttaagataaaaattacggagggtttgaaataacagactatatatgcagaaaaagtgcattcagttggaaatccattatcacatttcctagaatccaccaatcatgccattccaagggttctcttacttagtcctcagtacttttgtccccctgcccaggtggcacaattctcacccccaagcgtaaaggccacagtccaaaagaaagggcagcttcttgtcaatgcctgatttctttctgccctagtgtcagtgacaatcatactcttggtggaaacctctactcagacacaggatagggtctagctcccaagacattgacaggaaaatcaaaatgtttgacagtgc

SEQ ID NO: 427601 - DNA, 299 bp, Homo Sapiens
tgagccactgtgccaagctgcccctgccacccctccaagatggaaagaactacagtaaaggctcatgctggcacagtgggcattctctgttgggaactgccagagcagctggtaaaagctcccaacaggaaaggaccccaatgctaccagggaccagggcttccctcccacagcccacccagtgtgcaggggtctctgaggccacaggtgcactcagtcgctcaggccctgatgctggctgcctctcaccaccctggcctcatctaccccactggaccagaactccacaggggcatctg

SEQ ID NO: 427602 - DNA, 233 bp, Homo Sapiens
accttaaccactccccatcccttttcctaccaaatgccactagcaatacaagatttcatatcatattacatcatggaagctcaaccttctggactttcaacaatgatctacctatggaagtataatacagagagtataaatacttttactaaagaaaaaccggacaaaagatgttggtaaaataaactaacacaagaacttgctggtgagaaactcctgcaaaatgtttggca

SEQ ID NO: 427603 - DNA, 248 bp, Homo Sapiens
ggtggtgggagccctctcccccggggcagcctctgtctgaggacagtcacaggtgggtgggacagcgggtgaaggggttagtgacagggctcatactggccctgccacaaatccgcagcgtaacttccaacagggtgtttctggccttcattttccccatctggaaaataagggtgtgggggaggggagcctcggcatcccataaacgctcaccatctgtaggcctggggcccgttctaggtggacga

SEQ ID NO: 427604 - DNA, 435 bp, Homo Sapiens
ggaaggcttgaataccaccggggggcgccagtgagccccaatctctggaagcattcgcaagagcagtggggtgggggtcagacagactccatatcataaggctttttgtaacacatttcatgtttttcagaggaatgaacctgactgctttcttagactcactttcttacaagaagtcttctaagtataaaatttgtattcttggaatactttcccaggaaccctcaattttcttacaacccaactccatccctcctcccacttttggggagccgttgctgggctcacattgcaaataacatgttatcttgtctcagaacagctctatccataatcatatctactttctgcaccagggagacatgcagcacgaggttagccatctgcccttccaagccttcctgttcaccactccaagaaggaaattctcttctc

SEQ ID NO: 427605 - DNA, 292 bp, Homo Sapiens
catgatcatccgaagctttcctcaaagactggatgactatgaacaggatgacgagatgcatggcttacgttgctgcagaaagaggggaaagatgagtcggggctgtaattacgactagttccatgtactcatgcgacgaggatgccggatgaccaattacatctgtagattactgcgcatgactgaccacggcatcgggagcgtagagcctatcgaccgagccatcatgaagatgacgcaagttctgtgaaggcctgtggatgtgatggccaacgacaatgggataggacgt

SEQ ID NO: 427606 - DNA, 450 bp, Homo Sapiens
  misc_feature (254)..(314): n is a, c, g, or t
  misc_feature (344)..(344): n is a, c, g, or t
  misc_feature (356)..(356): n is a, c, g, or t
atatgatcgtcctgggaagatttgggtgtgatttctctcctccttctccctaattgccaccccccacctcatttattgagctttcgcctaccacgtactgtactggggtctgttctgagagcctcacaggacacagggagctcccaggctggaaggagaatgccaggcttgatcacccatgccgttgggaagggagtatcctctggtgaggggtacagtcctgaatgaccccagtcagtcctttctatggagtnnnnnnnnnnnnnnnnnnnnnnnnnnnnnnnnnnnnnnnnnnnnnnnnnnnnnnnnnnnnncggtaactagcagctttacttttgcgagtnagctggagtttntcagagtttcatgtggtgaagaaggtgatgatgaaagctggacaggatgcttcttgcgtcacagattagtgtcttgatacttgcaatggctctt

SEQ ID NO: 427607 - DNA, 478 bp, Homo Sapiens
tggtcaaggaaggccttaccaaaaaaatgtcatttgagtgaaaacttgaaggagatgaattcagctgtacaaatccagaaggaaaattaaggcacagcaaacagcaaatgtagagccctaaggcaggacctgcttttactagaatagcaggcaaatacctggaatagaattagttagcaaatttggcagggaaaggtagcagtggtaggatagtaacaggaggcagtgtcagactttctttgacttagatgaaaagccaatcgaaggtttgaatggaggagtgacatgatttgagcctgctttttaactggatcagtctggctctcctaatggtaataggccaaaagaaggcgagacaaaacaggacacaatttaggagatagcggtaatcaggcaagggaagatggtgacagcttggtgtctagggtgcaagcaggtgaagtgatgagaagtggctggactctggctatattgtgtg

SEQ ID NO: 427608 - DNA, 412 bp, Homo Sapiens
tagcacaaaataacaaataagtattttttggttccatgatggtcacccacagcctgtgtatacaggaccacgcataatgggaatcagctttattttacaacagagcttcactttacccctccagcagttaatggattctgggtatttattaaaaactttacatttaactcaaagacagttaaataccaccagcccagctctggcaaagactgttggctttggttatctccagcatcattcaaatacactaccaccccaatcccagcccaatctttggccttggggaaaaaaacatgaactacgatgacaggacaagcagtaaaccttctccagtactatcagagtaccctttctggggttgcatcccacagaaacccatttggggcccaatatcatgtacacagagctaaaa

SEQ ID NO: 427609 - DNA, 124 bp, Homo Sapiens
ccacggacagggagaacttcacaaactagtgattaagcaggaggatacaggcaaccatgcaactcttgatggacaccatgtaaggccggctgcggaccagcatgatcccataaggctgtgggat

SEQ ID NO: 427610 - DNA, 177 bp, Homo Sapiens
  misc_feature (127)..(136): n is a, c, g, or t
ctccaaattccgggtttaaaaaggacttgttttttttggggaaaaaagggcccaaacatcgggctgttcccaaaaataaccccccgtttcacctttagaaaacaaattttaagactttaaccctaannnnnnnnnnagaggaggcctttgacaggcccactttctttcacaaaaata

SEQ ID NO: 427611 - DNA, 140 bp, Homo Sapiens
actcactggtaaagcaaacacacaaatgaggaagggaaaggactcaagtgttaccactacagaaaattaccaaactgcaatgataaacaataatagagaaagaaacaaaggatatacaaaatagccagaaaacgattgaa

SEQ ID NO: 427612 - DNA, 160 bp, Homo Sapiens
gcagggagctaaacatcaggaagtatggatatgtgtaatgacggacaccgaatccgtttacacgcgtgaagaggtacgaccagtggaagtcttacactgtgaacacatcctttcttctggggcaactcctggcgatacttataaaagcgcacacgatgat

SEQ ID NO: 427613 - DNA, 205 bp, Homo Sapiens
  misc_feature (93)..(93): n is a, c, g, or t
cgtagacactttctggactgtaagcctcgtatagaaagaactcttcttcatgttgctcctggtacagcttacctcatgtgtctctcgtgcgtngaatgacattgtttactaagatcaacaaggcattccttacttctagatgaattcgcttgctgattaagacgtagtactgaccaactgtgagatcatatagcaccatgtattt

SEQ ID NO: 427614 - DNA, 348 bp, Homo Sapiens
ggttgcttggcgcgggagcccccgcacgggctcgtggaaggaacagagcatagacattcatagcgtgggggtcacctggttgggcggcatcccagctttagccctggtgagtcctattgttccgttatgcacttattggttggggcaggaatgataatgacattctctgtgaaagcctgtgccttgctaaagggggtgaatttctcctttaacttatccctgggggattggggtttggctgtagagggtgtccttgcgtaattccttgacagggtccttgctttcctggctgttcaggagggcgtactggttgttgttcttcttcaacacttgcaaggaataggtgct

SEQ ID NO: 427615 - DNA, 232 bp, Homo Sapiens
tttgtgcggagagcgcggggcagggagctcggggaaggaacatagcagagacatccaaaacgtgggggttacctggctggccggcaacccacattaaggcctggggaggtctattgtgccgtcaagcacttatcaggctgggggcaagtaagacaatggtatcctcctggaaaccctgagccattgcacaaagggggtaatgatttcctataactcaaacctgggggtctgg

SEQ ID NO: 427616 - DNA, 217 bp, Homo Sapiens
  misc_feature (176)..(176): n is a, c, g, or t
tagccttccagctctcgaaatcggtgacgtctgccacgaagagcccatcgcagagcatgatggctatgtttgctgaggccaaggagcgatctgagctcgctgacttggtgaggaccattactaggtgctcgttcgatgagcacgactagccagagttgcagcagctctgcatggtngagaggtagactagtgacgatgactacctcttgtcctggaa

SEQ ID NO: 427617 - DNA, 130 bp, Homo Sapiens
tgcttattccctgccccttcctttaaaaaacttagtgacaaaatagacacacttgcacatctttggtttggttatcttgggactttttatttatgaagggttgaagggaggtggcaaaagagttgatgct

SEQ ID NO: 427618 - DNA, 130 bp, Homo Sapiens
  misc_feature (71)..(71): n is a, c, g, or t
  misc_feature (74)..(74): n is a, c, g, or t
  misc_feature (112)..(112): n is a, c, g, or t
ccacacctgaagagttggtcacgtagaaagggcggatgaccgtgcggaagcccgttaagatgccctgcctncanggggaagaagacgtgctcttttacctgtttgtgttcanggcactgggaatcgcagc

SEQ ID NO: 427619 - DNA, 756 bp, Homo Sapiens
aaaaacattacaggtacacatggaaaagatatgaacaccaagtgtaatataatctagccggaaagctgtgacgtctgtcagataagctgaagctgaaaatattggagcatgacatgctgaagggccaaaaggaatggaataattatgattcctattcttattacttagcctattcttaaacatgatccacaccaaccttctcataatccttgatcagggctgtcatttctttactggcctctgaaaactcatcttactgcataccctcactcacgtaccattgaacaaaggcacgcttggcatacatcaggacaaacttcgtgttcaggggaggccaacctcatcctagggtgtggcgatgactactatgcacacacttattctgaacttgtgcagggctccaccaagcaccaccagggagagggtgttagttgatgccaaccttgaagacaagcgtgaagacaatcacaaactggatgctgtgcatggttttgatggtggtcaatggcgccacgacatctctgagatccacgttacacggacaaatgcagtatgcatgtattgtcactgtgaggctcacatataaccatctgatcgcagtgctcatagtcgctatggtgagcactgatacagatgttgttcatggtatgctgtttcatgatagatgaacagggcatatgttgtcacagggcaatgatgctgtggtatggcatcagttggtctggaatatgtcacgttacatactaggtccatcaa

SEQ ID NO: 427620 - DNA, 233 bp, Homo Sapiens
tgccaggcccacgcccatcaagcagtggtgacagatccggagcctgagcttgtccagcagaccgagtggtatacgggccatcgctgtaaacctgcactgcgtctcttgagtgattacctgatcttgttgcatactactgtatcaacatagtctagatgagctgctcactcttcaggtcacccatgaactgatgtcgcttatatctcgacaccatgagggagtgtgaatcctac

SEQ ID NO: 427621 - DNA, 514 bp, Homo Sapiens
gatgaaggatatgcgggctgtgtcgctggtcacattactgtcaagatgccatatcaacgtggagcaggcggtggaaacaaagccatagctcaagatgcgccacaaaaccgagtgagagaacggccaatgctgggaactgaaactgtgtcgcttatgagattacctgcgctgcttgtatacactgtgtgagcaggtgcaggacgagctggtcatgctctgaggtcacccaagaactgatggcgtttatgtgacaagaccatgaaggacatgaaggcctacaaatcggaactggaagaacaactgacctcgcaggcggaagagacacgctcacggctgtccaaggagctgtaggtggcgcacgccactgtggctgcggacatggatgacgtgagcgccagactgtgcattaacgaaggaggtgcctccatgctcggaatagcaccgagaactgtggtgcgcctagtctacacctgtcaagctgggtatgcggtactacgagatgcgatgaactgca

SEQ ID NO: 427622 - DNA, 291 bp, Homo Sapiens
ggttcgtggccgttgacgggccagttgcgctactaaccggtagggtgggagctgtcgtgagctgctgctcatctgcgccacgtggctgctgtccgcggcagtggaggcgcccgtactgtgcggtcttaacgacgtgcgcaggcgtgatcccgccgtgtgccgcctagaggaccgtgactacgtgatctactcgaacgagtgctcattcctactacactgtccgctgatgctgctgctattactggccacattccgcggtctgcagcgttgttaggtggaactgtctgccaa

SEQ ID NO: 427623 - DNA, 497 bp, Homo Sapiens
cacagtggtaaagaaattacttccaaacacagcatgtattaaacttagcttcagtaagaccattactgtttaaaatgaataccaattgattacttcaaacataccttttttcactaacaactctgtagtagatacacatctactgctttgttgtcaaacttcaagaagaatgtttctaataatgtctctgttgccatacaaccaccttatttaatctatactacatgcacctgggaagaattgagagcgggtaattccttaggtaaatgtcctttcatccagggtggtgttatgactttttggtccatacagcctttggtcagcaacctttctgaggtagcctgctagaagtcttcatctcttcatcccattgttgcattaaagggtagtataggaaacgtgtgcagacagtcagaaaatggtcctctcaatcaatgatgtgggagatgagctggagtttcctttgtctccctgaagttgtaaatcccagaacataa

SEQ ID NO: 427624 - DNA, 145 bp, Homo Sapiens
gacctctgtgactgtgtctacgcgctctcagagctgacatatgcacctatggcatcttctcatatggagaccttatcactaggcatgagtcgatctcctgacatactagagaacagccacgtgtatacactggtgcaggatggat

SEQ ID NO: 427625 - DNA, 281 bp, Homo Sapiens
tactaataagacagactattgccgagaacacagtcgatattgttctgatcaactgcgatagatgcaacttgaaaagatccaggagcagtgttattccggtcatgaactccgtacattagttcttgctatgcagagactacggatgaagcagatggagacatagaggctagtgctgactaagcatgctactagctaccatctctgtagacgagtactgacgacactacgctgtccatgcagtatgctgatgtgcggcagagtcaggactagagtcacacatg

SEQ ID NO: 427626 - DNA, 108 bp, Homo Sapiens
tgaaaggggaccttggagagcttgcattatccatgagatacacatgatggcgtgaatgatgcgcctactcagggcctgctcttcctggggcgaacacagagccccttc

SEQ ID NO: 427627 - DNA, 322 bp, Homo Sapiens
ccctccacgtcccaacggtaacagcggtgaacctggtgctactggcagcgcatgagacactggtgctaatggagagtctgaacctgtcggtgtcaaggacctcctggccctgctcgagaagaccgagagcgaggatgctgatgtgaagcccgacacactggcctgcctcgaccctctgtcgagcgtagtggacctgatagccgtgctttccctagcgcagatcgtcgtgctgctccaagggacccgctgtgaacgccgatctccctgacatgctggcccaacgcacacctggagaacctggccgccccgtgagctggactgc

SEQ ID NO: 427628 - DNA, 123 bp, Homo Sapiens
gtcctattgctccgtcatgcacttatccctttggggcagcaaaacaattgttttctctataaaaccatgttccttgctcaaggcgatgatttactcttttatctacggcttgagggtttgggt

SEQ ID NO: 427629 - DNA, 215 bp, Homo Sapiens
agcattcactggtgtgttctttgaatggtgactaaatcctgagactctgataaagagcaacacgtaatgcattgtgcaccacacttgcataggcagactggatgtaagtggatgacacctcacggcgggtgctatttctctgcatagtctgtattctacattctatatagatatatacacgtgtgtacagtccataggtcgtacactggggaccc

SEQ ID NO: 427630 - DNA, 445 bp, Homo Sapiens
gcgggagcccatgcacgatgtacttcttcccagagagaaggtccgacaccggcctcttgttcaaagagtccctacgggctcgggagcggcctgacgtgcagaggtccgacttcgacatggacggcatcagcactccggctatccagggacgatgggcctatgtgggcgtgcggacagagctgatgtgcatcatactcttgtacgtgtatgcgacgagggcccagtgctccaggatgtgccagggcccctggagcaggacacgaggtcaaccaggcgctctctgcgccacgccgagccgcagctcgcgcgcacgtgcaagacgcacccagtccacgatctcgtcctctaagacctcgtgctccttcttctcgctgctgtggattaccatggagacgtgcgacagggactctgtatggacggcctcaagtcctccgacttgtccggg

SEQ ID NO: 427631 - DNA, 130 bp, Homo Sapiens
tgaagcactgcatactcgtgtagactttcacacgctagtgcatggcggtgtgtactacgatcagccagtttctaactctgatgcagccatacagacgaggaggtatagtctaggccaccgtcttctcatg

SEQ ID NO: 427632 - DNA, 130 bp, Homo Sapiens
cagccgcttgaacttgctgccctcggagcgagcagatggcgtcacggtcatctgcacaaagcagcatgatagcttctaggaaccagacctgatacctgtgactctgtatgagcgataccctactgaagtg

SEQ ID NO: 427633 - DNA, 172 bp, Homo Sapiens
caggcttgatatctgagagacctacatacatgacggagcccattgaggggattgttcctaccgcccgcacttcacatgggctgcccacagcgatggatgctgcctgggccttctcttctgccaggcgctgggcagcctcagtctcctgctgagcctgctcctcctcgatgta

SEQ ID NO: 427634 - DNA, 306 bp, Homo Sapiens
ggcacttggctggtcgtcatcccagcttcagccttggggagttactattgttccgttttgcacttattcgttttggggcacgaagacaatggtttcctttgtgaatccctgtgctcttgcgaaggcggtgaatttctcctttaactcaaccccgttggttatggtttagctgtagagggtggttatgctgaagtcctcgcaatggcccttgtatgtctggttgtacaatagcgcgtactgtatgttattcttcttcaccaatgatactgaagtatgagttggcccataggaggactccgattgctg

SEQ ID NO: 427635 - DNA, 426 bp, Homo Sapiens
agaaagtttattttgccaaggttgagcacacactcatgacatgatacagcctcaggaggttctgacaacacatgctaaaggtggtcggtgcacagcttggttttatacattttggggagacatgagacatcaatcaatacgtgtaaggtgtacactggttcagtctggaaaggcgggacaactcgaagtgggggcttccaggtcataggtagataagagacaaaaggctgcattttttggggtctttgatcagcctttcactgaatacacaatttacatggagtggggagtaaaggaatagtcacactgatgccttagtctggctcagtggatctgcatttttgcataaacaatagggcagaagcagcaatcagatacacatttgtctcaggtgagcagagggatgactttgagttctgtctattg

SEQ ID NO: 427636 - DNA, 450 bp, Homo Sapiens
cctatctgagctgttggaagggggctagatctttttactcctgcgttgatagaagctgccaccagggatcttggtggaggaagatcccttcagacccaggcaatcctcatggagctgtaagcctccaatgctcctagcaactaggggaatggatgcatcagttctgaacgatggactatggacatcaaatggcagcctgcacttcaacacttgcccctgttgctacaagaactgctcgaaccgccccacaggagaaatgcattgcattaaataaattaatgatttacctttctttacaaaataaatggtttccatcctatctgatctctgtgaggtccagagcaatagtcaatagactcatgtagataaatgtgcctttcacatggcataccttttattatttgttcaatttgagtcccgttagagacttacagcatttcagagtgacag

SEQ ID NO: 427637 - DNA, 115 bp, Homo Sapiens
ctgcctcgatgactggcaccgcaggtgtctgtatcataccacgaacagtgtagcaacgcacaggaggatagtccgagaagctcacaacacaattgtgcttatcaataacaatgtc

SEQ ID NO: 427638 - DNA, 220 bp, Homo Sapiens
gcatgccaccgtatgtgatggtgtggccccattaggccctgcctgaggcaaagctagcgagccctgacattcctccttgcttcattatgcgatctagcccttaatgaccatacatgcttctcttgccaccttgccacctattgtgatccctgttcattatgcctcagactgccgttctctgcactgaccagtcatactctattcgtacattagtcgccca

SEQ ID NO: 427639 - DNA, 130 bp, Homo Sapiens
ggctctgtacctggactactacaacatgtgccagaacggcagcttcctggcgaggcggtggatcttcaagaagatggacgcggtgaaggacaaggatgaaaacgacaggatgcaccttacggagtcaccc

SEQ ID NO: 427640 - DNA, 426 bp, Homo Sapiens
cacaggtaggaagaatagttatcaggtaagtcagagttcaaagcactacttgggccacattttactatggagggaggttatcaagcctccaagtcagaccccttgtcctcctcatcatttgcacctcctacctcacacccaggtaagctgtcctttggggtaagccagctattctctggtagccccagcttctacaccatccagagaaatttataagctgaggcaaggtacctggccctccctctctcccctcagcacactggcaccaatggtaggtcagattcaggttgagtagagcaatcaggagctttagttaggcctccagccatgtgctcaaatctaacttttatgagaaagcctgttcttcggagagcagattcttattaataaagttattaatagagtgataccttgagctctagtctt

SEQ ID NO: 427641 - DNA, 130 bp, Homo Sapiens
gcagggtgacctcctggatgtggatctaaccacctcgctgctatgttactcctgctagaaccatattagcattctttactgtctgtaacctaccatttgctactatcatcacaactactgtgagactgtt

SEQ ID NO: 427642 - DNA, 173 bp, Homo Sapiens
gcaggaggaccctgcatcgccaactggagaccctgacaaggacttaccgatccaaaccacacaccaaaaagaaccacgtagctgctcctctgcgaggagcggcactgccacaagcgacagaaacctcgacggacacaaacgcgcacgtccagtgcctgagcccctccggaaga

SEQ ID NO: 427643 - DNA, 477 bp, Homo Sapiens
ggcccatatatgtttattgatcgaaaagcaaaggactgactaaatagcacatggaccaggatgctctgcctatttctatcagaaagactattttgccatggaccagtggactgaggggtgttggcctgcaggtgacccaggaagaagctgggatgagaagctagatttctctgtggatagaaacacgaagctggctactggatgtggtggctgtcctgaaatgcccccaacatgagcaaaattgttacctataggtaggtaggggagagatgccgtggggagttaggggaaagagtttctgcccaaggctgaagtttagaaaaagtgccttctccctagcgaagcagagaggaaatagggagccttcaacaggtgcactggtacaggcttcagtttgaaatagggcaaaactaggcaaagtgaggggtcccatggcaggcagcccaagagctagtgttctcaacacagatgggatcc

SEQ ID NO: 427644 - DNA, 466 bp, Homo Sapiens
ccactctgcgcaaggaccagtcaccgctgctctcctcatctccattgagattctcccgcacacacctcccctttctttgggccgctgaggcctcttggacctccgaggtgattgccccgcccgcagcttctctccttccgggagcttcatttcttgttcctctccgtagtggctcagcggtaagcccaaggtccagcacacgaatcaggaaactgatggttcttgggtttgcaggaatccgcccagagaacagatgaaagtaacaggtaccaatatcaaaactgcagtgactcaccagaaacactacgtgcttgccactttgcttagcggtttgttgagtccaacaactgcgtgggtcccgggttagtctcctgaatttcttttgctgctactttggtcagcgttgttgtcagtttagcttgtggtggccaagcccttaaatgcactatatggttatgcagtgtaa

SEQ ID NO: 427645 - DNA, 275 bp, Homo Sapiens
aatgaacccacggagagtgagcagaagcatggtggtgcgtcacttccacttcacctgggaagcgcaaggagccaggggacctccctccgccagccaagggaagccatgagggactgtgctacccagctgggttactatgcttttcccatggtttttgcaatctgcagatcagaagattatcttgtgtgcctacaccaccaggaccctgggcttcaagcacataactgggcagctgtttgggcagacactgagctagctgcaggagtttttttcaa

SEQ ID NO: 427646 - DNA, 552 bp, Homo Sapiens
tgtcaaaatacagcgtgacagaatgctttacagctttgtagtatttagtggcatcagcatttaggagagtaggaactacgtgaagttctgttaggagcacaggctttctagtaactatttcataggggtcaatctgtgtctgtcgtaggaatggatctgatctgctgaccaaaggcaatggttggctttcttcttcagagatcagaaaaaaatgaaattcaaagccaatggtggtatctttggccaagataatccaatcgattcagttaattttgccaattttagttttaaaatatttgtccttttgacctttccagaagactgagggtgaaagggacaatggtagtaccactgtgtttctaacactttatttagctgcttcatagtttgtccaataaaatgagttcctctgtcactggagattcttccagagatgccccataaaggaaacacatgttcttataactccttagctactgccatagcatcagctctcctacacaggaaagcttctattccaaccagaaacatgccaactattacaagaacata

SEQ ID NO: 427647 - DNA, 201 bp, Homo Sapiens
attgcacatcaagtcctcttattcatttttattttaattaggcaagatttttcagaaccttgcctacttttgaaacaacgtcattcaaagtagatgttagtggtccagtttacactttacatcatgtacagacaaaataagaatgaacgttgaacacaggatgtggaaggggcgcaaagttagtgtctacatttagaacct

SEQ ID NO: 427648 - DNA, 418 bp, Homo Sapiens
  misc_feature (214)..(214): n is a, c, g, or t
  misc_feature (272)..(294): n is a, c, g, or t
  misc_feature (369)..(370): n is a, c, g, or t
  misc_feature (407)..(407): n is a, c, g, or t
ctaatttaggcatctgtctctgtctggtctggtcctcctgcctgcgctggggtttttcccagccccttggacaatgctgggaacaggcccaccgatcccttattcaaatcacacccgggacaatgagctcattgtgcaggccacagaaaaggggatgctgggggtgggagtgtataacggggcatcagggagtagagaagggtggggggtgtanaagaaaatgggaacccaggaaagtgtttactaacacagcccctgcagctgccttgggnnnnnnnnnnnnnnnnnnnnnnntcaacctggcttggagctgggggggaagtgctgggactcagaggtgggggggccccagagtagaagaaggctcannaccttcattttgttgacctctcccaccttcaacaatntatagctacct

SEQ ID NO: 427649 - DNA, 432 bp, Homo Sapiens
aactgtatctaccaagaagtagagcaggatcgcgcgcatggaatagtaactaaagcgctcccacatctcggtaaagaagattgtcgttagcccaaacgggtgcccaaaaaacgtttttaccttgttgggttgttcggaccggctgacggcatctaggtgctcgctcatgcggtctttccttccaggattaggtgggtcgcgtcgccagttgacgcgacgtgtctttatgatgggtatgacacaaatagcattgttcgcctaatactgtcttttatgcaaactgagacacagattttgcattatgggtgatctaattcacagggggattgttggtaaaactgtaccgcgattatgccgttgtcctgcgcacacacaagcttggggaggacgatcgcataatcacagtgctcacgaaggggagtgggcaggtgc

SEQ ID NO: 427650 - DNA, 272 bp, Homo Sapiens
gctctttagggggggctgaaactaatttcggggggagctgaactcaaaaccccccgctggggcaaatagcaacaccacacatgtactcctcccggggcttttgggggaattccgagaggcctttgtccgccccggtctccataaatgaagggtttttcctggggacttacacagggcccgccccagggtggggatcaaggtcaaagatgttaagcaccacttcagggacaccgggagggaacctcccaattaaaaagggggggaagcccccg

SEQ ID NO: 427651 - DNA, 264 bp, Homo Sapiens
ggatttgagcttgaagtgggcagctttaggcttagggtaagcagaatagtggagtcaggagcacaggcttgtagttggacagaccagggttttgagaataagactcttgacacttattagctatgtgatcttcgaaaagtcatgtaacttgtccaagctctataacctcatcaatataatgaaaataaacaggcttgttgcagggactgaaggagccagaccacaaaactagctaggacagacacctgaaggatacagtaaagt

SEQ ID NO: 427652 - DNA, 332 bp, Homo Sapiens
ttaagatggcaagaacagatatagcccatgtagtacttaggtctctgacgtggtttgtgtgttttaaagacatcaaggtgataggagattgacaactacatgttaatcagtgtccagaataattggtaatgaaaacacaaaagttgtactacacatgccaagaatgcaataaaaacaacttgaattattataggggacactgaagccatatctcacagtcattaaggaatggatacggagaagaataaattggcaagactcaaccactaccgattatatggtaggctaataccctaagttgcaaaactgaatatgaagagagaagaaaacag

SEQ ID NO: 427653 - DNA, 120 bp, Homo Sapiens
atgagccaccatgtctagctctattttctgcacacgaaagggtctgtaggcttcactggcaaaagggccatggtccacaaaagttaagaactcctatagctagagctctagagaagaagg

SEQ ID NO: 427654 - DNA, 380 bp, Homo Sapiens
agatgctggccataaacaatcatggaataaacgagcgggacatgggcaaacaatcgttaactgcttacaacaactaacaaactcccttcttgaacgggctaccaaaagtcataaaggcactataaaaccgaagtgagatctgtagtccatgctatgaacagggaaagtttatagtgagggttgacattatacatttagcatgatgcttaacatgttttcacacgccgaccctgactattgggaggtgaaatgaaaatggcggacatgagctgaagatacacaatttacacatgtaaccactgatatgtagacaggggccatctgagtgtcatcactggagagaccagattggctgacacgctgctacaaatgctaggggt

SEQ ID NO: 427655 - DNA, 317 bp, Homo Sapiens
ccacgcttcagggtggggagcctgaggcagagacagccgctggggtgagagctgcagctgcctcccaggacacaagcccatctcccaccggccctgtcggggctcactgagggcaggcggggcctggaaccaacccaacaggtggcagaagcctcatactcccagaggtatgtgcgcatgcctttacgtccaggagggacgggggcttgcttgggccccgtggtcccattcggctcgggctcagaaacagcacatccctctgccagcagcagagctttccccaagatcaccacaggagccccgcctgccggccgccc

SEQ ID NO: 427656 - DNA, 322 bp, Homo Sapiens
gacccctgaccgaactagggatctggacgcctgctgtgaacataagtgtggaacaactgtcccatgagggacctcaattcaggcacaggcagggcttcccattgacagcgccaaccgaggtgcagagggaaggcaccccgtatgatatgactgtgtccaggggcaacgtcactgtgctgaaacatgctagcatgatgactaacccgtccagtgcctatgtttgactgtgtaagggccggacctccgccatgcaggactacgctttggctggcgctcctgagacaccttatatggaggcctgtacaagcacattttaacacga

SEQ ID NO: 427657 - DNA, 151 bp, Homo Sapiens
gcttcatagacagactgcggaagggtggccggtggtcggactctgactcccagtagctgctcatgaggacatgcactgggcctgaacagacctcgtggggtttcatgctgtaccctttcttcacgacctgcgacacctcttctaatgacat

SEQ ID NO: 427658 - DNA, 172 bp, Homo Sapiens
gctcagcgcaacctccgggcttcggggtctgtttccaaaagggggagcacgtcgccctcgcgcacggcgcctttaacattgcggatgagggatcggttcgtggggccatgaatagccacgcgcacctagctgcactgaccgtgagaaccggttctgcccaggaccttggtga

SEQ ID NO: 427659 - DNA, 374 bp, Homo Sapiens
aatctgacatgcaccccagggacccataaaacccactgctctgtttagacgccaatctcttgtctctctcttcaggaatggagaggctgataccctttcctcctggcacagaaatccatgggttgataccctttctaataacaaacaagtacgacagtcctatgtcaaacctgttaccatttatatcttacacgtgaaccacgacgaaagatccagggtgactttctatgatggtgatcacaccaaatctacctaagatagcacctgcagtcaccatacatatgttaccctagatcaacatgatgaaatcaggaatattacacagcatgtaacatcatcagatatggatcattcaccttgatctggtgatcggg

SEQ ID NO: 427660 - DNA, 271 bp, Homo Sapiens
cctttgctcctcccacataaacccaccgaatgcctcccatgacactaataaacaaggaagcaaggccaatggcgaacctatacccatagacatctttcacgacaaccacccaaaaaaatccagggaacctccgtctatagggaaccacacacattcatactaagaaagtatctccattcaccttacacatctgatcatagtcacacctgtgtaaatcaggaaatttgcccacctctaacacaatgtccatggtatcattcacctcctctaa

SEQ ID NO: 427661 - DNA, 152 bp, Homo Sapiens
ggtggccggaaggatttggtatggtaaggacacctactcttggggagagggaaggtccctccttcggtcttagagtgggtaaaggataaccctgaaatgggaccattccattcccatctctaggcacaaatccaaccagtctgcttaccagt

SEQ ID NO: 427662 - DNA, 359 bp, Homo Sapiens
tgagatttagaaaggtgaagtggctttctaaagtcacaaagctaatgaggtgcaattttctcactagaagagaaaagggacaaaagctgggagacaaatctgactggctctattcctaagtatttatcctggagctcaagtactttaaccggcaagtgtctgagcggctttatatcttcttgtggtagagaaatggaaatgaaagattcaaaagtttgaaatatactctgctttagggaacaaaaatgtgggaagaataagtctccacattgccgttgaagctgcaatagcctggtagcaatttgcaatgcttataagctttcctcccccagatcatcaacatatggttgcatgagtta

SEQ ID NO: 427663 - DNA, 178 bp, Homo Sapiens
ggtggtgcacaaagctgggggtccatgctgaagaatcatgggcccctcctaacgcaccctagggagaatcataatgtgcccccctcccctcaccacagaacaagacaatggtttaaaaccaatacacatgtcctaaatggggtaccatggccatctccagtcacctcaccaaagggca

SEQ ID NO: 427664 - DNA, 169 bp, Homo Sapiens
cacgggcgaatatgaaaatgactgctcccgttaaaacacatcctgttctgatcaaaacaggcgatcccacgatcccaatgagccttattccatcacttgcattaatctgtttttgaacatttcgcctatggcatattccgctccgtataactattaccaatacggataa

SEQ ID NO: 427665 - DNA, 151 bp, Homo Sapiens
ggcctataaagcttcgtgggaagaaagtttgactttcgccgacgaatatgatactgaaatgcattttgtcgtaagtttgctctacggtgtatcctgataataggggaaatcaatgaatgaatcctcctactatgtcaaatacagctcctat

SEQ ID NO: 427666 - DNA, 197 bp, Homo Sapiens
tggcgcagcggtcagctgtgggcatctgccactgtgtctcttgtgagattacctgctctgggtccagacactgtctgagcctgtgcaggaggagctgctcagttcccatgtgacccaggaatttagggcgctgatggacgataccatgaaggagctgaaggcctacaaagtggatctggaggatcaactgacctcgg

SEQ ID NO: 427667 - DNA, 139 bp, Homo Sapiens
ttactaatttcaaacgctgcctggcacgcctgctgggagaggccatcaagggtatgattgatgtgtcccaacgcctgttcagaatgatcacgtaacatcatactctttgagttctaagttacaacaccctactttctgg

SEQ ID NO: 427668 - DNA, 413 bp, Homo Sapiens
  misc_feature (381)..(381): n is a, c, g, or t
ggccctagcagaggttctccatgagggacccacccctacagcaaacttctacatcttctgatatctaggcggagtttcccaaacctcaattcttgacttctgcgcacccgcaggctcaaagccatgtggaagctgccaaggcttggggcttgcaccctctgaagcaacagacagagctgtactttggctcctttcattcatggctgggatgcagggtatgaagtccctagactgcatacagcagagggaccctgggcccagcccacgaaaccactttttcctcctaaacctctgggcctgtgatgggaggggctgccatgaagaactctgacatgccctggagacactttccccattgtcttggggattaacattcagctncttgttacttatgcaaatttctgcagccagct

SEQ ID NO: 427669 - DNA, 127 bp, Homo Sapiens
ctgtgccagcaaccacgccaggacagtacactacccggcgaccacgaccccttaacacaagtcctgcgacctggaggctactccacaaccactgctccgcccaccgactccaagaacgacttgatct

SEQ ID NO: 427670 - DNA, 163 bp, Homo Sapiens
tttgtggcgagagcgaactatgacacaccagagtccaacctgcggacagagttagaggcgtactgacctatccaaagaatacacatcgctctacagcaagcggtcaggaaagccccatggctatgcctccatctagtacgaacacaagccagacatgcactcc

SEQ ID NO: 427671 - DNA, 163 bp, Homo Sapiens
tggaggcgcccccacccccattgtggggagtttggccccagctgacacaatggcctctggcttcatgaaggctggtttaccacagcccttcatgtaaccgcgcttgccagtgggtccccgggccaccctgcggatgccgagtcatcctcccgcaggcctttct

SEQ ID NO: 427672 - DNA, 107 bp, Homo Sapiens
tgacatacacacgacttggacaaataacgtagtctttaaactggcctcaataccaacaaatgagcaaggaatctagatgacagccactgtcaaggaccagatgaaca

SEQ ID NO: 427673 - DNA, 163 bp, Homo Sapiens
ccacctcagtgacagtggaaggaactttcgacggacaaatttatgacgtcactcgtgtgaccccgagatcgctctggtctgtgccttgcgagatgccggacagccgttacacctaggtagactgcgcgttcagctgctccaactcagtagtagcgctgagcat

SEQ ID NO: 427674 - DNA, 133 bp, Homo Sapiens
gacccatcgtaccacagtatgacctgcggtggcaaagaccctagatattacgctcttcggtaagtggatcactcgtaatatgcatattagggacgtttccctgccggagcacattagctatgaaggagaatat

SEQ ID NO: 427675 - DNA, 106 bp, Homo Sapiens
  misc_feature (49)..(49): n is a, c, g, or t
cacgacaccgtatacgtactgcgatgcgtatgcgtatgcgcatcgcaangcgtaaccgtatgctacatcgactcgctacgcgtatagatacgcgtacgcgatcgcc

SEQ ID NO: 427676 - DNA, 493 bp, Homo Sapiens
agcaaagcccaatttacgttgttttttttgttggcttttcagcccattttccctctggtctcccacgctgccccctcgcctccctactccggaatccgcgctctcccgggccttgcaggctcttcactcccgctcttggcaactggctgacaacgagcataaagaagggtatgggtgcgtggtcccgagtgctgtcacccagggctcagccacccacactcggcaacgggtgcagacgccagtgaactgagacgggaagttgaaatacataacgttgaaactgttggaaaactggtcaaaaccagggccatgtggacctttgaaactatgtggagtaaaaggggaaaatggaaagagcgagactgtaacaccgcccgcccttgcagactcctaacttgtgcagtgtagatttctgcacaaggaggttattgatagacatgagaggaaattcgagaaagactggtgaggggcgctggtgtgtgtggtggggacg

SEQ ID NO: 427677 - DNA, 172 bp, Homo Sapiens
tatcaaggctcgagaccttctcggcaagaagtaggaggagctgctgaatcctctggacgacctggaggtggagctgtcccagttgtgcgctgccaaagtgacaggcagcgcggcctccacgctctttaaaatccgtgacgtgcggagtaccattgcccgtgtcatggcggtt

SEQ ID NO: 427678 - DNA, 498 bp, Homo Sapiens
ccccctccttcgagccattactccaaatttaagtttactttcccatatactgaatctcctacaataatggaacttaaaatgcacactggtgattggtaagcagttgtgaacagagagaggcaaagtcatattttattaatttcaagggcttagggtataatttgaattctttttcaaagtgtccggattgtttttcagctgtttttgaagaaatgaatctaactcatctcagaagtcttgtcaagtatatctaatagatcaacgtatgtcgcagcctatggaatacttagtataaaaattgaagagaaaaccctcaggttgctataaaagtgctgctttattaaaattaccaaaatctcactatttctatctaaactgacatactacagtttctgtctaaatacattgctctgtattttattaattcgtatggcaataaatatgtgtcaggaacagttttaaaacttaatcctcagatactgcttccttaaatctatt

SEQ ID NO: 427679 - DNA, 364 bp, Homo Sapiens
gagtttgtcctctacccagccggagacatgaccgagctcaatagcggctccgagtactgcttcaattttcgcctacatgggcgcattagccgcaatgcgcctcagcactctgggaactgcctatagcacagctcagagtgacaccggtatatcggccatgtttgttatgcagtcggatgcagataatgaagaccatcataccactgatcatgattgtcatcatcgccatctacgtgcctgaaggatgcagtacttatggtcaaattcctgaaggacgacatgagcctatacatgagctttctccagctgagctcctgacagtacgtgtgcctgagcgtgctgcagtcggcttcgcatcgcatcg

SEQ ID NO: 427680 - DNA, 189 bp, Homo Sapiens
acattcaaggttttaacttacaaacagaaaccaaaggggccttttaaggggttagatttgggatacaaaacataccctggggagaatgcttcaccatttgaagctcacaccaaaatggcccaggggacaggtgggcactttgtttgggcttaaatccctggggggggcttgaggggaaggcggttttgc

SEQ ID NO: 427681 - DNA, 505 bp, Homo Sapiens
ataaattattgttgagcttatattggacactgaactaagtgtcagtttacaaaaatgaataaacaaaaatcactgccagtagggaacacacagccaagatgggggagtagtaagatgtaaagagatgtaaaataatgtgatagattcggccagagttactaaagagtcagaaaagggcaagcatgtttcttccctgtcctgaagcagccaagggagaggaagatatctgttgccaatgctggggtgttggtttaagcatgtagatgctgtgatgcgcagtggaaccgttcaatgagcagacaggagaaccagctttatgcggggagggagagaattgctcccctcatcccccgtgagtcacaccctggagattataagtttaaacattttgatttcgggagattttgagttttgggcttaaaatgactgaagaaccaccaggtggatctacgtgtctcgagtccagaagtctgaatacagatttacgatttatgagcacacagaa

SEQ ID NO: 427682 - DNA, 148 bp, Homo Sapiens
catgcacgagatcgcgcacatccagtcggcccatgccggaaaccagagcctccccaagttttgggaggtcatcatgaatgaacatggaacccaccatacacgcagttacttaggaaacagagacatgcagctgaagagaaccaccgtg

SEQ ID NO: 427683 - DNA, 353 bp, Homo Sapiens
tgggggaactcattttggcccttcccttcccttgtgtcccagggggggagggctttccggggaacctgggaaggaacctgttccaaaatgccttggaaaagctctggaagggttggcttttggccaatgaggggaattgcctttttggggccacgggggggaatgtaacaaacggttgtttggactttgtgggggatcctattcccaaggaagctgttgttttggttcgtgacgtaaagcatttgttaatggccctctttattggacttccaaccacggaggacaggacccacggggaggtatcggcggtggcgggggtcacagcaggcctcatgttcttgcatcaaaaacct

SEQ ID NO: 427684 - DNA, 659 bp, Homo Sapiens
  misc_feature (46)..(55): n is a, c, g, or t
  misc_feature (90)..(101): n is a, c, g, or t
tttggggggaatttggccccaccggggaaaaaagggaaaggagggnnnnnnnnnncccctaattggggccagggaacccaagaaaaaaannnnnnnnnnnnttctttttttaaccaagggaaaacccccttgggggactttaattcccaccctttatagaagggggaaaggggatgggccgggccccaaccattccgggggaaaaataaaaccggtaagggaaaacccatttgggagaagcccccagaagggaccaaataaccccttaaaaacctttgccgggaaaggggcatttccgggcctttggggttgttaaccccctgtttggcaagaaagggaaggaaaaagggaggggcctaatggttggcaattgttaatccccacaatttcgggtttgaggaaacccccaccacaaaggaacccatcacaaaagggggggttgcccggctccttgaggtggcccaaccacagagcctccaaaatgaaccggtggcttgacccacggaaaaaaagcgttggatttcacccatcctggaggcttcgggtacttccgggccctggggggttttgagttttgcaaaacaaaggccccaaaggcttaaaggccagacgacctgctcaatccctaagtatttgaaagacttgggttgtaaaaacaa

SEQ ID NO: 427685 - DNA, 360 bp, Homo Sapiens
aacggctaataacacaccttttattaaaaaggttttccataacatagcatcaacttttttaaagaacaattttaaccccgttaggcaacaaaacccagactaacaaaaggggtaacaggaaactaaggacctttttaaaataaaacattcaattttttacaaggtttttttacaaacggggaaaactcctgggtttacgggcccatcatttggaaggtaaggctgcaatagcatttttatccaattcccactttgaagaaacggaatctttaaaccagtatttccgagttcccaaatttaaaacatttcacataattttaaattatggggtatccacggaagtcggagtttcaaagggga

SEQ ID NO: 427686 - DNA, 180 bp, Homo Sapiens
ctagttgctccagcctctgggtcataatccaaccttctagcctgcgacctgcggagataaaaaactacttattgtcttgccccatacatactttgaggctagcaataaaatttaattctaaccatgaaggaaatcgggctcatccaacttggtcatggtcacatccagaatgttgccaag

SEQ ID NO: 427687 - DNA, 154 bp, Homo Sapiens
aactatatgtcccaatgcccagaacatgaacaaacctgtaacaatctgcttgcaagacaacatgagatatgtgcatgctcactaacgcatcagcgctgttatacatgagaatgatggtatcattcatatccgacatttatgaggagataaatat

SEQ ID NO: 427688 - DNA, 349 bp, Homo Sapiens
tattgtggctgccatagactccaagagattccatcatggggatgacggccgcctgcacaaccaacggcaccgctgcatgcagggacggcagcacacgatctaccaagaatggagactgctgctggccaaggcctacagacacactgagaaggtgctggacgacatcctggacatgttgcatgagctgcggaactccctactggaaggggaagggatagactgtgaggacattgaggctcctattgcgccgccgccgcatgggccagaccaaatgatctgaccgccatgggggatctgacgccacagggagaaacagggactgtgcgaggaggagaccgaagagacccat

SEQ ID NO: 427689 - DNA, 133 bp, Homo Sapiens
ctgccacatgatctgagggtcaggctatatagctgtgtgcctagcaatacagtcaatagagatagcagactacagcattgttattacctgaggtatgcataatatgagcaacgctcctcactcggctcacttg

SEQ ID NO: 427690 - DNA, 133 bp, Homo Sapiens
ggactgcctcattgagctgccatgagtgtcatttgcacccgaggcgtgcacctcatcacgaagttcctgtggtggattttaagtcggaactgatgtccgcatctcttagctgagacatcctagatgtgcttaa

SEQ ID NO: 427691 - DNA, 400 bp, Homo Sapiens
gagtgcttaggacactcttagagccagatgagctcaagggtctgctttgtcatttttagagaacctcatggttgtgaaagctcactcagctttgctcagaggtttatatcctcctcattacttcacagacacctaggactctgttttattacagggttgaataaatattagctttgcaattaaagataacagtgtccattacatgtcagacacgagggccaagcgttgcatatattacctaatttgtttttcattgcagaactattattctctttttaaaaatcaggaaaccgggctttgaaaggtaattttacccagcttacccagcaaatacagtgtagacctggacttccgactcaggtctcattggctctgaggcccctgggctcgccactgctct

SEQ ID NO: 427692 - DNA, 505 bp, Homo Sapiens
  misc_feature (486)..(486): n is a, c, g, or t
aagggggttagtattaaaaaacgaaagaatgtctctcttttacacatgtgtttgctagcacttcatgcggtcactactgtgtaaaaggccactggtcatataactgcagaatggagcactcaaccctaggatgttttaagcctactggtatgggacctgggcgcagaatgcaaagcctctaacaggagaggtgcgaacgtcaggtgagtcggggccattgtcatatgttcgagcctgtatgatttcaagcagggagacgatggggatatattgttgtgacactctacttgaactatggtgtaattagtcgacctgtgacttcagaagagaactacgttggtaacatgataaaagggtcctgcactctttggactggttgataatattatcaatcaaacgctgactgtcttagtgatgatatccgtcaccatttgcgagtacgaagagcactgagatatgcacagtgccgttgaggtgctgtgtgcnatacatggatgctaagcta

SEQ ID NO: 427693 - DNA, 304 bp, Homo Sapiens
cgaagaccatatgttcgataagttccgttgtcacgtcgaaaggatccgactgaaatgccagaaccgggttcctgtgatagttgataaggctgccactgataggataggtgacctccacgttgccaattgcctggtgactaatgatctaacagccggtaatgtctaattattgatacgcactggattcaatctttatgatgacgatgctttgttatactctgtttacaatgacaatacaccgaacagtgcctctatgacatagctgtaccacgaacacgatgatgaatatttgattatatacatt

SEQ ID NO: 427694 - DNA, 268 bp, Homo Sapiens
gaggggacgcagagccgaaccaataaccatcaacatccaaaagcacatgggcatgaacgtgtgccccgggcccatccggtcaatgcgccagatacctaactacttacccctgggaccagcacctgaagagggcggcggtggcggaagaaaggccctcatctatgtggcgcccctgtatatagaccactatgaagaactatttagaggtatcacgcctgattatgacgcggttgtggacagctatcattcgtatggtgcacaagcccta

SEQ ID NO: 427695 - DNA, 376 bp, Homo Sapiens
  misc_feature (46)..(73): n is a, c, g, or t
cttttaaaaattttatgggcccggggaaaaggaaggcaaaccctgnnnnnnnnnnnnnnnnnnnnnnnnnnnnactgtttcccggggccatggagggggaggttcacctccccaggggaggccagaaaggccttgagcttgggccgggccctaaggccccccaaaaatgctgaaacccgggggaacccacccaggcccccaggggctaggaccccatggatcaccagcaagtccaccaggttgtagacaccaaaggaaatctgggctcccacaaggaaggtcttgcccccctggttctgggacacaagggtctaaaaaggccttaattgcccggccaaggcctctccataaccatccttccccccctcaaaattgg

SEQ ID NO: 427696 - DNA, 160 bp, Homo Sapiens
cactgtggtctccagatcgatcgttgaggatgggctcgtcacacagtagctggctgtgctgctcgtcaacctaccatacgtagaagcggacgtctgtgccattgtgacgtcgcagacccacgtaatctgagaggacagcaccactgcttgtgacattgcc

SEQ ID NO: 427697 - DNA, 173 bp, Homo Sapiens
tagggtgaagaagggtgaggaatacctacacggacccttacggaaaccaaggtaaaccactcgggggcccaatggggaccaatcgggaaaacagggcctaacataccccttcatacccctttatattgaggacctttgaggaccagataacttttgcttcctttttctttatt

SEQ ID NO: 427698 - DNA, 432 bp, Homo Sapiens
cagcaaacacattttttgggggagaggaagggggcttttgattaacacttttagggaatctgaaacccctggggttatgggggctctgctttaggccttcttttgggtcttctcacaaaaattcttcttcttttgtgggggggcattgtggttcttgttgatactaaaacaagaggtttattattttgctctcactctgggagatctctatcttgtatatgctctcctctgtgtaccaggggaagagggtcttccgggggaatatgccagaaatcttctcctatatgctcttaaagatctgctgtatgtctgttctattccctgtgaatgtgactgatattttgaggccacgatgggagatgtcacacacgtgtgtcttgatattgttggggatccattacaacagagtagttgttgttttgttctgcacgt

SEQ ID NO: 427699 - DNA, 232 bp, Homo Sapiens
gtacgacaatctgaccgatgaacagattgccgtgcctagggccgttttcgtcctcctagattaagatggcaatggcagcatcccttcagaggaacttggacatgtcttgaggtcagtgcatcgcaacctaactgagactgaaacgctggacatcatcaataaagttcacgatatggacactggcaccaatgtcttacccgtacctttaagtatgacggatagagagatgaaa

SEQ ID NO: 427700 - DNA, 438 bp, Homo Sapiens
tttattggttgcacgcacagtcagttatttcatccagaaaatctgaaggccctacaaactaaccagaacagtaagggttgaaactgaaggccgattgtgaatactatccaccgggagcttcttatgaattgactcatgttcctcagataataaataacactaaaagacaccagttagcttctgacctcaaggagtgctactttcatctcctgcaggctttgaaaagggatctgatacctgacaacatcttgacaaaagcacatcccatcttctgatggaagctgaaccaaaattattgatgtcgctagtgattcagggtactctagattgtttggagtcctatataaatacatttaatagacaaaaaaattgctgccttaatctaagcagaaatgaccttagtagatagatactgcttaccccactgatgcattagag

SEQ ID NO: 427701 - DNA, 109 bp, Homo Sapiens
ggcagcctgcggaagcggcctgtgctgctacttctggtgcaggccgcgtgtcctgccctggtccggacgccgcacggagcggggcgcggtgggccggcctcgacaaagg

SEQ ID NO: 427702 - DNA, 166 bp, Homo Sapiens
tgagagacgcttggccacaaactgtactgctgacactctgagggagaagagacaagcctatgccgttgctattgtagctggcaacgactgacggggtttgccaatgaagaggggagactcgacctatggacacacacgtctggtactgagtaatgagaagtgctgc

SEQ ID NO: 427703 - DNA, 236 bp, Homo Sapiens
tgaaccaccctactcgacccattctggggctttaattcaggaatcatagaaaatctcagctttggtggggctgggtttcagtgtcttctgctgtctgtagcttcagggcctccatctttcaatcagaggttccttctctacttgctgtgtcactcgaccagatgacgggctctcgtctgacaccagccccaggctgccaggaagagcatattgcagattaaggagcttcatctgtt

SEQ ID NO: 427704 - DNA, 183 bp, Homo Sapiens
cacatctgtgctgcacccagtggggttaattcatatgatgactcggcggaccctccgcgttcacctggtaaatatctatgccttgcactgtcggaccgactcatggctgctggtcagtctctctctggatggtatgtttattatctgtgatagctatctcctacctactaggtacacgccatc

SEQ ID NO: 427705 - DNA, 185 bp, Homo Sapiens
aaccttgctgcgggggcgtttgtacatcgctgttcctgtctatggggctcattcgcaacctctccagcctgcgacctgtggagaaaaattactacttacttcatagccccatacataccttgatgcctgcaaaaaaatgaaatctcatccatgaggaaaatcgcgcacatcctggctgctcaatg

SEQ ID NO: 427706 - DNA, 383 bp, Homo Sapiens
  misc_feature (241)..(318): n is a, c, g, or t
actataacagcaagactggtaagcagaggctatatcttgaaaataagattagcacaaatatttgcacaataaatgaatttttcacagaaattctacaacataatcctcagggtgtatctcatcactgctacattcagcccttcctatctgtggattctgcatctacagattctcccaatcacagatggaaaatacaatattggagagatgcagaatctgtaaatacaggaggccaactgtnnnnnnnnnnnnnnnnnnnnnnnnnnnnnnnnnnnnnnnnnnnnnnnnnnnnnnnnnnnnnnnnnnnnnnnnnnnnnntagttgtaatccttccaactgctagggcaaaggagtgaaaacattaattatcaccaagttctcac

SEQ ID NO: 427707 - DNA, 168 bp, Homo Sapiens
caaaaactcaaacttacgtggaaaagcagcatggctatgtttatcaggctaactgcgtttatcccgtgattcctgttatgtaccacgcagtcgagcccaatgcagaacattgatcccctacagtgttttaaaacaaaaactgagaccaactttataccatcaagtgga

SEQ ID NO: 427708 - DNA, 136 bp, Homo Sapiens
ccgctgcactgctctatccatagccatccttgtcaaatactcggaatgcctcacggacttcttcttcactatctggttattgcatctctctagccttcataggcaaaaatcccaggaagttcatgctgcccttacc

SEQ ID NO: 427709 - DNA, 138 bp, Homo Sapiens
gggggcctggggaccagcgctgccggaaactctggctaagtggataggtgttgccatctatggccccttcattgacctcaactccgtggtattcatgttctcatccgaggcacacccatggcaacatttcattgcacc

SEQ ID NO: 427710 - DNA, 155 bp, Homo Sapiens
tgcccggcccttatttaaaaaaggggatcttagggaaacccagggatcaggcaggatacggatgggcccagacatgacgctgggggatcccaagggtgggggggaaaggcttccagaagaaaaattaagcttgtcggggaaggaaaaacaaagcc

SEQ ID NO: 427711 - DNA, 495 bp, Homo Sapiens
actgtatttgtacacagtcttctaagccatgaccgatctgcccgtgtttcacttaagagagaattaaggaaaatcatccagaattcccactccaaaagcccaagctctgcagccctgcagtgtggttttgctccatctggagagaacctcacacagactcccctgccaaaatgatgtaacatgatgactcagggatgtgagcgtgagaggaaccaacatttagttcttatacccacatatgctgtgtgttgtgtgattaggtttatttaatgaacttaatgcaagctgagaggcttgacaaaacgtccccttttgtggactgaagtagctatctttcagagaaagcatgcagatttagttggtgttaggttgtttatgttgaataaaaatctatttaaagacctggctgaagtgcattcagcctttcactgtctgcacttacaataaaaaagaaagattgtattatgcatgacagagatccagattcttagagat

SEQ ID NO: 427712 - DNA, 141 bp, Homo Sapiens
caatagttgccattggttttgaaccaaccagatgccaggccaggcactgtgctaaacatgctacttgaatgatcccatttcatccttccaactacccaaagggctcattgtgaccattataaatctccattttttggctgg

SEQ ID NO: 427713 - DNA, 238 bp, Homo Sapiens
cctccccacccaaaaaccgtgttacatcattcactaacccaacaaccaaaagagcttccacacgaaaggcatagcattatccacggcttggacatgaatttcaagaaagccccaaatcccctgccaagaggaattcacatataagaagccccttaccaagcccattcgtacccacaaaacacaccacgtggagaccccacatgactgccgactgattacaaatccacacgagggcttt

SEQ ID NO: 427714 - DNA, 112 bp, Homo Sapiens
ctcatattacaacatacagaaagagtccaacctgaaccgggggccgagcctgcgaggtggattaatggtgactgctatctaacagcttgactagaactacaaacgcgacaag

SEQ ID NO: 427715 - DNA, 190 bp, Homo Sapiens
gcataaggcaaaacccatcatgaagggcatggggagggggggcaatgctaactgcccgcaaacaataactcaactgcttttccctcaacttttccatcagcggggtaaccccctccccaaacctttccaaatattcttctctaatccctgccggggggtccccaagcctatgcatcatatcccatttata

SEQ ID NO: 427716 - DNA, 293 bp, Homo Sapiens
agaggcagcaaccacaatttttgggggaaaggaagggggcattaaagtaaaacggctaggggaactgaaaaccctaaggtgatgggggctttgccttaggcctcttttggggcctcttaaccgaatacctcctcctcttttgggggggcttctgggtgcgggggatacccaaaaacaaggtgtttcatgtggctcaaaccctagggagaactccttttggcccatgccctcgcctgtgtacctatggagaaaggctttccggcggaacatgggatgaaactgctccaaaatgc

SEQ ID NO: 427717 - DNA, 196 bp, Homo Sapiens
  misc_feature (98)..(153): n is a, c, g, or t
cctttggccaccaaaacccaacaaccctgggtttggcccttttacaaaaaccccccacctatttcttgggggaaaagggggggaccaaattaggggcnnnnnnnnnnnnnnnnnnnnnnnnnnnnnnnnnnnnnnnnnnnnnnnnnnnnnnnntttttggtgccaacaagaaccccctctcccacccaatcccccg

SEQ ID NO: 427718 - DNA, 439 bp, Homo Sapiens
tttttttcatttcctgtccattttttcaccaactacagtccagcttctgcagacacatctccagagtcgcatttttctcaaggccatcaataacttgttggtcaccaaaagaaaaagttctcacttctcatctttctactcagcctcacagcagtattgacacgactgatgcttcctactgagagttttgcccctctgggctcctatgacctcaaatccaaaaatgacagtaagtaatctaaagaaccaatgaaaccagttttgtcacataaaacaatacagatgactttataaatgaaccataaaaatattccctcggagaaaacagacaaatattttttagattcatcttcaaattctccacatttaatatagtaagtaaacctcaaatctctccttgattctatctctgcatcacagtcacttttgcgtttctttg

SEQ ID NO: 427719 - DNA, 419 bp, Homo Sapiens
tttttttctcattcaacattaatttattgtaaaaatgttgtacagaatataccacaattaagatacacaattcaatcatttatcctttcacttaatgaatattagtgatcattgctcccaccccctagtcacaaaactttataaagcagttttagataatcagtacagtcagctgcaagtagtggaaaaccaaattaacatggcctagccgaaaataaattttttgtgtatcaagaagtctgaggatggacaattcgagacaggcagaagaagggtgaagagatcatgagtccatcactttttaaaagtgtttttaggagtcccagttagcaacttcagcttgcatctcattagtcagaatccatcatatggccactcctggctgcaaggagagcttattgctgtccatggaatgaaga

SEQ ID NO: 427720 - DNA, 221 bp, Homo Sapiens
gcctttcttcttattctttcttccctttcactaatttatcccgatgttagcacattctgtctcgttactagcggacgcctgtaggtttgctacatgggatcattactgatcacggtgactctgaagtctggaactgaaggcggaatgagaagttgggaaaacttttttctctaaactctctgttttttaaaaaactattattctcgatgcttgttaagagg

SEQ ID NO: 427721 - DNA, 145 bp, Homo Sapiens
gagggacacgcgcttctcggcgaccgtgaggttaaagtccactacaccaactaagttatttgtgtgagtgctgcaggaccagcaggactgtgacgactctcatgccgtggatatgccgcacatgacaataagggctctgaacaaa

SEQ ID NO: 427722 - DNA, 115 bp, Homo Sapiens
ccgaggaccaataggaacaagaggagtacgaatacgaggacctggacgaatacctgctggaactgcaggtgctcaagaggaagaccgccagacggctgtgctggtctgcagggca

SEQ ID NO: 427723 - DNA, 277 bp, Homo Sapiens
gcccgtacttctggagcggcccaagcttttcaacgccattggcaaggtgcttcaccggcacattattatggaacgggaacgccagccgcaagaagaagaagaagtggattagaagattgaacagaagattaaaggagaacatgagagaacgaagaaaaaggacattggagagagaatgttcttagaggagacccaggaaccaattcttaagtttgcagagaagccttttggcttttccggaagaaatagcaccgctttttctggacttcagaaggtt

SEQ ID NO: 427724 - DNA, 444 bp, Homo Sapiens
gaagttacaataaacttctgcttgttttctcagaacatctttggcatgaggaagaactttttgtgaatgatacagtagtctcagcatctgttaatttgtggttttcaaagcatttttgacagagtttacctaatgtaaaaagattaaacagttttataaaacacaaataaacattcctacctgaactgtgaggaacagagtgtatagtacaaatgtaattaggcattgcctcctggcgaggttcttgatgcatgacttcgatgctggctgctgactgaggtgaccactgtcagtattgtactttggcatatgttgtttttaggaaaataatggaatgcattcttagattaacttactgtttttgagttggaaaaaataaaagatgaggtattataagtatgccaaatatttatacactacaaaagattaaaaaaggagagggag

SEQ ID NO: 427725 - DNA, 356 bp, Homo Sapiens
  misc_feature (94)..(195): n is a, c, g, or t
ttgggctcaagcatccctctcattcagcctctcaggtagctggcaccataggctcatgccagcaagcctggctaatgtttttaaaatatatacnnnnnnnnnnnnnnnnnnnnnnnnnnnnnnnnnnnnnnnnnnnnnnnnnnnnnnnnnnnnnnnnnnnnnnnnnnnnnnnnnnnnnnnnnnnnnnnnnnnnnntgcatgagctaccgctcccagctggtactctttcttattattagtctgtgattattctatttgtaagaaaagatcattgaccaccagtgcagaattatggtaaacttaatcttgtttgtttttgaataatgtcagaggctgttattttgcagagtatgatg

SEQ ID NO: 427726 - DNA, 307 bp, Homo Sapiens
ggcccttgcgacagttctgtccccttcgtgtcaatgactcttcattagtcatggtgatctctctatgcctcaatgcaacctactcattgaccacatcttcttcatcagctcctttaacttttttatgtttattcttagtgggtaaccctgccctctttgccaactctttagtgactactcaattggtcaatctgacttctataaccaaaaaggcatcttttacatcctattgttgcttgtcttccttgtaggcctcatgatctctgatgatataatgaagatatctatcatattccaaggcaacatc

SEQ ID NO: 427727 - DNA, 405 bp, Homo Sapiens
  misc_feature (81)..(158): n is a, c, g, or t
  misc_feature (160)..(231): n is a, c, g, or t
aaaaaggggccaacctttattaagggggaaaggggaacaaaaaacacacattaaaccctatttcccggcccccccatgccnnnnnnnnnnnnnnnnnnnnnnnnnnnnnnnnnnnnnnnnnnnnnnnnnnnnnnnnnnnnnnnnnnnnnnnnnnnnnntnnnnnnnnnnnnnnnnnnnnnnnnnnnnnnnnnnnnnnnnnnnnnnnnnnnnnnnnnnnnnnnnnnnnnnnntttttaggaccccttgaaggaacccgggggcccgcataacgttaaaaacatcccccccctgggggggctcggatgggcccatagctgaccgggcataaatgtttgctgattcccccgggccaaactttgctcccggaggggacatttggaggggaaaagcaattgggttttccc

SEQ ID NO: 427728 - DNA, 347 bp, Homo Sapiens
caaaaaacatggccccccaggctccaacttaacggtttttggagggcaacccggggcccacaaaacccaaaaacttgtccagggaggcgtgccccccaggggtaaacccggcggggaggggggcggccagggtcaccaacaggcaagggcttaagaacttaaaattgaccgggtccccccaaaacttgggcccctgcaggtcgctcaaggcggacaacgcgttgggcatgtcttccacttcccccacggcgttgtgaaacgcgtcggccacctttttgccggggcccttaacctgggcaaaaccggggctcaggtcaaaaaccggaaaataagtcttgggggtgggg

SEQ ID NO: 427729 - DNA, 208 bp, Homo Sapiens
tagtgactggcttgagcctctgaagatgatgcggctaaccaccctttggtgatgctgagggagcggacccctttctctctgctgtcggtttcacaatgctcacttattcctgcaagggctctttaaggcccaccataccattggggtccgatggcatcatgatcacttcctatatgcccccatcaccctgtgttatcaacacctgccg

SEQ ID NO: 427730 - DNA, 174 bp, Homo Sapiens
tggtacatgacaaggagccgtttcctaggcccctcccctgttcacggggtctacttggcaacagctaggaggggagattcacgaggtgggggactaactgcggaaaggacacccgagcaagacggtctctttctacacgtcgggcgctagctggggctgggggtccaaaggggt

SEQ ID NO: 427731 - DNA, 148 bp, Homo Sapiens
tttttttggatagatttttagggcagagagtaaaaacctactgaaagaagtaatgaagactaaaatattgtaatgatctgtgggacagattcaggtgctcacttgagaagactgctaaatcaacttccccagagtagttctcaataca

SEQ ID NO: 427732 - DNA, 210 bp, Homo Sapiens
  misc_feature (59)..(72): n is a, c, g, or t
gggggcccccctaccgccccccaggggcccgggaccctgggcaaaaaaggggagggccnnnnnnnnnnnnnnggaaaggggggccccgccccccaaaaacctacaaattaccgggggaaaaccaactaaggcccccttaaacaatcagtccaattagcgaatcccccaattttgcccccaactggttgaaacccgggaaaaacaaaaaca

SEQ ID NO: 427733 - DNA, 355 bp, Homo Sapiens
  misc_feature (61)..(90): n is a, c, g, or t
  misc_feature (253)..(262): n is a, c, g, or t
ccttgggggggcgggcccccttccctttaacccacccaagcttttggccgcccaaaaaggnnnnnnnnnnnnnnnnnnnnnnnnnnnnnnggggggggcgggccttgttcttgccgataaatgttttaaacccgctaacccgggccccaaccttcttgttgaggggggcccccccaaaaaagggggagagcttcccctgccccgatccccctttaatgaccaccaacacacctttgccggggggtgccggctnnnnnnnnnnaattttgcgggaaattaacccctttaaccgaaaggaaatgcggcccttcaaataattgggcccaaggcctaaggcctcctctttccccttgac

SEQ ID NO: 427734 - DNA, 130 bp, Homo Sapiens
ccaggacatggccaccccagggccggtggactggatctaatctgtcgatgtagtgggggctgagagctgccaccaacgtagccaaatcgccgttgtcttgctggtaccccagcgtgaaggcaacggtaga

SEQ ID NO: 427735 - DNA, 216 bp, Homo Sapiens
ggggccaatgcccggtaaacaaactatggcaactaatacacgtggcatgttcaataccaactcttgggggcggtgcgcccatgcataagtgtcaagctgttctctttgaaatgaggaggggtggttctcacatatatatctggggctggtgggcccgaagaggtgttatctctgtgcaaagacgagggcgacaatcataccctccacgccgagcac

SEQ ID NO: 427736 - DNA, 514 bp, Homo Sapiens
  misc_feature (426)..(434): n is a, c, g, or t
gcattttagactcccacattaacttgtatagcagagaaataaaatcttaaactgtatgctaatagttatccaaaatttatgttaaatgactttggtttatggatagaactttaacattaaatgacgctgaaaatactcaggccccatattggccttattctatcaacagactttaatatttttctcagaaattagatgagggcattatattccaaataaaattctcaaataatacagtaaatagaattttctaaaaaataccatttatgacttctctctctatatataacatctcaagcactagaattaacaaatgcagaattaatgtacatttgtcacctgacaaaatcttatgtaatctgtttattctccagaataatcaccacaagtgccattttgcaggttttaatatttgttaaaaggcannnnnnnnnaaaaagtttgtatcatctcttccaacaatctgtcattactttaagaatataccactttcctttttcctttcttactagat

SEQ ID NO: 427737 - DNA, 441 bp, Homo Sapiens
  misc_feature (257)..(347): n is a, c, g, or t
aggttttattggggtttttttcttccggggttaaaagaggcaaacggcccccggaaacaaaaaaacccagcggcttaacaaaaggtaaaaacccgcaacccgaacgggggggctcccccagacccaccaggggctggggcgggacgaaactcccccgggccccagggggaaggaccttccaccccccggccccaaaacaatccgtgaaggggttgcgaaaaaaataaggcccccaaaccaggaccagggggtaaggnnnnnnnnnnnnnnnnnnnnnnnnnnnnnnnnnnnnnnnnnnnnnnnnnnnnnnnnnnnnnnnnnnnnnnnnnnnnnnnnnnnnnnnnnnnttgaaccggtccccgatgcgggggccaaaaaacccggtgaacaacccgggggagttgacccctgaggattaccctggccacctcacccgcctac

SEQ ID NO: 427738 - DNA, 259 bp, Homo Sapiens
aaccattcattttcacctgagacaactggatgtagcggaacacattggtgtttgggggttcccgggtgggggcctcctgaaggtaacgcaacccccgtgcctattcccccaggtgggaaaaggcaatgccggcacggtagggggccttaaaattgccctgctgtttttccaataccttgaaaaaataatcgcccccccgctcgtattttaccaagtccaactgcagcagggaagcctggggggaatgataacactccac

SEQ ID NO: 427739 - DNA, 128 bp, Homo Sapiens
aaaaacaaaactgatttttttcccataatcgggggggaaaaaaatacaacttgtttttgaaccaaaaccccaattttggcggttaaaaaggtttcactgctaaatgggccccgggaaaaattatgggg

SEQ ID NO: 427740 - DNA, 233 bp, Homo Sapiens
tgtgcctggccacatcttaggctttgtggaccacatggtctctgttgcaactactcaactctgccactgcagcacaaaagcagccatagatgtaaaaagaaaataacatttcaggaccttctaaatgcattatgccaagggaaaaagtgctggaaacagtcatgtaacacagctgcttttcttctctggcgcatggccactgcttcctgacctttgtgttgagatgttacacg

SEQ ID NO: 427741 - DNA, 361 bp, Homo Sapiens
ttttttttagtaatgaatggctcattaagtatttatttgtttaatcactgatgcaagtactaaaagtcccacatttaacaaccaatctgaccagaattgcagcagcaacctaaaaactggaaggaattatcagagggaatatgaccaactgtaaatatcagatctaagagtcattaccgtagctgcagtgtggtctacaaagaagtaacagaagacaacttttgataacaactggtctaatgacctttaacaaatcacttagcctcactacaactcatcttcccatctgttaatgcaaggggcagacatgacatgaggaaggcagaggcaacaggatacgaatgttttgataatactgagg

SEQ ID NO: 427742 - DNA, 100 bp, Homo Sapiens
gaaccccgacatttgggaacccaaccccaaagggaccggcgggggggctaatacccatacgggaggggaaaaccctcccaaacccttttggggggtcccc

SEQ ID NO: 427743 - DNA, 528 bp, Homo Sapiens
gaaaaaataatgctttgtcatggtgacagttttatctttgatatctttaaatagggggaatgaatggaaatttgctttctcagctgttcaactacactgtgtttttaatagacactttctttcagtaggatgctatgtatttaagcatgcagaattcttcctgggtatttctgaatcctgttgtgtacatgtgggttgaaaattcaaatatctcatcttctttagtacttagttgctcactttattgttagagaaactggtggctaggtatcctttctctattttctgccataaaaccttttagaatttaaatttcttctcaccatacatctggtattgactttggaagcactggccatagaaaaaatgttcttactcaaaccatctaattaagaaataattgactcatgcctactccctaagtttgaggccaatgtggtgctgtaattttttccccataacactaaaattctactgcaagtatcttccttaaaatcctacccatattcaaggaaacaaccatgaaaa

SEQ ID NO: 427744 - DNA, 290 bp, Homo Sapiens
attgtatccagcaagaaagagaaaagaatttaaacttctaaagatgaaactgctacacgtggacagccataacaacaaagagaagagtactcttaagcatttgtgaaagtcagaaacctataaacttttgggaaacaaaataagtatattttccctttaatcttacaagtgatgcaatacacttctagcaaaagtgaaagggcaaataggaattttgcaacattgagctctctttaagcagaagccaggccataggttcttcactagtcaccagggtctacagcctttat

SEQ ID NO: 427745 - DNA, 395 bp, Homo Sapiens
acaagggggggcatttaccacaaaaaaaccttcaacaaaacccccaaaaattttaaacacccaccccttggaaggacaaacttaaacaggaaggggttttaccccttgggggaaacgaaaccggcgaaactgtttttgtaggaccccccccaaccccgggcactggaaccaccactttgaccccgggtggtataaaaatctttggaaccccccgaccccccactcctggaataaaaccgggtccccccaaaacctggggcccctcctcctttaaaaaacccacggccccttccttggcccccaaggaaaaaaccccggcccccgggaaaaccaccacggggcccacgggaacggttgtgtgacaacttgcctgcgctggtaacttggaactgccg

SEQ ID NO: 427746 - DNA, 106 bp, Homo Sapiens
caaaattaacacaaagctaataagctgaatacacaatgcaaagcatcctaaatcttgggcaataacaaaatctaagatcctaagatcatgatatttaaggtaggaa

SEQ ID NO: 427747 - DNA, 463 bp, Homo Sapiens
ttttttgcatctctgggaaaatttgttatatgggcatataatgtgttagagaaataagaccacaaaaatggttcacaccataaattaaaactaaagtgcatttacgcagagtaaagctaactgtaacaactgaagacgaaatatcaaggaagactttctggtgcacagaaaatattgcagccaaaataaattattgaggttggctcgtatggtatgggatagaggatctttatttgatctcaagtgattttgcatatttccttactaaccacaaatggttctacaaagaaccaggtcaattaactcagtattgaaaaatcagctggcttccaggacaatgtgctacatgatgagtaacagcacctggcagctgggttctaacccataacactaaatactaacccaggattactaaattcaacctggtccacaggtaaaatttttaaagactatgaataagtgt

SEQ ID NO: 427748 - DNA, 123 bp, Homo Sapiens
ccccaacgggggccccaaactttgggcgggcctaaatccccctaaaagcacaggccccaccaaagttaccaagtttatgggatccatacttgggcaggggagggaaacctgcccggagggctc

SEQ ID NO: 427749 - DNA, 466 bp, Homo Sapiens
tttttttgttttataattaggatgcaattttggatattttcttaaagagagaaaagaacccataaaaagttgaaacgtaataaataacaagacatggatctggtacatggtttggatacagaaagcattttcactctaaatatgaactttatacagtgttctatcatggaagaggttaacaatctaagatgcaatggtgtcagagaaaaatgacgaagttatgttttcatgtccttttggcttaatagggactgcaaccattctatctgtttggtttgtcccataagccaaacaatgacttagttttaagagttccagatcttcccctttctaactgctagttcctttggttgttcctttagttattagttcctttgcttgttctctgtcttttgacttttttaaaaactacttcacaatggtcttactatgtggtcctttgcacctacacatggtgccatgccca

SEQ ID NO: 427750 - DNA, 482 bp, Homo Sapiens
  misc_feature (337)..(353): n is a, c, g, or t
caaatcattggtgttttgtggatctaattctgtagtttatgtgttttgctgtcactgttaccaggaatggcttgtttactgagcccatgttccttggatttttatctctgaaaaatctttagacctagatttaaagttcattcctcaagagagaatttgtatttgcatttttcagactgctgatactactaccaaactcagatcaccttaaaatttcagcttgattatctgggagtggggagggaacgctacataggtattgtggtttctagccctaaatcaggtagaatgcaaccattttattaggaatagacaggggacacatttgggggttcannnnnnnnnnnnnnnnnacccggagctaagactgagataggcaaatatactgacagttttgctctgtggagcacagtttctttctagttcacctattgagtatgttgtctttgcaagttcttggctttatgcaaaggccttggatt

SEQ ID NO: 427751 - DNA, 217 bp, Homo Sapiens
ttcggaggagaaggtgtttggacggcgtcgtaccacggaagtgattgtcacggtgctgactggcttcgggaacagcatgaatcccaagaaaccactgacactcttcttacacggctgggctggctcatgcgtgagtattgacggtcagagtgtggctgataatcttcccccataaggtctcatgacgtactatggtcagctgtatgaatcgactatt

SEQ ID NO: 427752 - DNA, 436 bp, Homo Sapiens
  misc_feature (51)..(60): n is a, c, g, or t
  misc_feature (85)..(177): n is a, c, g, or t
  misc_feature (200)..(213): n is a, c, g, or t
  misc_feature (215)..(307): n is a, c, g, or t
  misc_feature (381)..(381): n is a, c, g, or t
  misc_feature (393)..(393): n is a, c, g, or t
  misc_feature (407)..(407): n is a, c, g, or t
ccccctgggaagcttggacaagccccaaatgcctcagggacctttctgtannnnnnnnnngagacaggctcttactctgtcgccnnnnnnnnnnnnnnnnnnnnnnnnnnnnnnnnnnnnnnnnnnnnnnnnnnnnnnnnnnnnnnnnnnnnnnnnnnnnnnnnnnnnnnnnnnnnnatgcgtcaccatgcccaactaannnnnnnnnnnnnngnnnnnnnnnnnnnnnnnnnnnnnnnnnnnnnnnnnnnnnnnnnnnnnnnnnnnnnnnnnnnnnnnnnnnnnnnnnnnnnnnnnnnnnnnnnnnataaatatgagccaccatggccagctgatttttttgtttgtttgtttgagatggagtctcactctgtcactcangctagaatgcangggcatgacctcanctcactttaacctctgcccacctccccca

SEQ ID NO: 427753 - DNA, 148 bp, Homo Sapiens
ggtggacctcttcaattggtccgggcccttgagcctgcaataagtgtacgagcagccgcaatacccgctgcatgtattcttctcctgggcggcagtggacaagctggtcaaagtgctgatgcccacccaggttaagaatacacccaca

SEQ ID NO: 427754 - DNA, 250 bp, Homo Sapiens
actgctcatctcaggtggactgatcataaacgataaccaattgctttactcttacctgtacctggaggagggacttattatgcaaatatgagagaacttaatgcgccatggttgagagaaaaccatttgaatctaccctcggatggatattccctgctgtcttgatgtcagcacatacctccaaactctctctcacgggatgactgctgctgatggcattttactggggaccaacgcggctctggaaggg

SEQ ID NO: 427755 - DNA, 439 bp, Homo Sapiens
cgaaaccgactgggacgcggctacggtgctgcgcaagaagggccctacagtcgcccatgccaaattcatgcaggctattttatctgctcacacacgaggagaagatggggagactttcatgaaatgggctggtggccagaacaatcaaccattttgtaacctaaacactgccatgctggaccgggagacagaggacctgacccataactgggtgaccgtggatgtgggcaaggtgatacagcatggtcggcatagcatgggtcttactcagaacgacctggacacgaaaatcaatgataagccacaagtgatcacagactatgagagcggactggccatacccaataaccatgatgcttggcagatcgagcgggacattggccttaagctcgtgtgaaaggacattggacatgtgatctagaatgcggctaggactaaa

SEQ ID NO: 427756 - DNA, 422 bp, Homo Sapiens
  misc_feature (305)..(306): n is a, c, g, or t
  misc_feature (314)..(315): n is a, c, g, or t
  misc_feature (365)..(365): n is a, c, g, or t
  misc_feature (393)..(393): n is a, c, g, or t
  misc_feature (406)..(406): n is a, c, g, or t
ccccccgcctcgtctttattattcagagcggggcctgaggaatgaatggcgtggacaatatcacgacctgacgctgttgcctatccaataatgcagcccgtaccatttctttcaaacaacaagaaagagggggtccttgcgtgggaagaaactgtggcaagggagaaagcttcccgcggtacttatcaagaaacatcggtcttggtgtcttcaagaacacccaagggaggggctattgaggggcaccttacatttggacaagaaaatgggccccttcacttgggtaatgttgtccattcgagggnncggatccnntctctggcgtggtaggaccaagaatgaagaatgcagaggactcattgtcnatccgccgagacttatctgcactacatnccgcaagtacaanccgcttcgagaagcgc

SEQ ID NO: 427757 - DNA, 458 bp, Homo Sapiens
  misc_feature (81)..(116): n is a, c, g, or t
gaatcgtaaaacgaaggctatacatttcctcatcccccgaagaatattcagtgtttcttgctgacttttatgtccctgtcnnnnnnnnnnnnnnnnnnnnnnnnnnnnnnnnnnnngagtctgtcttctatgaaaggtggtttcttctaagtgaaagtacttaataataagagagtgctcagtttgcagtcaagactgcaaggtgactagacactgacattctgttgtgagagttgagctccatgactaaacagctcctctttctctagaccaaataaaagtcttatcatctcatgtatgtatctttaatcggacaccaatcatacatggaacattagggagaataggtaaagttatctttggtttgccagaagtgtttcacactcaaaggctcaatactttcacctgtgaatcattttgtgtgtgtatgtgagaggtaggaataatcaggtgacatc

SEQ ID NO: 427758 - DNA, 153 bp, Homo Sapiens
gccatcttggctcctcaagaaaattttaataatcttttcatcctgtcctctctccagcctctcctctactaccaaggtaccttttattaacatcttcttatgcatcttttcacacatttccccatactcatatgtacttatacaaacataaat

SEQ ID NO: 427759 - DNA, 148 bp, Homo Sapiens
gaggggccgcaggggcgatcgcttgaccatcaacattcaggagcccatggccatcaacctggtgccccgggcccattcagtgccatccggctaaatctttgactacttgccacggggaccaggacctgtagggggcggtgggggcggt

SEQ ID NO: 427760 - DNA, 142 bp, Homo Sapiens
ccatgatccgcaagacatgcagtctcaccgggactctcctgtctttgaaggcggtggtgataaaacaaacaaaggtgagcgccgtctttactcttatcgagaatgcgaacagtgagtccgaccgcgatctgaccgtgttcat

SEQ ID NO: 427761 - DNA, 501 bp, Homo Sapiens
gtctttaacggtatttctgacacaaacacaataagcctcttgggactgaggcttgtcattttcttaatataaactgagggtattacacaaagccagttcattaaatacaatttgatgaaggtccaagaaatgcactctgaggatgcacaggaccttgtggaggtccagcttaacccaagggtagaatttagatattgagaagtataaaagaattgtcttcttatgattcagcttttgattaaaacagggcactggatagtttgagattagattgtctaacagcacgcggagtgtccttagggaagatccgtacagttaatgtgacagtgtgacagtcgagctaagttgataggttcttaaaatcatagaaagcacctaacaagggctcctacctaatgtggcagccccaccaccatagcaagaaagtctacgctagtcttcattttaagaaatcactattatatgttcactgatgcccccctcccctctcaaatatagcac

SEQ ID NO: 427762 - DNA, 259 bp, Homo Sapiens
gcaggccactgccaattccaccaaaatggactgtgtgtggagcaactggaaaaggcacgctcttgacctgttgtctcggcggtacatgcagcaaacgggcatcgcggttgggagtttgatgatgctgttcttatacgtgacgaagttcagggtggtgagcgtcttggcctacctggccctggccgcgctgtcaggcaccatgagatagggcatgtacgtatctgtattacaatgcagtgcgagagagcaaggaaggcca

SEQ ID NO: 427763 - DNA, 498 bp, Homo Sapiens
ttctaaaactgtatacatgcttggtaaatacagagttagaattaggaagagtgttgttaaaaatcattccctattctacttattctcatcaaaatggagtttcttagacactgctattccttcacatattctgatctctcttttgttgagcatcttgcgtgaaggtagactagagttttctcagtctagaattggttacctgttaaatatctaatggttctgtattctttcttacacactagctttagttctgtaggctggttcctggttcacagtcgttttagacactttgtcagactaagttgcttttggctcagtttgtatcacagcaagcttaacaaatgttaacatgataagtcctagttcgctttttttgtagaaaaggtaaggctaatggtattgttactaattctggaaatgcctcctctgcttcccccaactggcagtgatccttatttcttcctaagctttgggcagattcaggtgatccttgggcag

SEQ ID NO: 427764 - DNA, 400 bp, Homo Sapiens
ctggagacttcatcagcctctgaaggaatgatacctgaaattgatcttgtaatgcagaaagtggctatatgttatccagaagagtaacagataccccaaatacacttgctaacacaagaaatcctgtgaaggtgcttagacatacccttccatagattttagatgggttatctgcctatgttccagacacaagccgatatgttgtggtttgcccagtacagtctctgtggtttactgagaggaagtggttcttgtgggtgaaggtctgatcttttcagagattgttggtggcatatgcactgtcagcctatttcctgttttattggctgtttagcaagaccttcttagggcaagtgctgctgaagaggtatttaaatattttgtattggcaggatagatg

SEQ ID NO: 427765 - DNA, 481 bp, Homo Sapiens
  misc_feature (441)..(441): n is a, c, g, or t
cctgatcccccagggtgtcatctgaatagatgaacggatcaccttcatctgggacaaagcggtagcttcatgccaaataggtgacaagccaattttctatgtcaccaccaccaatacggccaagatttttagcctctgcccaaggaagaggcggattgcacatagctcctatgccgacggggtcattctgggacccctacgagatgagtaccataacatccaaaagtccaaatcggcagtggagtgcagcatcttcgaaggtatggagtgccaccgctactcactaatggtcatctgccaaggcacgatcaggttttaagacgaaggcattaacgtcaacaatggcatgggccacttcataccgcagaaggcgttcccggagcacctgtagcagcacatcgaaatcaggaatggtgttcatggattacaagggtgttccanaggcatgtatgacggtcctgtgtactaggtgcgcactacg

SEQ ID NO: 427766 - DNA, 467 bp, Homo Sapiens
  misc_feature (229)..(229): n is a, c, g, or t
  misc_feature (280)..(280): n is a, c, g, or t
  misc_feature (329)..(329): n is a, c, g, or t
  misc_feature (343)..(343): n is a, c, g, or t
tgtaatacaaggcccttgggggagtctttgcattccattaaattatccattgagatgaatgtgtgtcatgtgacttgttagaccacataacctgtccagggaaatgggaatgtcttggccatcctagagtcctaggtctccacgtgaagtcaccacttaatcagtgtctgtcctgtggttatcaactgcgtgtgtggcgtggccttgctgcctgcatggggaggtccanaatgtggttcctgaggctgggaggcgagggcaggaagtctttggggcacanaggtccttgtgtggttttcgtgggaaggggtcagccattgaggcagtantggaggaagctganagggcagaggaagggatgggacgcggtatttggggtcttttaaatctgatgtaaagcaaatctgcgccgggaaaattctcaccaccattttaaacaactcattgatggagctcagtctcagatt

SEQ ID NO: 427767 - DNA, 370 bp, Homo Sapiens
  misc_feature (205)..(213): n is a, c, g, or t
  misc_feature (286)..(295): n is a, c, g, or t
  misc_feature (341)..(341): n is a, c, g, or t
ctcacccccctgggctttattgaaaaagcccccctaaggccttgaccccgtacttccccaggggggacaccccctccttcccctggtgttttttggtcttaaggttctcctcgggcttgtggaaccgggggggcatggaacgtgtttttttaggcccaagggccaggggcttgtactttttgcccttgaaaaaattcccgagggnnnnnnnnnaaattgggttaaaaactggaaaaacccgggcaagggatttccggacaaatcggattttaaaaaacttggaggnnnnnnnnnntgtcattttgggaaaccccaattgggaaaactccccctttaggggngccaaatgtttaaaaaactcctccttttt

SEQ ID NO: 427768 - DNA, 316 bp, Homo Sapiens
  misc_feature (251)..(262): n is a, c, g, or t
tcttgggggggcgggcccccttccttttccccaaaacaagcttttggttccccaaaaaggcccccgccccgcggattgcttccatcccccacttggggccgacctttttattccggaacatttttttaattctctttaacgtgggcccaacattcttttttatgggggcccccacaaaaaaagtgggcggcttcccctggccggatcttcgtttaaagaccaccaccaaacctttgcccagaggtgccggnnnnnnnnnnnnaattttggggaaaataactcccttggtcccgaaaaaaatgccgcccctcaaatt

SEQ ID NO: 427769 - DNA, 385 bp, Homo Sapiens
  misc_feature (279)..(279): n is a, c, g, or t
ccttttttggggggggcttctgggcctggttaatcttaaaaaacagggtcttcattttggttttaaccctggggaaacccattttggccattcccctccctggtttcccatgggggaagggcttccgggggaacatgggatggaaattgttccaaaatcccttgaaaaacccctggatgggttggctttttcccaaaaaggggaatggccttttaggggccacaggggggattgcaaaaacgggttttttgaacttggtgggggacccatccacaaaanaactggtggttttggtttgccacttaaaactttggctattggccttctttattggcaatctcccccggaaaaaaagctcccccggttgggttttgcccgggggggg

SEQ ID NO: 427770 - DNA, 116 bp, Homo Sapiens
ccttttttttaaaggtggggacccccgaaaaaacccccctttaggccaacccaaccccggggggggtttaaaaaaacgttggttgaaccccaaacccagggggggcccccgccccc

SEQ ID NO: 427771 - DNA, 307 bp, Homo Sapiens
  misc_feature (43)..(84): n is a, c, g, or t
  misc_feature (165)..(177): n is a, c, g, or t
ttttggccccccttttccccagggggcccaaaaccttcccaannnnnnnnnnnnnnnnnnnnnnnnnnnnnnnnnnnnnnnnnntttttttaaaaaaatggggggcccctttgtccttgaaaaccctaaaaaaccccatgggcccccccttgtggggggaaaaannnnnnnnnnnnnaaaatatttcccccccaaacttgggggttttgggaaaacccccccgggtttgggtgtccccgggcttgccaacatttttgggaacttttgggcccttttgaaggccccccgccaaagggaaaccaagggc

SEQ ID NO: 427772 - DNA, 193 bp, Homo Sapiens
atgcaataacaggaagttcatctctggttgcatattcaagtctcaactcaatgatttcctttctaggaagctgtctaaaaatcgctgctctggaattgaaggacaaattgctcctaccaggacggagataaaacccttatccaccccatcacaaaatgcacttggtcacaatgcccggcgaatacaagaacta

SEQ ID NO: 427773 - DNA, 169 bp, Homo Sapiens
ccctacaaaaaaatttatgggaacccccagctcccgccctttttggacaaccccattgcccccccggactatccccaactaggggaccctttttttcccccttgcctgggggaccttttttataaaatttttaagggacgggatctcctgggccagggaaacccccctc

SEQ ID NO: 427774 - DNA, 181 bp, Homo Sapiens
  misc_feature (42)..(81): n is a, c, g, or t
cccaaatccaaaatcattaacacccaaaggcattgggaaagnnnnnnnnnnnnnnnnnnnnnnnnnnnnnnnnnnnnnnnnaaacagcaagaaaagtttcaaaaaacttgccccgccggggtaaaaccaaggcttggttcaggatggcaaagggccgggaaacaaaagggagttggatggg

SEQ ID NO: 427775 - DNA, 475 bp, Homo Sapiens
  misc_feature (53)..(65): n is a, c, g, or t
  misc_feature (449)..(449): n is a, c, g, or t
tttttttcctaaagccaatctttaacatatatgcctttcatttacatcaggcnnnnnnnnnnnnnttagaaaacagtagtattaaggatagaatttagtttccaaccttaatacactttcctccatctaaatagtcacccaaaacctcatagttattatccattgatctaatagttgaataacttttggggggaataaaaaagatggattcatggtcaggaacctataagagttttcccagagttacttttttagcaaggctctcagaagaaggtaacaattggcagcttgtgcttgttaggagccaagcttccacttgggctgcagggagactcacaatagcatgaggcccccagcttgtctcaattccctcaagacttatgcattcttttttctctccctcaatctgcttagaggatgtttcttcttttcttacctgtgtgccctangccagattaggaaactatttcctttg

SEQ ID NO: 427776 - DNA, 454 bp, Homo Sapiens
ggaaaaacaggaggattgttgtttattttaggtacgcacggctcagcaggtttgcatctaaaaagctgagcactgaacaaagacagagtggggtttttataagcggccttacagacacaaaacaaaagcagttaatcatacagtgacaggtcacataatctatagcataacataacttgtgaccttgcatagctggtgaccttgtagttgcatcgaaagaaaaacaaaaactggctaaatacagacatttgtaaataatgcttaagaggcctggggaaagagtaagagtaaaagaatctttctctttttcttcctccaaccttgctctggaagggaggggtgtctggagcctattcctttgaccttggctatttggacagcgttatcttataactgtccttgaagtaagcttgctaggcagaggaaaacttgttctcttctttttaacccttgc

SEQ ID NO: 427777 - DNA, 512 bp, Homo Sapiens
  misc_feature (44)..(53): n is a, c, g, or t
tttttttgagtaccaatagtttcaatatttattcttcttccagnnnnnnnnnnttacaatgtgtcttccattccaaatgagatacaaattcatttctttacttctcaagttatcacagaactcaaaggaggtgaaggagggagggtttctttgtaaccctctctgaaggctctgaagaaaaatccagccaaccgtgcattgaatgcctctaagacttctaagttctccttagcactgctccagtcttaaggagccccacatcttatgaacttaatggccatcagatctcaacactcttgccaaacccctgctgcaggacaaagacagtggcattgaacttttttttcagaaaaagaaatgggtaagagttaaaccatatatgagaccaggacaaggtgaagaggcaatgccaggtgtcagcaggaatcatggagctggtggaacagtagagtgaactccagggactggggaggcagacgatggagcaaaaaatggggacctagggagagggt

SEQ ID NO: 427778 - DNA, 187 bp, Homo Sapiens
aggaaataggtctccctgaaggggacaaaccccttggggggcggccagatttctggatttctgtccagggacttgggccgacccaaaatcactcgggggggatccaaataactaggacagcaatatggtcggggggatcccatggattgcaatggccgtggctacgccgggtttggggcataatgat

SEQ ID NO: 427779 - DNA, 454 bp, Homo Sapiens
tttttttaatctttcataactgaatttaattcacatttgaaaagagaactagcacaatgcagtcagagaaaaacaggactatacagtacacagggctcgactctaaagctcactttaacacagtcttcgggaaacaaaaactgctggtatttttagttagtctcccttgcacaagttttcagatgacccatcttctatattctgttatcataagtaagtgatagtctgttatttaagtggttgtatatatctaacaaaattgattcaaattgctgggaaagatgaagaataaccaagcctataaagtctttttcatcacagagaccaagaaaccaacacttctgccagcaatcaagagtagcagcaaaacagaggaatataaaagtgctatattgggaggctggcaatctcggtcccagttccaactttgcctctaacttggtatttgatctta

SEQ ID NO: 427780 - DNA, 252 bp, Homo Sapiens
  misc_feature (69)..(78): n is a, c, g, or t
  misc_feature (121)..(131): n is a, c, g, or t
gggatttattcatttatttaatttttttaaattatacaaaactgattcccaaaagggcgggccactgcnnnnnnnnnnaccttgggggggtgggaaaaaagctaaaacatcagcctccaannnnnnnnnnnggtattaaaaattaatccaacccccaccccaaggacatttaagcgatttccacttttgcatcaaaacccccggcaggaaaggcctacccccggggaacattaaaagctcccaaacccttgc

SEQ ID NO: 427781 - DNA, 228 bp, Homo Sapiens
  misc_feature (50)..(50): n is a, c, g, or t
  misc_feature (52)..(52): n is a, c, g, or t
  misc_feature (174)..(174): n is a, c, g, or t
  misc_feature (204)..(204): n is a, c, g, or t
ggaggattatcattcaataaattggatctacccgaacgtgcacgccgttntntgaaatataccgtcgcctaccaagtaaaaaacatcacctgtgacaaaataatcgggcaaacaactgcagcataccatgaaaaaaacacttaaggagatggccttcttaagtacttcgcatanaatttctggtaagctcctattgccagcatncactgattggaacttgacttgctc

SEQ ID NO: 427782 - DNA, 424 bp, Homo Sapiens
ggacttcgacgcctacaactagcaggcttacaggaccttgggcgggagaggacggtcccaggggctggctggtggcaatggataccgatgacagaatgagtcggccacaaagcccgcgttcacagatccgtccgaaatctaccgttgattcctgctaatggcgaaatacatgactatatgcattgatctcatcatagggagtggacggttagaccgagacgactacacagatcaattgaaaggatactgatatgtacaattccatgaagaggatctcctaatggaaccctggacatactatggtgcactgctgggcgatcgatcacttcgtgtggacattgtggagggcagaacataagatacaggtgcttgtagattcataagaggtggaccagatgactgaggcttcacgtatgacttctta

SEQ ID NO: 427783 - DNA, 253 bp, Homo Sapiens
  misc_feature (242)..(242): n is a, c, g, or t
gacatgtacgaacaaagtgttgctcaacgttatcatcctcagtcattcttgagtcggtaagacatcactcatgaaccagaatgagaatgagaaatttagatgtccatacaaacccacaatatgagctgactatatgacctaggaggtgatggtggatgacaagctagacacaatgcagatatggtacacaacatgacacgaacggatacagtgtcttggtgtggtctgctacataggtcctnactcctccgtt

SEQ ID NO: 427784 - DNA, 435 bp, Homo Sapiens
  misc_feature (191)..(191): n is a, c, g, or t
  misc_feature (204)..(204): n is a, c, g, or t
  misc_feature (261)..(275): n is a, c, g, or t
  misc_feature (387)..(387): n is a, c, g, or t
cagtgtacccgccctccttccaagggggtggtgaggaccaagggtagggcagcctggctgggcagcctttcctcctctagccgatcccattgccatgggctctatttagagctcttgtttcttgtgagctctgcctgggccaccaggaaggtgcaggaagggcacacgttggctgggtatgagcgtctcangaactagtggctnttcaatgataaattgaatgcacagagccacttgcttccacaactctgactcttgacnnnnnnnnnnnnnnncctaaaggcaagttttaaaatttggaacaaggtatcatctagccagaggacacagtacagtcctcagagagaaaaggggcctggctgacccttttagctccgctggctccanaaaaatctgaggttgcaccagaggtggaatgcgtaggcttcagggtcc

SEQ ID NO: 427785 - DNA, 199 bp, Homo Sapiens
ggccaaggggggaaacagcctttcctgtttttttaaggggtgcaagcaaaaggtccatgccgggctcaaaatcaatgcaaaccttcttgtggggcagggcaagggcatacttaacccctccgagcttattggggacccgagaaacagtttcagcacagcccccacaggggatggccacaggaaactcgggcttcggcat

SEQ ID NO: 427786 - DNA, 319 bp, Homo Sapiens
ggctacaaccgcaatggccatcaccgaaaaaatgaacgaggtggccaagatgcaactgatgtgctcttgcttttacgccggaacctccatcatcagcatctattcctttgcagattttgaggacagtgaaacaagaaaaggtgcctctgcgggcgcttttgggctgatcttgacgccaccgtctacaatgtcataagtacgagggactttggatcattcaaagaagaaaaacctatgcctggatgagatgcataataagctggtggctgcaagagaatgagtaaggtctccggacgcccatggactaaattatctgggg

SEQ ID NO: 427787 - DNA, 461 bp, Homo Sapiens
tgaaatccgttcaagtattaggatgatgggactgtagatgcatttcctcccattttagatttttaattttgctgttacattcctgcaaaaaacaaaagccaggcaggaaaagttcccatctccaggccatcccgtctggcagatgtcccaaggcagggaatggcctgaactcctctctaccagtggccaactctcctgctccaggcttggttctcaggctttgagaacctcagggcagaacacctttttccaccccagcaagcaaaatgaataggtaacaattgtgcccttgttttgagcaacaggagcagatgggacctacactggtgggctggcctgggaaaggtccagggctggcttggcccgggcagcaaggctgaggaaggtgatgtggcggggaggagaccccagggctgcaggcatgccctgcgttaccctctgcacccctttcctggcctcag

SEQ ID NO: 427788 - DNA, 131 bp, Homo Sapiens
tggtcattagatagttaaaaagatttaaaattgctatatgtctagtttctaaaaattgctaaatgattttctaaggtaaacacctttccgtgtatccagtgcttaacagaattaatgttatgtgagttttc

SEQ ID NO: 427789 - DNA, 154 bp, Homo Sapiens
ggcggccttctgcgggatgggtgtagtgcctgaaattgcacaagctggggaaaagatggattggctcctaccagttgatgtgcaggctgagtgtattccattgatcttaagaggaggggatgtactattggctgcaaaaacaggaagtgagaag

SEQ ID NO: 427790 - DNA, 235 bp, Homo Sapiens
ggaggccccactggtgagtctggataaagagattgaggaccttggaacctactgatggaaggacccggaggaaaagccccagtggatctatggttcatgtacccaccatctagaggacccctccatctgatagcttgagaattattgttacgaaataatcagcatagaatccatggaagacctcttcaatgaatgtgatgaaaagctaaatgaatgctttgagaactacaaacca

SEQ ID NO: 427791 - DNA, 265 bp, Homo Sapiens
tgccatcaagaggcttatgaaggagcctgaccaaatcctacagtgtcggatgaaaaacatacgaaacatccaggttgatgaacctaattaattgactcggctagggcttattggaccggaaaacccaccatttttatatggcacccttcaaaattcaaaatcaatttctccagcgaactaccggttagaaccaccgaagatcacagttaaaaacagaatctatcacccgaaaattaaccgaattatgagtcaatctatgtgcctg

SEQ ID NO: 427792 - DNA, 655 bp, Homo Sapiens
gtgttcgctgccctgggctaccgcatcggcagcaaaagtaacacgtggtggatatactgaaccgacatgcccagccataatggacataaagaaatcatcggtctgaacgatcctggccttcccctgaaaagcaccatgggcagtcgatctatctcctgacatgcgtgtcttatgcgctgcttcgtcctgagggcactgatcacggatctttacatccacgcacctaacgaatggaccttccttcgaattcgttacaagaaagatgactttatggatgcgccaaattaagactcttcattgagtgtgatttagaatccatccgaatatgtcactctgttggctacctgcgtcattccttaatgtagtgcccgcaaagaatgtgaatgctaatcatgtctgtggactatcacatggcaggcgtttggaacccactcacaccagtacagtgaccttgtgtgggctggcggctgtactccctcaccaacggaaccgctgtgtgctccaaccttatccagagctgccgagcgctctatgctcactatcaggtgttggatcatgagcttgcacgaagccctgcacgagctatgttctgacctcagttaactatgatcgccttggagaagctgttttctttaactgcataaccaaaatgctg

SEQ ID NO: 427793 - DNA, 369 bp, Homo Sapiens
atttactgctgatgaaactgagtatgagagtaaagttatttcagggtcgtagggttatccattaccaacgttgggcttcatatctgagaagtctggctactcagttcaggccttaaattaaccattagacccaactacctttaaaaagatccctcttaagcagatagatgtttgagaactacttggcctagtctgttaactctgaattaaaatacctactcttcagtttctattccttctcactgccaaaacttcatttcataacttactccaggaaagtcttctgtgacttacacatggctctgttcctttctctgctgggcatatatgtatctaggttgtatagtatttgcttgttaatatggtctg

SEQ ID NO: 427794 - DNA, 196 bp, Homo Sapiens
gagcccaatcttcagggccatggttgtggatcccccctccaaaggcgtcacttctggatctattagacaccagatcagtgggcactcatgcatgctgacgtgtgatgagaccaccatgtgcaagtccctggtcccatgggaacatcatttctaccacatcctccctgctgagatgcgcaaatttcctgcccggtac

SEQ ID NO: 427795 - DNA, 493 bp, Homo Sapiens
ccgcggccggaggtatccgcatcggcaacctgcttttcccgggtgtcggccccggcggttccccaaccgtccccggttgtggcaaggcggttccaccccaccctgtggcagccgcaacccccggggccctccgaaccccattgcccggcccccgtgccggttgcttgcttggacccggaactgaaccggacccgttcgaaggacccacccaaattcctgccgcttgcccggacacaaggaggaggaggaggaaaaggggatggaccaggggctgaaggagagaaaaaaggtggatccccggttcacagagaacctggagaatttaattcattccacggttaatatcaccacacgggacactgatcttgaggatgctcgtcaaaagttcctctctgttctgttgaaccaacggtgacactgtataactctgggaagaatatgggccaaatctgtgaaacactccaacctctactggggggcacggagggtggca

SEQ ID NO: 427796 - DNA, 237 bp, Homo Sapiens
  misc_feature (79)..(79): n is a, c, g, or t
gatttcttgctgtttattgcaacccgcctacatcgttggtgtgtgcagctgaactcaggctgtttaggaagcccacggnaaggggctctgtggggcccattcctggtcccacgtctctggcaagggctcctcttgagctgaggcttctgagctcctgcaggcgggagtagggaggcaggtcccactgtcagccaagctgcagggtttttaggaagaaagtcggggctgtgcaccgtg

SEQ ID NO: 427797 - DNA, 408 bp, Homo Sapiens
gtgcctgcctcacacatagcaggcagtcactagatgtttgatgactgaatggatggatggattcaaccaatattgattaggcctcaaggcaaaggacttgggtcaccctccaaactaagaggcatactccccatcttcccagccaagattggactcctcacctcacccatctcttctgcctccttggaactttcttcaccactttcccctcccttttccatcttccttcagatagacatgcgcccctcccagataacactcaagccccttgcagacgtttgggaactccagataggcacgttggctgctggggaaaaagctagggagatgggagttaggactttcctggggcaaggaaaaggggcgtttcaagttgttcattgatgggccccgcaccaaggacccagc

SEQ ID NO: 427798 - DNA, 351 bp, Homo Sapiens
  misc_feature (330)..(330): n is a, c, g, or t
  misc_feature (337)..(337): n is a, c, g, or t
acaaaatacaaataaatttctctaaaagtgcagttgttgggaaaaagaaaaggcggtttgtcaggctgacatcagagtagccgcagtcaccctgacaagccgcaaagtctaatgttttattcaccaggcctgaaaaataacttcccaacaagggccccataaataaaccagtgtgatgaatattacacgaaataaaaactgataaagcaaaggccctaaacacgagctgcaccacgaggtgagggaagcacatggcttttatcgcctctaatgccaggtgacaggttgggccaggctgcccccagcttcacagggaggctgggagggggncgggganggggccagccattg

SEQ ID NO: 427799 - DNA, 313 bp, Homo Sapiens
  misc_feature (282)..(282): n is a, c, g, or t
gccataccaaccttttctcctggctgtggcttggtggataccatttcccccataggcagcccaccagcccgaccccttagagcttcatagcctgctgtgctctgccgtcctatgggcaactaagcctttttgctggattgggtccctcccctcccttcctggcccaaggcctgggtccagggacagctgagcctgatgcagcccctaccccaccccaaatcaccagcacctgggttctctggctacttccttaggggtacacaaaaatcctcatgcctgttngatcttcttggggttttaaaggaccttctct

SEQ ID NO: 427800 - DNA, 504 bp, Homo Sapiens
  misc_feature (314)..(314): n is a, c, g, or t
  misc_feature (403)..(403): n is a, c, g, or t
  misc_feature (430)..(430): n is a, c, g, or t
  misc_feature (439)..(439): n is a, c, g, or t
  misc_feature (445)..(445): n is a, c, g, or t
  misc_feature (455)..(455): n is a, c, g, or t
  misc_feature (460)..(460): n is a, c, g, or t
  misc_feature (475)..(475): n is a, c, g, or t
  misc_feature (481)..(481): n is a, c, g, or t
ccactatataaatacagagtaatgtgagtatataattctaataattgctacttactcataagtacagaattattagggcatttacagaagtcacacaactcaacctttaaacaagctcaaactgagtaggataatgataggattaaagacttaggaatgccatgttttagatgtgtaaaactgatacactccccacctgcttctagctgttttgggaaaaaagtgagatttgctatgccaagcatgccagtgttaagtgaactcatgtgaactgtaacattttttgtcccactgttgtcatgactttgtacaantaaactaaggtaaggttgtctgggtccgggcagattctggataaagagacttggataagggaaaatggcagtagtgctgggaaatcctnccaggtggaggggggaacccgttttancccgtttantttttnaaatttttantggcncctttgccccggggncccgtntccctttttgccccggggggagg

SEQ ID NO: 427801 - DNA, 421 bp, Homo Sapiens
  misc_feature (232)..(232): n is a, c, g, or t
  misc_feature (234)..(234): n is a, c, g, or t
  misc_feature (360)..(360): n is a, c, g, or t
  misc_feature (397)..(397): n is a, c, g, or t
  misc_feature (404)..(404): n is a, c, g, or t
tgccatggtgccgtggaatgggtggcacctgcctgtggcccttctcagaaggacgttttaaacgcgtgaggtctgatgcacagccacagggagacacagacgagcagatgtgggcatccgagtatttacaaggtctggtggctcctgcagccgcgacacgggctgagcgcaagtgatgtgtgaggtgtccccaacagatggcacggggagcgcccacacccgccaccgcggntnctgcggaagtcgtgtcagctggaggttagggaagacgcacaggggctcattctccacccaggttcaaactccctgaactcacgagacccagggctgaagacatggacagactcccagccccagcgncccctttgacagcacacccgaggcctcctggggaacntggggancctttgcagggtccccg

SEQ ID NO: 427802 - DNA, 408 bp, Homo Sapiens
  misc_feature (339)..(339): n is a, c, g, or t
  misc_feature (387)..(387): n is a, c, g, or t
  misc_feature (395)..(395): n is a, c, g, or t
tataacttggatgttaataatcctgtcactcagtgccccaaaccttctgtgtctacacctagagagagggccagtaagggcaactcctatcatgcattaaaatgcatgtatttaaatctgcttgcccagagccagtacccaggggctaaggattaagacctgtcagtacaccaagactggggcccagtcacctggcaggtttttatctactcagagggagaatgctttgcactaagtgggagaaaagcagctaaatgcaaggtgtcctgagcaattagaggacctccaaagcatggcctcagtcatgccttcatcgggcaaggtcaggccagctcaganaaatggatggtcccatagggtcaagtggagcacacacggaaggcagtnctccttcnctgcccatgtcct

SEQ ID NO: 427803 - DNA, 472 bp, Homo Sapiens
  misc_feature (206)..(206): n is a, c, g, or t
  misc_feature (389)..(389): n is a, c, g, or t
  misc_feature (417)..(417): n is a, c, g, or t
  misc_feature (442)..(442): n is a, c, g, or t
ctctgcttccgggtccaagcaattctcctgcctcagactccccgagtctgggattacaggcgtgctccacgatgcctggctaattttttgtatcttttgtagagacgcgctttcaccactgcgccgggccaattgttattattttttttatggaagacggggcccgtgaaggccagagggcaacgcattgtaaaggcccagcgcanccaggttagagagatgtgatttcaaaacagactcattatttataaccatcagctcctggacaagccaagtcccttctccaagcctgcttcctaatctataaagtggaggatatctggagctaccttattgaacacagaaggagtaagtggataaaggtgtgccagcgcccagcacagtgcctngccacaaagtaggcattccatcaaagancaatcttacaaaagcgaatctggtnctaagagcacctttagaagagttcacaatg

SEQ ID NO: 427804 - DNA, 439 bp, Homo Sapiens
  misc_feature (56)..(82): n is a, c, g, or t
  misc_feature (333)..(333): n is a, c, g, or t
  misc_feature (380)..(380): n is a, c, g, or t
  misc_feature (389)..(389): n is a, c, g, or t
  misc_feature (426)..(426): n is a, c, g, or t
ggtatgtaagtcgcaaaatttccactggataaaaagatgtctgactaaaaatactnnnnnnnnnnnnnnnnnnnnnnnnnnnccataaacttatctaaatgagccctctcaggaatttgcgcttcttgacatgacggagtagcctacaagagacccacttgcctgctgagaaccactagaaatacacaataaaagcaatttgcttgaaagcaaaggagagctgccaaagatgtcaaaacttaaactacatcaaaaagagaggctcattgaggggagcctaaccttccgcctgtcactccagtcaccctcgccgggatttgctaattcttagtnttgaaggagattctgaggaagtcagaaagaaggtcgcttgctggagnagggagggnatttccttggggttttcagcaatctcataggggctgnggaggcaggaaat

SEQ ID NO: 427805 - DNA, 506 bp, Homo Sapiens
  misc_feature (433)..(433): n is a, c, g, or t
  misc_feature (440)..(440): n is a, c, g, or t
  misc_feature (457)..(457): n is a, c, g, or t
  misc_feature (472)..(472): n is a, c, g, or t
  misc_feature (481)..(481): n is a, c, g, or t
  misc_feature (491)..(491): n is a, c, g, or t
agcaccatgccctggtgtcagcttctcatctcccatctctccttaacccactcctgtttgtcccttgctgctgtcactctcctgagactcctcttgccaaggtccccagagtcttcacacttacaagccagagctcttcatcccactgctccactccccaagtcttccctaatattgtacagggcatttccattcacctatttgctgagaccaaatacctacattcaagttatcccacaccagactgtgcacaattcctgctatgtccaccttcattggtaggctgctcgcttttgattctgagctgccatttgtcactgctcacctgtatcaccctcgttgcttcttaactctcttctctgcctctattcttgccaattatggggctaatttctttcaaggccatcaggattaacttcttaagaggcatttnaattccnctggttgaaaaatttanctaaaggtaaccatnaaatggggnttaaaaattntttgggggcgggggg

SEQ ID NO: 427806 - DNA, 399 bp, Homo Sapiens
  misc_feature (70)..(70): n is a, c, g, or t
  misc_feature (142)..(197): n is a, c, g, or t
  misc_feature (276)..(276): n is a, c, g, or t
  misc_feature (290)..(290): n is a, c, g, or t
  misc_feature (318)..(318): n is a, c, g, or t
  misc_feature (328)..(328): n is a, c, g, or t
  misc_feature (377)..(377): n is a, c, g, or t
cagatgagttgggcaagatactatagaagtgaataaaacagaactttgttggcaattggatgtaggagtngaggaagaaatcaaagacagaagctcagtcacttaagttgatgttggcaaggattgaaataggaagggacannnnnnnnnnnnnnnnnnnnnnnnnnnnnnnnnnnnnnnnnnnnnnnnnnnnnnnnggtgattattggtttggatttggatgtgttaacttgtatgtggctatggaccatctagatggatgagagccattaaaantacagaaagatttngggcatccttatggagggggatggtgancctgtcaganagttcagagtgtggtggagcagaataaaaggctaggatagagccttgtnaaaagccagtgtttgtggactt

SEQ ID NO: 427807 - DNA, 137 bp, Homo Sapiens
aaaattatacttagtgacacaaatattttttgtctgatcaagtacctaactgattaatgagctaaagcaaagtttgatcccaacttctggagagaggtagatctggcaactgaagaagaatataactgaattttgct

SEQ ID NO: 427808 - DNA, 489 bp, Homo Sapiens
  misc_feature (30)..(30): n is a, c, g, or t
  misc_feature (451)..(451): n is a, c, g, or t
tggacatccaggtgtttccatacatcttcngaaatctatgcagaggttcccaaactccaattcttgatttatgtgcacccacaggctcaacgccacatggaagaccccaaggcttggggtttgaaccctctgaacccatggcccaagctctatgttggccccttttagccacagctgcagtggctgggacgcagggcaccaagtccctatgctgcacacagcacggggaccctgggccctgccacggaaaccatttttcctcctagacctctgggtctgtgatgggagaggctgtcacaaaggtctctaacatgccctgggagatattttccccattgtcttcgggaataacattcagctcctcattacttatgcaaatatctgcagcagcttgaatttctcctcagaaaataagacgttctttttcttttcggcattgtcagcctgcaanttttccaattttattgctctggtttccctttttaaaaa

SEQ ID NO: 427809 - DNA, 500 bp, Homo Sapiens
  misc_feature (347)..(347): n is a, c, g, or t
  misc_feature (360)..(360): n is a, c, g, or t
  misc_feature (467)..(467): n is a, c, g, or t
  misc_feature (479)..(479): n is a, c, g, or t
cttattccttttggacagaatcccaattagtctagatatttttaggcgaagatagcttcatctcaggaaaggtcagatcggttcctgattaggaatgggcatgtgtattaggccttttgcattgctgtaaagaaacacctgaggctgggtaatttatagggaaaagaggcttaattggcttacagttctgcaggctgtacaagcatggctccagcatctgcttctggtgagggcctcaggaagcttccgatcatggtggaaggcaaagggggagcaggcagtgtcccatggtgaaagcaggaacaaagagagagaaggggaggagccgggctccttttaaacaactngctgtcttgtganctaacagagccagggctcacttcagagatttaccacagagagggcaccaagccatttcacggagggatcttgccgccatgatccagtacctcccacccagcccccancttctacaattnggaggtcacattttcaacctg

SEQ ID NO: 427810 - DNA, 468 bp, Homo Sapiens
  misc_feature (330)..(338): n is a, c, g, or t
gatctgtgctcagacctgccagtacagcctaatatttttctgaatcttgaggcagtcaagttgcccatatgcactgaggcccactttatgtagagtgtgcttgggacacttccagagatgtgcacaattagctaaaacagttttgtcctttcagaatttagctgagaaaatgacagtccacataataagatcattaatgatataaggcaggagattgtacagatgatgctgtgggattttttgtatttcttcttgaggagctcatcttactaagttcaaattatcaaattgtgtttaaggaaaaaaggttcattatttcatcatcctcannnnnnnnnaaccatttgtgggtcattcctcccaggttgtaagtatttttattcagatgcatgtagggtgttcgatatttacccttgtaatgtttaaagatgacagggtactgctctcactttgctctgttatataagg

SEQ ID NO: 427811 - DNA, 371 bp, Homo Sapiens
ggatgagtcaaatctaaggtcttcgaaccttatgttaggggttggaggtcttggtgtgaggaaggaagactttaaaattaaagactgttaagtccgtgtggctttttcttactttggattcatttatcctgtactccatgtagctcgcatggttagagagatctgaggcctactcctatttgagaggatgttatcccccatagccagaaaccagggtggcttccaaaagaaaagggtagcattcggtgactctgctttaggccttgaggatgaatcttttctttgtttttgtcttcctgtgtccttttgcatcatcagagatctggagactaagctttgagcatgggcttggggaagaggggccaaagagg

SEQ ID NO: 427812 - DNA, 637 bp, Homo Sapiens
  misc_feature (461)..(461): n is a, c, g, or t
  misc_feature (502)..(502): n is a, c, g, or t
  misc_feature (520)..(520): n is a, c, g, or t
  misc_feature (529)..(529): n is a, c, g, or t
  misc_feature (536)..(536): n is a, c, g, or t
  misc_feature (578)..(578): n is a, c, g, or t
  misc_feature (592)..(592): n is a, c, g, or t
  misc_feature (605)..(605): n is a, c, g, or t
  misc_feature (625)..(625): n is a, c, g, or t
agagcttcatcagaaggccaaaaaggctacctatgaataatattcattctaaagagtaagaataggtaaggaataagaccaccttgatgctgtgatgatgcttttctataatacaaatatttggtcaatgctctttctccaaaagcttgctttctagattttacctggaaatttctaggaccctgcaaatccttgcgaaagtcaaaagagggaaacggcctaattctctctcatttaccatgcaccacctaggtgaaacaagaagttctgcaaattactcactgtttttatttacccctgctgggctccttgtaagccttcctggggtttgttatactctgaaatatgggagcattaatgaccttttagggaagtgccagcacatgtcagggaggtgggctacttgctctgctcgccataaaaaaggggtgttaattagggctccaaagggggccctcggntagggaaattagtactttcaggcttttattaaccggactgntatcttgttaggggggtncccaagtgnttaaggncctcaattttgaagggaggctacattttaggaccaagggggnaagaggcccttatnggggcccttttancattttgatttggtgtttgncccttgtaaggc

SEQ ID NO: 427813 - DNA, 501 bp, Homo Sapiens
  misc_feature (325)..(325): n is a, c, g, or t
  misc_feature (428)..(428): n is a, c, g, or t
  misc_feature (454)..(454): n is a, c, g, or t
  misc_feature (478)..(478): n is a, c, g, or t
  misc_feature (483)..(483): n is a, c, g, or t
agaaggacctctctgttgtctcaggcagtggggtgttctgtggaatgcatgcctgatgccctgagtttccttcttagccttggagagagggacaaagctgctctcagatgtcataattactagcactgccccttatggaagtgggagatggaacctgtggtgaaatgcactgtggtctctgcaaggggagaggggactgcactagctccaagtcccgggcaagcaaaaacaatgtccacctccctatcatatccctgtcctggggattcctgactctctgttcagagagatattgtcgtttatttccatgctgcaccgtagttantggctgtggaaaatgcttagccacagctatctgcttgcaatggcctctgggcaggaagttcttttgttagcccagaacagatagcttttgcagcttcacctanttcccttgtttgcagggaacttttgnccgttccatgttaggaaagggggnagganccttgccctttgtttcaa

SEQ ID NO: 427814 - DNA, 362 bp, Homo Sapiens
tcagctctgtccagtttgagtgctggagttgtctgttacaaggctgcaaccctgtaatagttgtagggctaacagttgtgagatacactgcttaactctccctcccatcccctatcctctgaaggtagctggctttcctgatgtaatccagaatctaattttgagcccagatcattggtttcacaaagcctgttggggtgcagtccgagtggtcccttctgaaatgcatctctgctctttagtgcccctaataagaaatgcagtctgtttgctcaaggttttaccctttacagaaatggtcagactcctttcttccccccatatccatttcgccaatccatggccaaatattgatgttttga

SEQ ID NO: 427815 - DNA, 447 bp, Homo Sapiens
cacgtctcagcatgagactcggaggcgacaaacatccaagccattcaccagggatcttccgccatggctcaaacccctcccacagaccccacccagcaccacggatcacgtctcagcatgagactcggaggcgacaaacatccaagccattcaccagggatcttccgccatggctcaaacccctcccacagaccccacccagcaccgctttatccttaaaaacaaaacaaggaatgtaaatgcaaaactgccgcgcggcctcgccagattccggaaaacacccacatgttcctgttcagggtaaacacgtgggacccctgcaggctccaagacttcagaaacattgggcacgggcccctggggtcccggaaaagcacccccacggttcctgtttccgggttaaccacatgggacccttgcagggttgccaagatttccggaaacgtt

SEQ ID NO: 427816 - DNA, 405 bp, Homo Sapiens
  misc_feature (14)..(14): n is a, c, g, or t
ggagatacagagantaacattaaatgtatttaccctccaagaagcatatattctgtatgtttagggaagataaagaaaacaaactctgcctctttttatgggttcttgctctatgactatgtgtccttttatttcattgggagaagggtgagagtagaattggaaaaggtacaaatagcataatcccaaaatgagttaccacttgacaaattagcataaatctctttcttccctgggatttggggctgacagttttacataaatttcataccgtatgttgagatttacttccttaagggtttttcctaggttctctttgacatacataggattgagttgtttacttttcttagctaaattaggagacccgtatctttttgggatttttcttaagtgtttaaacag

SEQ ID NO: 427817 - DNA, 415 bp, Homo Sapiens
  misc_feature (285)..(285): n is a, c, g, or t
  misc_feature (335)..(335): n is a, c, g, or t
  misc_feature (362)..(362): n is a, c, g, or t
  misc_feature (367)..(367): n is a, c, g, or t
  misc_feature (402)..(402): n is a, c, g, or t
catgggctcgaaacttgccctcccaagtccagtagtccccctggtctctcacctagaaggagtaaaatccgccttctctttcaagagccaactaggaagtgcagagataacttaaaaagcagttgagattttgccattggatcaaactgacaatgtgcattaagcctctgtttttcctgaaaaggatattgacaaatgaggcgggaagtagccttgactagtccagaggtcaatacagaaagagatgagaggagacatttagcttttactttcaagtggaaaaanacattgagtccccctctgcacccccactttatttgtccctcactttaggntctgaataaatagagagagctctattngtctngttttcttctctggagctagacttgagctgggggnatctaagatgtta

SEQ ID NO: 427818 - DNA, 275 bp, Homo Sapiens
  misc_feature (153)..(153): n is a, c, g, or t
atttattgcttcaaggcatttcaggaaatctctgtccaatcattagctggccagtaagctaaccaaccagagacttcagtggctgaatgctacaaagaatacagactttacagaattggcacagggtggccactaaacaaacatatcacaganacaacagcaacaacaaacactgggaattggtggaggtagaatctgatgctcagatttttcacattacataatttaaaatgttgtttttaactaaaatgtacaaggcatgcaaacaaaaagga

SEQ ID NO: 427819 - DNA, 294 bp, Homo Sapiens
  misc_feature (28)..(28): n is a, c, g, or t
  misc_feature (37)..(37): n is a, c, g, or t
  misc_feature (103)..(103): n is a, c, g, or t
  misc_feature (134)..(134): n is a, c, g, or t
  misc_feature (149)..(149): n is a, c, g, or t
  misc_feature (160)..(160): n is a, c, g, or t
  misc_feature (177)..(177): n is a, c, g, or t
  misc_feature (197)..(197): n is a, c, g, or t
  misc_feature (275)..(275): n is a, c, g, or t
cagtttcagtgctggatgactgagaatnacaaaattncttgaaaaagcactaggcacaatagttggcgttcaacaaacgctcacacacacatctgccctgganttgggtctacttaaacagaagggggaaaaanagcttgctgaaatanttatacttctncgtaactaccaagctcntgtttgactgactatagtantcctatgccctccttcacattgacgctagagaaaatgcctggcagtatttcaaatcatgatgcctatttttctctcgntcaagtaacaactcaaatt

SEQ ID NO: 427820 - DNA, 137 bp, Homo Sapiens
  misc_feature (32)..(32): n is a, c, g, or t
  misc_feature (44)..(44): n is a, c, g, or t
  misc_feature (53)..(53): n is a, c, g, or t
  misc_feature (55)..(55): n is a, c, g, or t
  misc_feature (64)..(64): n is a, c, g, or t
  misc_feature (85)..(85): n is a, c, g, or t
  misc_feature (101)..(101): n is a, c, g, or t
  misc_feature (107)..(107): n is a, c, g, or t
tggcaaacatggaatacccacacacacaagtnttagctacaaantagggagtntntcctttcantgattcctcagacaagttaantgctttcatatatgcntttaanactgccaaggcacattgtaaagttggacag

SEQ ID NO: 427821 - DNA, 322 bp, Homo Sapiens
  misc_feature (38)..(38): n is a, c, g, or t
  misc_feature (94)..(94): n is a, c, g, or t
  misc_feature (171)..(171): n is a, c, g, or t
  misc_feature (177)..(177): n is a, c, g, or t
  misc_feature (214)..(214): n is a, c, g, or t
  misc_feature (234)..(234): n is a, c, g, or t
  misc_feature (267)..(267): n is a, c, g, or t
  misc_feature (294)..(294): n is a, c, g, or t
gggagcggctctctcttctcacgcgatccccccgcggnccgcgctgcctggggatctagctgacctggggctctagctgacctgggtccaagtngggaatcgcaaactctgtggtgcccattagagaatttcacaaactgctgcgaaaccacagtaaagcccccgcgaccnaccccnagacgggctttaaaaacactttaaaaatgagaaacgnattacagcttcggctcacancagactcattttcatgggaaacagtcccggganggccgttttggaccccgagtaaaagangtggggaatacacacaaaccacttcaga

SEQ ID NO: 427822 - DNA, 378 bp, Homo Sapiens
gtcattggcttgttttgataattttacaggctggcagtgacatggaacctattaggtttaggtccagatggtgtgcagctggtctggctgataggggaactagctgggtgaagaatctttcctgctgggtgggggccatatctggtgagagaaagcagggggactcagggtgagaccttttggatctcatgagggtcaaagacggtcaaggcagcagcacatgatatttcaggccttacaagatagtctgttacatttcttactgacaattttccttctctatctctatctcttcaatagtagcccaggggttatctttgaggatatgggaccaaatttcttgccaactacagcctgaatacaagcatacaatcaaca

SEQ ID NO: 427823 - DNA, 239 bp, Homo Sapiens
  misc_feature (69)..(69): n is a, c, g, or t
  misc_feature (145)..(145): n is a, c, g, or t
  misc_feature (182)..(182): n is a, c, g, or t
  misc_feature (187)..(187): n is a, c, g, or t
acttcaccctttcaggcctggatgtcttcatctggataaattctaaccgttgttgaaaagccatgtggnaaatatttttgaaacctaaagccttctctacgcaataacactaagttttcatggtaaatgacacagtttcaatatnctccctttcacattatggtcagtagtttgcattcgtngcttnaagaggcgaaatgaatagtctacagacactgggaaccaagtacagctcaatc

SEQ ID NO: 427824 - DNA, 309 bp, Homo Sapiens
  misc_feature (155)..(155): n is a, c, g, or t
  misc_feature (167)..(167): n is a, c, g, or t
aggccggattgacgataccggccctggtcatggcgacgaagctggatggcggcaccggctgccattcggcgttctcgcggtcaaagggctcggagacgatgcagcggcccgtgccttcgcgaaacgacgaggtgtagagcgtcggcgccgtcgcntcggtggcgtangcaccgcaaacagcgtctcgccgtcggaaaaagcggcggtgagtttcagcgccgggtcgatgccggcatgccgcgccgccgagaccacccggggcggttcgcgcgtttcgagccccctttgcgggtgcgttcgtccagccct

SEQ ID NO: 427825 - DNA, 382 bp, Homo Sapiens
  misc_feature (22)..(22): n is a, c, g, or t
  misc_feature (243)..(243): n is a, c, g, or t
  misc_feature (252)..(252): n is a, c, g, or t
ggctagcagcaggcgctccggngcagtgctcgtaacacctcctgggctgttcgaagacagcgaccttaactcccacacccatgcggctttcatggggccaaggtcattcctgagcttgattttcagcaaggcagagcaggcaatttaccagcggagaactgtgctcacgggctctgtcatgaaccctgaagtggcagccctgctttatgcacggaccctgcagcatccccagaggtgactgtnaccccgggnactgctccgagcaggctgggtgcgggtatagattcacagccatcagtggcttcaggcattccattcaggaagacgtgcagcccgcaccccggctttagcgcagcccagttgcccagtgcggggccggttg

SEQ ID NO: 427826 - DNA, 335 bp, Homo Sapiens
  misc_feature (30)..(30): n is a, c, g, or t
ggcatgacttaatattctaccttaatgggnaaaaaaatcatcatatttttaggtgcaggatattctcaggttccttcaaagtttacatattagggaagttaatggctaagttaaacctctctggggcattcagagtatagaaagcaagggatgagagttgaaacagatggtggtagtgggctgcaaataggcaatattaaaatacaaccatctttccactgtacaaatgtacatgtagaaattttttagaaaagcatgaagaagcaaaaagtcatctataatctcattactgaaagaaattgttaacgtttgggattaatatctcaccagggcat

SEQ ID NO: 427827 - DNA, 417 bp, Homo Sapiens
  misc_feature (19)..(19): n is a, c, g, or t
  misc_feature (158)..(158): n is a, c, g, or t
  misc_feature (311)..(311): n is a, c, g, or t
  misc_feature (354)..(354): n is a, c, g, or t
  misc_feature (369)..(369): n is a, c, g, or t
  misc_feature (376)..(376): n is a, c, g, or t
  misc_feature (386)..(386): n is a, c, g, or t
  misc_feature (398)..(398): n is a, c, g, or t
gctgaggcctcgggtgcanatgagatggtgtctcaggctggcttccccagaaagtaggctctgaaatggatattagcaagcagggaatttacgtagggagagaggatgcagggaatttatgcggggagagacaaaggaaaccaggctgccacgccagntgtaaggcctcagctgaccccacaaggactccggagccagcagggtccttcggagacatcctcaactaaggcaacggggaagatcttttgtgtctcagcactggggctgctgccaaggaaaggggcccagcctgggttttggtgcccttctgnaattctccaggttgactggggccttgaatggcctccttccagnacctttttgggcctnaacccgncccacagtgnagtagttttctngtgaacattttgaagctcc

SEQ ID NO: 427828 - DNA, 266 bp, Homo Sapiens
  misc_feature (91)..(91): n is a, c, g, or t
  misc_feature (246)..(246): n is a, c, g, or t
atcgaacccgggcggatcggaaacagattggcgttgctgccgatcacgagattgcactcggtctggccgaacacttcatgcgcgtcgacgncaaaagtctcgcgcacccagccgagcaactcgccacccagcgactcgccgccggtgaaaatactgcgcagttggaccccgggatgcctgacattggcctggcgcatcagcttcagcgccgtcgggcaggaagacgttacggatgttcagagacgncatcagttccatcgtcgcct

SEQ ID NO: 427829 - DNA, 221 bp, Homo Sapiens
  misc_feature (30)..(30): n is a, c, g, or t
  misc_feature (82)..(82): n is a, c, g, or t
  misc_feature (152)..(152): n is a, c, g, or t
caagtcatttccaaatcaggaaggggtcantttcaggaaacagaaacttctccagctgtttttggcagaaggggatttaagngaatcagggtacttaaagtacatgggaaggctggagaagtcgcctccaggaagctcccactggactgggnatcagaacgtactgtcctgcctgccatcccctgtaagcacccaggaagctgggcttgggcctggggaca

SEQ ID NO: 427830 - DNA, 470 bp, Homo Sapiens
  misc_feature (93)..(112): n is a, c, g, or t
  misc_feature (401)..(401): n is a, c, g, or t
  misc_feature (453)..(453): n is a, c, g, or t
gaattttgcagctaagcaagggtatgtgggcatgtgtccatgtgtagaggaacgtgatagctaaatttatggtactcctgtggagtggtctcnnnnnnnnnnnnnnnnnnnnacaactgtgagcattagactagtacacggcagacatgatcttcccgtggggtggagctttcctcataccttgtatgccctgcttcccacaagaggcacagagctctccactctgatgcctactttcaggcactctggtcgtgccaacccagattttggtctgtgatgaaacaaagagaaatgtttacaacatctagagcaatatccaagcatacctcatccctgagcttccatgtttcccagtcctgcctctatgccctctggcgtctgaattttctcctttggagatnaaaggtgtttttgggcccaagctggagtgcattgctggggcagccgccatgncaaggttggtagctgaa

SEQ ID NO: 427831 - DNA, 449 bp, Homo Sapiens
  misc_feature (334)..(334): n is a, c, g, or t
  misc_feature (382)..(382): n is a, c, g, or t
  misc_feature (403)..(403): n is a, c, g, or t
attagatgagaagccacatttcagggaccacatgcattgtgtgcttttggctgatcagttggacaagaagagatggactaaggactggaaattgtgccctcaaagccacctgtattatgtccctcttggggagtacccttgtcccctcaagagcatgggtacctcagcttgaagactagtgccttcagtacctggccctacttcaagacccaactcgggtgtccaccactccatcaagcctcttcagtgctctcagctggacgtagctgtgctcctccctgagctctaggcattcgcctgctcctctttgtgggcacatactctactcttcctncctcaaaacagggcagtatgtacacactttcacctgccctccaatttngctaaacaggcaggggaacgncagcgtttccccaccaaaaatgttttccccacccccgaacaatttt

SEQ ID NO: 427832 - DNA, 303 bp, Homo Sapiens
  misc_feature (53)..(53): n is a, c, g, or t
  misc_feature (58)..(58): n is a, c, g, or t
  misc_feature (240)..(240): n is a, c, g, or t
tcaagatctgtaggatgagttggcaagctggagacccaggagagcccatggtntaganccagtctgaatctgaaggcctgagaactcagagagccattgatgtagttttaatccaaaggcttgagacccacaaagaaccagtgtttcagtttgaaggcaagaaaagctgatgtccctgttaggcagtcagacaggaggaattctctcttagtgtttattttagtgttcatttgtgtgccntgttcttaccagctagtaggtaagcatcttgagggcagggaccacaatcctatttgctttttt

SEQ ID NO: 427833 - DNA, 335 bp, Homo Sapiens
  misc_feature (25)..(25): n is a, c, g, or t
  misc_feature (82)..(83): n is a, c, g, or t
  misc_feature (86)..(86): n is a, c, g, or t
  misc_feature (95)..(95): n is a, c, g, or t
  misc_feature (98)..(98): n is a, c, g, or t
  misc_feature (159)..(159): n is a, c, g, or t
  misc_feature (304)..(304): n is a, c, g, or t
atgtagcaggttgagaaagctaccntatgctacaatagactatatatcaaaaattttgataatgagttctaggatgtatttnnctngtatctttnccnttctaccatgatactagtgatgtataaggggtctgtgtagtttgaacgtatctgaataacntcagtatacttcagctctactgcttaatttgactcgaagccaagaggacataaggcatccccatgtgttttagaagcccaaagccagtgaggatgaaacccaacaccgaggaatttgaaggcaaaggtcacttggggggtaaagnaaaggcattgggggtaggtttgggcctaccg

SEQ ID NO: 427834 - DNA, 487 bp, Homo Sapiens
  misc_feature (223)..(223): n is a, c, g, or t
  misc_feature (291)..(292): n is a, c, g, or t
  misc_feature (360)..(360): n is a, c, g, or t
  misc_feature (375)..(375): n is a, c, g, or t
  misc_feature (386)..(386): n is a, c, g, or t
  misc_feature (408)..(408): n is a, c, g, or t
  misc_feature (475)..(475): n is a, c, g, or t
tctttagaatacagtgagaaagtcgtgtcatttaacttggctttttgaaaggaatttcagaaattattttagtttctggaataagcataggcgtaaacacacagattcagtatatgcctgaagcttgttgatttctcctagatatttaaaaacagaaccgcttgttttgtcctttttcacttggctcacaaagtgacatggcaacagactatgtactaatttnctggggtttcagcactgaaccaagaagatggcagaaaaatggatacaatcattaaagaaattataggnnctaaattaagtcaacctaacagtgaggctgattttcataaagggcctgtgtccccaagggtaagggantgcatccttcccatncatgggaagtncaatgggatgggcacctaaacnagggggtccccagtgctacaggattttattctaacattatcccgacttgcccgttcccttaaaagtntaacattgtgtt

SEQ ID NO: 427835 - DNA, 370 bp, Homo Sapiens
  misc_feature (37)..(37): n is a, c, g, or t
tggaagggagtacctggcacggattttgcacctggangatgcttgacaccttaggctgcttctgtggaagaggaggtgaggaccctgtcctgggagcaggtggttctacgaagcccagctgtgggggtctatgaagcctctcctgagttggtctcggactcatcttcccagagccatgggtctttctctatctctgtgatacggggttcagtgcccccatcccagcaggaccccaagtctacactgggcagcaaccctgagccagtgataataatgacttatggcccctgtttacggagcatttcctgtgcacgttgcatatggggcctaatcttgttatgttccttcaacaacttttgtgagagttagt

SEQ ID NO: 427836 - DNA, 320 bp, Homo Sapiens
  misc_feature (179)..(231): n is a, c, g, or t
  misc_feature (260)..(260): n is a, c, g, or t
  misc_feature (264)..(264): n is a, c, g, or t
  misc_feature (283)..(283): n is a, c, g, or t
  misc_feature (294)..(294): n is a, c, g, or t
  misc_feature (303)..(303): n is a, c, g, or t
atacctccttgctttaatctaggggtagttgtgacgatcatgtggaattattttacaaattataaagttctatacaaaagctaagaattactttttaggtgaagagaaacaaactgttgggttagaatatactgtgggtcatatttgaaattaggtcattaacacggggctgtcatgannnnnnnnnnnnnnnnnnnnnnnnnnnnnnnnnnnnnnnnnnnnnnnnnnnnncattaactcattttctcttttatttagcntttnttgtgtgtttgtgtggggntttgttgaacnattttaacntctgcaactataggggg

SEQ ID NO: 427837 - DNA, 486 bp, Homo Sapiens
  misc_feature (432)..(432): n is a, c, g, or t
  misc_feature (440)..(440): n is a, c, g, or t
  misc_feature (465)..(465): n is a, c, g, or t
cggcacagggcggtctgagagtcccttgtggcacctcgtgggcattagcaaagccgtcctgatcccaagggacagggcagggaaggtgagtagtggtccgagagtcccttgtggcacctcatgggcatcggtcaaagccgtcatgaccccgaggatgtgccaggagtcagggcctctcctcctacgtgggcctgaaggggctgctgtaattcaggagggtaggcttgggatgaagggtctggaatttctgtctgccagcattagcctaatgcaaatcttttcctattcttttctattgagttaaaggtcctggtggcattgtcgggtggggcacattgctgttgtcatagggctgtttgccttgtgtttcgtggagccccatttgctggagcttaacaacgtcactctggttctcagcttcccacgggcctnaaccatgnaccattcctccctggcaggcattgngtttcctgttcaccatttgaa

SEQ ID NO: 427838 - DNA, 318 bp, Homo Sapiens
  misc_feature (140)..(140): n is a, c, g, or t
  misc_feature (170)..(170): n is a, c, g, or t
  misc_feature (218)..(218): n is a, c, g, or t
  misc_feature (242)..(242): n is a, c, g, or t
  misc_feature (270)..(270): n is a, c, g, or t
  misc_feature (291)..(291): n is a, c, g, or t
  misc_feature (308)..(308): n is a, c, g, or t
cgagtggcctttacttttataaaggacatttgtacacaatgtcgcacaataaacaacgtcaagtctgggcacacattacccacatctcagtcaaaagaaaagggtggcctggcccagccccgaagtattttctctgaganataggtttgggtgtaaaggtcccacgcgtncacccacagtccgtggcaccttcctctggtgcaccgtgggcaggacgntttattcttttccctaggggtctncagcaaactgcaaggggctacaatatgnatatctagagttaaaaaccantcccaaggccttagaanccatgacccg

SEQ ID NO: 427839 - DNA, 543 bp, Homo Sapiens
  misc_feature (328)..(328): n is a, c, g, or t
  misc_feature (367)..(367): n is a, c, g, or t
  misc_feature (432)..(432): n is a, c, g, or t
  misc_feature (482)..(482): n is a, c, g, or t
  misc_feature (487)..(487): n is a, c, g, or t
tcggcacaggcaaaatgcaaggccaattactaccccttttctgtctgcgttctaccatcctttgaatgagccacaggtgggggtgccctgggtgactgcatgtgggtggctcaaggacacagggaaatggagggggaagccctgactaacaggtccaaatgttaacttccatctggttctctgtgggctaagaggaggcacctagtctaaagaagctgccagcagaagatgccctggcagcctgaccacccacaagtcctgacactcggatggccgcagtccactcctcctgcaggagacaggacctactgtgttagagtctctggtngcaggtgctcgggagatggggcatcacctgttcgttgtnaacacccttttgcaaagaccgggagacatggtgagggatggcctgaaaagttcaagttcaacttntatttccatttctcctgggggacgtgcaatgttgcttttaaggggcagcntagtnggtaggctaccaatgtttttggaaggttatttcaaactgaaaaacgttatatttga

SEQ ID NO: 427840 - DNA, 292 bp, Homo Sapiens
  misc_feature (147)..(147): n is a, c, g, or t
  misc_feature (222)..(222): n is a, c, g, or t
  misc_feature (253)..(253): n is a, c, g, or t
  misc_feature (262)..(262): n is a, c, g, or t
tctttacatttttatagagagcttcaaacattttagactatctttacttctgttttcctgttattcctagtacctctccagattagacaagatgatattaaatatttccatcttacagatgagcaaattcagacttagagacgatanggtactagccccctggaaaacaactgcactgaacctaggtcctttatttctgaacaagacaggcatcgtgttgancttcatgaagaagataatctaataattgaanatacatcanatacaaggacaaataagagacgctgggggg

SEQ ID NO: 427841 - DNA, 369 bp, Homo Sapiens
  misc_feature (104)..(104): n is a, c, g, or t
  misc_feature (133)..(133): n is a, c, g, or t
  misc_feature (270)..(270): n is a, c, g, or t
  misc_feature (286)..(286): n is a, c, g, or t
  misc_feature (310)..(310): n is a, c, g, or t
cttgtgctcacatgtggcaccatccttggttgccctcctggagaaggcattcacggcctggggtgggatggctgggctgtagtttagcctgggccttggccagntgggggacagggcctgtctgcatgaagtngaccggagacctgcagaccccaggaaagtgtcactatgggagggaggggcaggcagtcagtggctggtgcatggggtgaagccaccatgggcttggggtgaagagccggcagaaggggaccagtcacagggagtgtngacagtcaggggtttnctttctgctcctgagtttggggtnttccagcgttgaacccacagcctggttcttgggccagggcacagttgccaggggttccc

SEQ ID NO: 427842 - DNA, 419 bp, Homo Sapiens
  misc_feature (90)..(349): n is a, c, g, or t
  misc_feature (356)..(356): n is a, c, g, or t
  misc_feature (370)..(370): n is a, c, g, or t
  misc_feature (380)..(380): n is a, c, g, or t
  misc_feature (406)..(406): n is a, c, g, or t
ctttggaaggctttccaagcattcaaaggcacttgggtgttgtgctctaagtttctggtcactgcagccccatctgtattagggagcacnnnnnnnnnnnnnnnnnnnnnnnnnnnnnnnnnnnnnnnnnnnnnnnnnnnnnnnnnnnnnnnnnnnnnnnnnnnnnnnnnnnnnnnnnnnnnnnnnnnnnnnnnnnnnnnnnnnnnnnnnnnnnnnnnnnnnnnnnnnnnnnnnnnnnnnnnnnnnnnnnnnnnnnnnnnnnnnnnnnnnnnnnnnnnnnnnnnnnnnnnnnnnnnnnnnnnnnnnnnnnnnnnnnnnnnnnnnnnnnnnnnnnnnnnnnnnnnnnnnnagggctntgggttaccactgnctggactatncacctatggttcacccaaattccctnggggttctacaat

SEQ ID NO: 427843 - DNA, 262 bp, Homo Sapiens
  misc_feature (105)..(105): n is a, c, g, or t
  misc_feature (112)..(112): n is a, c, g, or t
  misc_feature (155)..(155): n is a, c, g, or t
  misc_feature (159)..(159): n is a, c, g, or t
  misc_feature (247)..(247): n is a, c, g, or t
gctaataataattagattctgcagattgtgtcttctggccagaataatttgaattaagggggtttgtgcaattgagtttccagcatcctcccttttttcctaganaaagctngctccttggggcattttctccccctctatgaggcgaaaccagntctnggatcgtggtcctctctatggcagcccaaacatgcttttccacagccatgaccctggcattgcacaccacatgggaaccagtcctggnctgagaccgcagttg

SEQ ID NO: 427844 - DNA, 295 bp, Homo Sapiens
  misc_feature (59)..(59): n is a, c, g, or t
  misc_feature (162)..(162): n is a, c, g, or t
  misc_feature (169)..(169): n is a, c, g, or t
  misc_feature (205)..(205): n is a, c, g, or t
cattttaaaaattcatcaacgatttgtgtgttgtcccctctgtgctaagctctgttcangccactgctgctgttttgtctttccagttgcccatccacattatatttcagatgctgaaacaacgtgccatctgccatccctctcaagagtacaggagtcagncaaatanctagggcagactggggtgggcccccagtgaaacccnacctccgagctgaagacagtttgaagcctgaaagccaagttacaagttaaatcctcagactaggattgaggaacttgtcttccatttggg

SEQ ID NO: 427845 - DNA, 409 bp, Homo Sapiens
  misc_feature (192)..(192): n is a, c, g, or t
  misc_feature (262)..(262): n is a, c, g, or t
  misc_feature (350)..(350): n is a, c, g, or t
  misc_feature (359)..(359): n is a, c, g, or t
  misc_feature (372)..(372): n is a, c, g, or t
tctgcgatgctgacctaaccgtgacctcttaacctttattagctcatcagaagagctactactgggcaaaaatagctgtggcttccggaaacttttattgaaactctaaatctcctggcaataactttcaaaagtcatgattcaggccagcagtgatatttgaaaatgggaatcacaagcaagtctcctggntacaaagatgctcttgctgccaaaaagggaatgctcagctttgacatttatgacaatctgtgtttttccngttacttagtcttttgccatcattgactgtgggaaagggcacttgaccctcattctgttcctccctgggggaatttctcttccttcanggtttaacngggttctgtcccntttccagtttttcattcaccggggatctacagcatgt

SEQ ID NO: 427846 - DNA, 353 bp, Homo Sapiens
  misc_feature (15)..(15): n is a, c, g, or t
  misc_feature (203)..(203): n is a, c, g, or t
  misc_feature (208)..(208): n is a, c, g, or t
gggattgtaactttnagcttgtgatccccagtattctggggagatgttgtgaaaggcccaagtgttccaggcaggagagctgagagagctgagtgtccatttttccttttgggacacagtccccaaacactgtttgtttctcactgccaagaggaactacacatggtcttccaatatccctgccatggcattaaagccaactnttctntccccctgcccacagatggaggagtaggagagaaaagaaggccacaataactacatttcagtccgaattccaaatctttcttagagcttaagttggttgttatctccttgttcctgtttggatgaaggttttattttctagggtt

SEQ ID NO: 427847 - DNA, 139 bp, Homo Sapiens
  misc_feature (43)..(43): n is a, c, g, or t
  misc_feature (80)..(80): n is a, c, g, or t
  misc_feature (98)..(98): n is a, c, g, or t
aggaaggggcacctaattttccgagagcctgaccaccagcccnttctgttctgttccttccttctaacacctgcttcccntgattaccttaaatcacntacctaccttcttggggatgtacctgatttcttcctatctt

SEQ ID NO: 427848 - DNA, 586 bp, Homo Sapiens
  misc_feature (46)..(59): n is a, c, g, or t
  misc_feature (373)..(373): n is a, c, g, or t
  misc_feature (445)..(445): n is a, c, g, or t
  misc_feature (460)..(460): n is a, c, g, or t
  misc_feature (494)..(494): n is a, c, g, or t
  misc_feature (518)..(518): n is a, c, g, or t
  misc_feature (529)..(529): n is a, c, g, or t
  misc_feature (543)..(543): n is a, c, g, or t
  misc_feature (558)..(558): n is a, c, g, or t
tcggcacagggacttggactactctgaaacattcagaactctgtcnnnnnnnnnnnnnngacctctctcctcagcacctctcccacttgggcatcagtcttggcttcctctctacttgctttcacttgctccttgtggcagagattgccctcagcagatcccttcccttaggttccttgctgtcaagtggaggctagggagcgagattatggccaatagaatgtgggcggaaccacagatctgagcctgaggaacatcccacaggaccctgagctcttcctccagctgctgcagtggccttggaagccatgtctgttctagaagtgtagctacagatggagaaggcccatgtgctagctagtctccaaagatnggcgtattcaggcctttcttgcgttgctattaaaggaaatattttgaggttaagttaatttttataaagganaaggagtttttgttnttgggcttcattgtttctgcggggtttcacaagnaggcatgggtgctgggcatcttgnttggggctttnagggagggctaggnagttttacattcatngagcagggacattcatgttggccaagca

SEQ ID NO: 427849 - DNA, 322 bp, Homo Sapiens
  misc_feature (61)..(61): n is a, c, g, or t
  misc_feature (90)..(90): n is a, c, g, or t
  misc_feature (210)..(210): n is a, c, g, or t
  misc_feature (222)..(222): n is a, c, g, or t
  misc_feature (254)..(254): n is a, c, g, or t
agcataatagccttctcaatttatcaatttcaaaaaaatgaaacagtattccttaactatnctgaaagatacgacaattagcacagtggnatctcccactccccagcccaaacctaacctaatcccccatgatattgttgactttcaggaaattttgctatggcatgttatcattgtgttgacatttttaaggttgagtcggtatttatncaattgtttttnccttctggcttatttctccaagaaagattatncaattattgaagctgggtatctttatacttcaacctctctatttctgggagccctcactgattcatct

SEQ ID NO: 427850 - DNA, 278 bp, Homo Sapiens
  misc_feature (135)..(135): n is a, c, g, or t
  misc_feature (213)..(213): n is a, c, g, or t
tgcatttgcaaaaataactcctacaagactttcagaagtctaggaaaattgtggcttttggattattacattaccaaatttgtggagtttaataggtttcaactgtcaatgtgcattaaaatttcctgggagcanggtgatgggctttttaaattctgatgtccaggtgtgtgctccaggcctactaaatctctggggttgggactcttcgtngttttttaagttgccataattccaatttttggcccaaattgtgaactactcaccaaaggcaaaac

SEQ ID NO: 427851 - DNA, 510 bp, Homo Sapiens
  misc_feature (291)..(299): n is a, c, g, or t
  misc_feature (379)..(379): n is a, c, g, or t
  misc_feature (411)..(411): n is a, c, g, or t
  misc_feature (433)..(433): n is a, c, g, or t
  misc_feature (464)..(464): n is a, c, g, or t
  misc_feature (477)..(477): n is a, c, g, or t
acttctttccctttcttagaagaaaggggaagatgacacagtgtcttccacctaaagactttctcctccccacagccatggttctgcgatttacattaagggctgtagcaggttggagtaaatggagcaggtttgcaattagttttcaaagtacttatctcattaaagtaaatgaattattgatttagagacactcatgcttttagtgagtggcgtggtgccatcctcactctgggcttcagctcccggagccggtggccggcacaagcaaacttgctatgtgtagggaannnnnnnnnaattttaatatttccttctcgttatttagctttgtaaattaaagtgggattcacatggaggaaaggaagggttcggtttnatggggattaggaagcccccaggaggacaagncgtggccttcccttgcagggangggaggcagagcttaaaggtgggggagtttnattgaagggttcnttgtaccttcccaacaggttgtatggaaggttt

SEQ ID NO: 427852 - DNA, 382 bp, Homo Sapiens
  misc_feature (372)..(372): n is a, c, g, or t
ctcaacttgtgccctaacaaacacagaccagaagagcgtgcagttgcaagatttcatagagtgaaaacacagctcccatacaatgagaggggacccaaagggggttgccactcccaactcgaatgcctggggtttatatctcaatcattgtccctccccctgtgctctcagatgataactgatttgactatttctttacctcctgcttttagcctaatttgtattttagtgagccctctacctgattggttgggtgtgagctgagttttacaagtcccgtgtttaaaggtgggtgtggtcaccttccccagctaggcttggggaattcttagttggcctagggaaatccagctagtcctgtctctcaatttncataagagga

SEQ ID NO: 427853 - DNA, 407 bp, Homo Sapiens
  misc_feature (341)..(341): n is a, c, g, or t
  misc_feature (374)..(374): n is a, c, g, or t
  misc_feature (380)..(380): n is a, c, g, or t
  misc_feature (391)..(391): n is a, c, g, or t
attcggaacgaggggctatctgagttcagcccttggataatcttttgtggggaaatctgatcaaagagattaaaaaggagcaggtaggctgctttccctagcccacctcaatcttggacattccaattcatgaattggaattggaattccaattcataccgagtgttcttccccactgagcttcccagctgagctccctgtcgtgggagacccaggaccggcacacggcccctgcctcaggaagctggcatgtgcctgggaccccctgggtgcgagggccctacttggtcctatcctgccggggactgagactgtcccatattctacttcagctgtcactngccgttcccacctattttaggagcctaatcttncagggngtttgcatggngtcctaaaatgggatg

SEQ ID NO: 427854 - DNA, 409 bp, Homo Sapiens
  misc_feature (68)..(68): n is a, c, g, or t
  misc_feature (184)..(184): n is a, c, g, or t
  misc_feature (209)..(209): n is a, c, g, or t
  misc_feature (211)..(211): n is a, c, g, or t
  misc_feature (213)..(213): n is a, c, g, or t
  misc_feature (311)..(311): n is a, c, g, or t
  misc_feature (391)..(391): n is a, c, g, or t
aatgactgaatcagcaaactcacatataaaatttgggacaatccaaaactttttgagaaacaactttnagactcaacacacaatgggtgtacgtatccttttttagcacatggctcatgtagaggccattttatctgtgatggatttaccacagggccacagtgcttacaaagaagagagaganttgaacattctaaagcgcgtttagnangngaaggtcctgcctgggcactggagttctgggtgggactttgttttcctgcagcatagtaaggtactgacagattcagactttgggtgcattcccgggncatgtgggcttccagcagaaaggtggggtcatttccaaggcagtcgaaggcatttcgtctgtgcgacacaatttaggggnccttccagatcctttttc

SEQ ID NO: 427855 - DNA, 402 bp, Homo Sapiens
  misc_feature (79)..(79): n is a, c, g, or t
  misc_feature (296)..(296): n is a, c, g, or t
  misc_feature (323)..(323): n is a, c, g, or t
  misc_feature (334)..(334): n is a, c, g, or t
  misc_feature (353)..(353): n is a, c, g, or t
  misc_feature (366)..(366): n is a, c, g, or t
agttgacctgtagtaattcacagaaggtagcaacactggcttcatttaacacacacacaatctgaaaaatactaaacangggaaggccagggggcagaggcagccattctcacacactgctaacagcagtgtgaacttgactcagttcttttgaaggctaatccatactgagagccataaatacttcctacactttgacctactctcctaaggaaataattcaaaagaagaaaaacaaaccatttacaaatatgtttaataggcagcatttctttaaagaaaaacaaagtttcaantgcccattaataattatgttttaacanttgggtacacntttaaataggacaaagggntgcgggagaacantgggttttaaattaaggtgtttttggggtattattt

SEQ ID NO: 427856 - DNA, 507 bp, Homo Sapiens
  misc_feature (404)..(404): n is a, c, g, or t
  misc_feature (438)..(438): n is a, c, g, or t
  misc_feature (469)..(469): n is a, c, g, or t
  misc_feature (480)..(480): n is a, c, g, or t
  misc_feature (489)..(489): n is a, c, g, or t
ggatcaagctagtatctgaagccagcaagtctcagaggtttacccaagacccttgatgtgttacctgggtattgctgctggcttttcagggcctaagagctcttcagttagcagatgatgaatactgccagcacttgttcctttccttcaagacagcaggctctcttctggtccagggtgtgtctgggagctagggcttggaacaggggcctcttgactctgttcagcggcctaccctgccatggctgggctagtatccaagaagtaggacaaagttctccccactctcccttctcctctcctcaagtggaaggaagtggtctcttttgaagcttcaagctgtacagtttggggctaggggaagggtgatgccagcactcccttggcttccccagctggtattntcagtatgttgtgtgctgcaccccaaattacccnacagttacaatgtttctggggctaactcagntgagggattgnctgtgagtncagttctttatgggctag

SEQ ID NO: 427857 - DNA, 489 bp, Homo Sapiens
  misc_feature (382)..(382): n is a, c, g, or t
gttaccaatctgaagtgggagatggtgaaattgagaggtcagatgatgtgctccaggccaaaaggttgattatgagaccctgctgggccagaccccaggccacaatccaggtcctgcttccattcatggccccagtaatgagtttgccacatggcagttgattccccactccacccctggttcgatctttttattttagttctcttcttcagaaagctttttatagaaatataaagccaaagttcttagctttgaatccaaaggtgaccagagtctccttcataaataagcagatcccttttccactgtgttagaaataaaagctcttttggtccgagctcaaggttggatccttctcaggttgtctgtaatgtgggatccnggctaagtcttgggtctgaaactagacctgactcaaatcccagcaggttaattattcttcccactgacctgccttcctgctagagatgttagttttgtatgtgaaga

SEQ ID NO: 427858 - DNA, 398 bp, Homo Sapiens
  misc_feature (158)..(187): n is a, c, g, or t
  misc_feature (324)..(324): n is a, c, g, or t
gatcacagctcattgtagcctcgacttcctgtgctcaagtaatcttcctacctcagcctcccaagtagctagggctacagatgtacaccatcatgcccggctaatttttttaagtaaaggtggtattttgccctgttgcccaagttgttcttgaactnnnnnnnnnnnnnnnnnnnnnnnnnnnnnngtatgagccacctcacccagctctgtttttatatttctaactcacttctcctatctccaacactcctttaaaggcagcttaatttacaagcttgggcattgaatcacaagaggagccctatacttatggactgaggntttagttctgaaaccaacatcaggtccaacttactttattttaacctccacaaggtattcccctgtccatcctt

SEQ ID NO: 427859 - DNA, 107 bp, Homo Sapiens
  misc_feature (28)..(28): n is a, c, g, or t
  misc_feature (41)..(41): n is a, c, g, or t
  misc_feature (47)..(47): n is a, c, g, or t
  misc_feature (52)..(52): n is a, c, g, or t
ggcacggccggaggccccaaacggaaangggccgaggaggnggggangcccngcacccagcaaacggcccgggcagggcaagagaaccaggaggcagagcgggaggg

SEQ ID NO: 427860 - DNA, 387 bp, Homo Sapiens
  misc_feature (62)..(102): n is a, c, g, or t
  misc_feature (230)..(230): n is a, c, g, or t
  misc_feature (319)..(319): n is a, c, g, or t
ttcactcagcaccatatcttgaaaagaccatctgtcccacattgagttgcagagtgctgggnnnnnnnnnnnnnnnnnnnnnnnnnnnnnnnnnnnnnnnnntgcaccatatcttgaaaagaccatctgtcccacattgagttgcagagtgggctttctggtgcctcacgggccctggcggcgcgtctaccctggcatcaccaccacagcgtgcccacgacgggcagcantagaagccttgatgtctgcatctgtcagtcctccagctttctccttcctttccaagatcaccttaggccatgtgtaggggacccggggnttttattttccggggtttctggatggccctgacatctgggggggtttccatggaccctggcaggggaa

SEQ ID NO: 427861 - DNA, 421 bp, Homo Sapiens
  misc_feature (220)..(220): n is a, c, g, or t
  misc_feature (354)..(354): n is a, c, g, or t
  misc_feature (404)..(404): n is a, c, g, or t
taccctgaagagtaatcacctgtttacgtgtttgcctctgaggagactctctaagtccctcatggtgatataccttttgctggctaatagcattgattctggttaataatgattgataaatatatgtaaaaaatgaataaatttttaagaccaaaaatttgccataattaagaactctgagaatctcggtctgctgggcacaggcaactagggaacagtnggttgcagtccagggtacatatatggtgcaatgggattgcaggaagaaacaattaaaatttgtgctggggagtctagggaaggcatggaggatgtgacatttgaacttagatgtgggaggtagggcaacaggtnttgacaccctttgggtcccacattcaggcctaactaatggatttatacantatcttccactggaagg

SEQ ID NO: 427862 - DNA, 151 bp, Homo Sapiens
ttaagcgatcctcttacctcagcctcccaagtagctggaattacaggtgcatctcaccacgcccagctgatttatttattttttgtagagacagggttttgctatgttgcccagggtggcctcaaactcctgggcttcaagtgatccttcc

SEQ ID NO: 427863 - DNA, 352 bp, Homo Sapiens
  misc_feature (18)..(18): n is a, c, g, or t
  misc_feature (22)..(22): n is a, c, g, or t
  misc_feature (37)..(37): n is a, c, g, or t
  misc_feature (47)..(47): n is a, c, g, or t
  misc_feature (66)..(66): n is a, c, g, or t
  misc_feature (309)..(309): n is a, c, g, or t
  misc_feature (334)..(334): n is a, c, g, or t
caaataacagtcagtttnactncttctgaagtaaagncatttttggncaaaggcaagagcttgagnaaaaagagatgagtaagatttgggtacatttttaaagagtcttgtgattatagtgtgtagtttatggtgagatttggccgggcaggaggtttagctctggtagaagcaaaagtctgcagtcccatcagggtgaagagtggtgatggttaacaggcatggaaaagcacaaggtgttaggagaacgcaaaggcaacagatgggaggtgtgactcattacttaaatgccacagactccttagaatnaaaatctagcctttatatccctatngcaaaagattctggactt

SEQ ID NO: 427864 - DNA, 343 bp, Homo Sapiens
  misc_feature (19)..(19): n is a, c, g, or t
  misc_feature (147)..(204): n is a, c, g, or t
  misc_feature (207)..(207): n is a, c, g, or t
  misc_feature (254)..(254): n is a, c, g, or t
  misc_feature (278)..(278): n is a, c, g, or t
  misc_feature (284)..(284): n is a, c, g, or t
  misc_feature (294)..(294): n is a, c, g, or t
  misc_feature (306)..(306): n is a, c, g, or t
  misc_feature (324)..(324): n is a, c, g, or t
tcagatttgaatccaggtngcctggctgctgagtgcatggtttgagtcactccctgtcccccagcttcctctggttccatcactctgggttattttcctccttgaagttatcagggattgatactatcctgtgtttcatttgcttgnnnnnnnnnnnnnnnnnnnnnnnnnnnnnnnnnnnnnnnnnnnnnnnnnnnnnnnnnnctnccacattggcccacgtctggagagcctgtggatcatggtggatacancatggatttgttgaatgaaggcgncccctncaagccaggncctcaccctggnttcttgctgttggcccangggtgtcctgggagcacaa

SEQ ID NO: 427865 - DNA, 251 bp, Homo Sapiens
  misc_feature (18)..(18): n is a, c, g, or t
  misc_feature (25)..(25): n is a, c, g, or t
  misc_feature (54)..(54): n is a, c, g, or t
ggtattcatttaattcancaacttnttattgagtttaggaccaaatgccagcanttcagccaagttctaaagacacacatttaaattaaacagttatcttcaaggagcttgggtgtctgcagttcagtagacacttataacaccaacagtaccattcatttgctgtgccctctgccgggttgctcttctcccagtgtttcatatggctggctacttcttatcctttaagatctctttttaagattctttct

SEQ ID NO: 427866 - DNA, 323 bp, Homo Sapiens
  misc_feature (19)..(19): n is a, c, g, or t
  misc_feature (45)..(45): n is a, c, g, or t
  misc_feature (58)..(58): n is a, c, g, or t
  misc_feature (65)..(65): n is a, c, g, or t
  misc_feature (72)..(72): n is a, c, g, or t
  misc_feature (92)..(92): n is a, c, g, or t
  misc_feature (104)..(104): n is a, c, g, or t
  misc_feature (128)..(128): n is a, c, g, or t
  misc_feature (144)..(144): n is a, c, g, or t
  misc_feature (189)..(189): n is a, c, g, or t
  misc_feature (220)..(220): n is a, c, g, or t
  misc_feature (224)..(224): n is a, c, g, or t
  misc_feature (254)..(254): n is a, c, g, or t
  misc_feature (256)..(256): n is a, c, g, or t
  misc_feature (287)..(287): n is a, c, g, or t
  misc_feature (294)..(294): n is a, c, g, or t
aaatattcaaacagctttncattcttggaataaactgtactacgnaacaatgcattanccttttnatatatngctggatttgctagtatttngttgaaaatttngacaactatacttacgatattggnctaagttttttccttngggatcatgataatgtgagcctcatagaataagttgagaagtgtnccttatttcctgaaagaaattgtaggaattngggnattatttatcccttaaatgggtaggaattngncaatgaaaccatacggggcccaggaggtttnctttggncaaaaggtttaaaattacaaatcccaatt

SEQ ID NO: 427867 - DNA, 426 bp, Homo Sapiens
  misc_feature (247)..(247): n is a, c, g, or t
  misc_feature (330)..(330): n is a, c, g, or t
  misc_feature (355)..(355): n is a, c, g, or t
  misc_feature (385)..(385): n is a, c, g, or t
  misc_feature (392)..(392): n is a, c, g, or t
  misc_feature (406)..(406): n is a, c, g, or t
ttatacaaattaacacacagtaccaccatatatagtttaaggacacagacatgtctatagaaaattgatttagaagccggagtcagaagcagtgaactcggtccacatgtagggatagggttaaagctgaagagagccagagacagatgagacgcagagtggaacatcacttacgcaaatcacacacagcaccacggccagcatgcgattttgagggtacaaatacatctaagtgaacacatcagancacatgttaagtgtgcttgagcagctgtccatggttgagagaaggaagttgggagacacgaagggagtaaaataaaacgaganaggcttcatgtgaggggaaggactngggaaggacttcacgggcacacttaagggncaggggnacatgagggtctcnacgccttttactggggggtt

SEQ ID NO: 427868 - DNA, 485 bp, Homo Sapiens
  misc_feature (66)..(66): n is a, c, g, or t
  misc_feature (115)..(115): n is a, c, g, or t
  misc_feature (118)..(118): n is a, c, g, or t
  misc_feature (121)..(121): n is a, c, g, or t
  misc_feature (135)..(135): n is a, c, g, or t
  misc_feature (154)..(154): n is a, c, g, or t
  misc_feature (183)..(183): n is a, c, g, or t
  misc_feature (189)..(189): n is a, c, g, or t
  misc_feature (256)..(256): n is a, c, g, or t
  misc_feature (281)..(281): n is a, c, g, or t
  misc_feature (323)..(323): n is a, c, g, or t
  misc_feature (375)..(375): n is a, c, g, or t
  misc_feature (445)..(445): n is a, c, g, or t
gcgatgaactttaataatgtgtcataaagagtcacactcatgaacacagaagggaagttaagtganctgggatttttgaacacatttctgaatactggtctggaatcactatggnggnccntttaacgtgatccngcagaaagactcatttggngacagagccggactcccggagcccctccngggggnactcactccacgcagagctcagactcggtcccacactcctgatccctgatccatcacagcccacctnttgggccactcctgtgccattgggnctttcatggggataactacagttaagggcttccttacaagtnttcctggggaacagttaatacctccccttcttttatgatgaggaaaatgggncaatgattccctcaacagagaaggccagtaggcacagtggaaatcaaggagcccgggacatggaaaagtntttccccaggttccccgcagtgaaatccccttaaatgggg

SEQ ID NO: 427869 - DNA, 454 bp, Homo Sapiens
  misc_feature (311)..(311): n is a, c, g, or t
  misc_feature (313)..(313): n is a, c, g, or t
  misc_feature (378)..(378): n is a, c, g, or t
  misc_feature (420)..(420): n is a, c, g, or t
aaccaatgcgtaggatcttgcattattttcttgacagtgtaatttatattttccccagtaaagggttattttggtcaggcatatttgcaaagtgctgatattcaactttgctctggggtttttaatgttaaaaatgtgtatttattcatcaagtgtttattgagcctcttgctgtgttccaggccttgttcaaagctctgggcatctagcaatgagtaagatagtcaagatctgtgctctgtccacgttctcttggagcttacattttaagagtaagaaacaatttaacagatgataaatgcaatgaacananatgtaacagaatgtaatagagatgggggtgggatgaacccactacttttggggttggtggtcatngaaggaaagctttttccaagcatttgaacccaagtttgcagntgacaggacagagccaaccatggcctgattttgg

SEQ ID NO: 427870 - DNA, 220 bp, Homo Sapiens
  misc_feature (124)..(124): n is a, c, g, or t
  misc_feature (151)..(151): n is a, c, g, or t
  misc_feature (174)..(174): n is a, c, g, or t
  misc_feature (181)..(181): n is a, c, g, or t
  misc_feature (188)..(188): n is a, c, g, or t
  misc_feature (201)..(201): n is a, c, g, or t
acaagccccagggaccctttatccgacttccttccacctgggggactccctccacgggcccttgctttaagggcaaatggcgagggcaccagaacacagggaggccatccgtacgtccctgctngcaaccatgcggccccccagctcactnccagcagccaagacgaagggggntcctggnctgcccnctagggcaggcgnctctgattctctccaccga

SEQ ID NO: 427871 - DNA, 229 bp, Homo Sapiens
  misc_feature (106)..(106): n is a, c, g, or t
  misc_feature (128)..(128): n is a, c, g, or t
  misc_feature (152)..(152): n is a, c, g, or t
  misc_feature (213)..(213): n is a, c, g, or t
atcctgagctgttacactataaacacagtggcgctctctgtcattcttggaaaaactcctaaattcttaaagccttcctttgcaaacggtaatggggtttgctctntgtattatgtggtggtggttgnttgttgctgtgtagttttctgctnttttgactgactcccacctccatcctagttttggttggtggtcaagttgggagtttttcantgtatccttaattcac

SEQ ID NO: 427872 - DNA, 388 bp, Homo Sapiens
gaaacaagtctataaacagtagttgggttgccaacctagctcacagaagcacatttacccagaatagagataatatcattacatatattaaccatttccagattgattttggattactgatacgaggaggtagtctaacaccctgattcttgtggcaaaaccagtaggaaggccacataggagtccagggctagacgagatataagcaaggtaggcgccgtgcactggaaaggaggaatcattcagatacatatccagcagaagtggggtgaggggactgggaataaggggtgtcaaaggatgtctgataggcaataggataatgggggtaactcccataacaccggaggaggaggccaggatgtccaccaggaaggttccaaggagg

SEQ ID NO: 427873 - DNA, 356 bp, Homo Sapiens
  misc_feature (18)..(18): n is a, c, g, or t
  misc_feature (43)..(43): n is a, c, g, or t
  misc_feature (306)..(306): n is a, c, g, or t
  misc_feature (323)..(323): n is a, c, g, or t
actttaataataaatggncaggatggagacagaacaagatggnccaaatagaagacctccactgatcatgactcctcctagtttgttccaccaaattgaacaactatcctcacaaaaagcaccttgataagaatcaaaaatcaggtgagtgatcaaagtacctggttttaacttcatatcgctgaaagaggcactgaagagggtacaaaagacagtcttgaattgctgatgccacttctcccccatcccctgaggcagaggttgcatggcatggagaaaaaaatctgtgtgcttggaggagacagngcacagtgattctgggnctttgcattggaattcagtgctgcccagtcaca

SEQ ID NO: 427874 - DNA, 135 bp, Homo Sapiens
  misc_feature (103)..(103): n is a, c, g, or t
  misc_feature (115)..(115): n is a, c, g, or t
ccatactttatatttttaacctaagatcataccccatgggcagctacagagaaagcatgggtgaccgtgaactcgggttctgtgctcctgggttcagacaganttttaccactcngtccttttaaagacccacag

SEQ ID NO: 427875 - DNA, 413 bp, Homo Sapiens
  misc_feature (291)..(291): n is a, c, g, or t
  misc_feature (298)..(298): n is a, c, g, or t
  misc_feature (329)..(329): n is a, c, g, or t
  misc_feature (364)..(364): n is a, c, g, or t
aatagagaagagcagggaaagtagataggcactttcctatctttttgaaacctagtcacaaagaacatgggcattacccttgtcacacgcagggtattactgtttttattcattcaaaagttatttaacgagctcctactgtggtgagcaagtccagtggaatccaggcccttgctctgctattagagggatgagggcctttctcttcaaggggagattccctttccttgtgtcagccttacatagtcctttctgggtttcctaatggtgggaaccaccagggcagagttncaagatnggccaaggctttccttcccttgtttttgccnaaaattttcccaccagttattttaagaagtacagntgaatttcaacagcccacggggaggcatggccaatattcaccttggagg

SEQ ID NO: 427876 - DNA, 410 bp, Homo Sapiens
  misc_feature (217)..(217): n is a, c, g, or t
  misc_feature (235)..(235): n is a, c, g, or t
  misc_feature (336)..(336): n is a, c, g, or t
gattcggcactaggggatcccgccacaaatgataaagcaatacttggtcttgtacattataactttttggagttttgagaggcctcctagattatacagtacggtgaccacacattgtacataattgttggccccactcactagagactgaatagcatctttaaatattgtgtcgagccttaaaatattcacatgttcgtaatccattccaggggtngggcttgccaattcagtnggtggggaggagagaaatcccattcaaacatgcttgttttctaggaagcagggttcctcgttccctcctcttcatcttctttccacaagggacacaaaggntaaactgtattcacacagtgggacttccataaggggacagatgggttttatttgcctaggcgcgttgaatttta

SEQ ID NO: 427877 - DNA, 296 bp, Homo Sapiens
  misc_feature (105)..(105): n is a, c, g, or t
  misc_feature (118)..(118): n is a, c, g, or t
  misc_feature (146)..(146): n is a, c, g, or t
  misc_feature (189)..(189): n is a, c, g, or t
  misc_feature (214)..(214): n is a, c, g, or t
  misc_feature (260)..(260): n is a, c, g, or t
  misc_feature (275)..(275): n is a, c, g, or t
tgaaggagacaaagagagctttatttaaatttactgtgttagccatggaaagctttgcagagctaaatgataataattgatttattttcatcttattccttgagnattttcacagctnattttttccagatcaagttgtgataccnatttgtatgcacaaatcaaacaaaaatccataccaacttcccngtgaggtctttcagatgctataggnttaattttctttcttacctcaccacataaatatgctcaaaacatcnctctgttttcatggnatatcgtcatcatcatcttag

SEQ ID NO: 427878 - DNA, 188 bp, Homo Sapiens
gatttgcccatttgttgattgcaattaaggtagaattcacttttagataggtttttttaaatttaactctaacatgaatgctattgtttgaatgattacagcaattttatttggttctaaatggcttcattgttattttattaaggatgagagcgctcagatgtaatagttcttcagcaccatcttgg

SEQ ID NO: 427879 - DNA, 528 bp, Homo Sapiens
  misc_feature (48)..(48): n is a, c, g, or t
  misc_feature (405)..(405): n is a, c, g, or t
  misc_feature (452)..(452): n is a, c, g, or t
  misc_feature (490)..(490): n is a, c, g, or t
  misc_feature (507)..(507): n is a, c, g, or t
cttattcttgctgccggagcttggcacccagctctagactgtttcttnaagcattactgcagattggagatgtgtgtgagaggagcagcgctcagaaatagggcttgaggctcaagcagaaactgaagctctcattcaaatgaagatgctctctctaccgcacgatcggcagtgagaaaaggaggatgaaaatccttctcatcacaaagagcttgaaggaacccacgtccccagattagcaaccctagagttcatctgctcaggccgggaaatgtgtaagcttccttgatcagctccaggcctcacagcacgggagcagtgaccagtaaggaaacgtcactgctgtgctttctgttgggaaattgttcgaaaatacagtggaactggccagggcccagtagctcntgcctgttattcccaggcactttggaaaggcttgagggcagggcagntccttttggagggttcagggagtttcccggacccggcntggggccaacctgggtngaaacccttgttttgttactt

SEQ ID NO: 427880 - DNA, 370 bp, Homo Sapiens
  misc_feature (48)..(48): n is a, c, g, or t
  misc_feature (357)..(357): n is a, c, g, or t
caactttatttagactagttttgtttcaaactaacttagaagcaagancatgggttagaaattaggaggctgacagcttccactgaagcaatcaaggagcaacctagaaagtcctgaggtctccaggagccctgtccatggacatgtatatgtcaccaaagcaaaggcacgacaggcttctcgggacttgctttcaattagggtccctcgtaatgctaatctcactcgtaattgagtggtaaccaaatgtgactggttctcttctatttttatgcatctcagcctccttattttataaccattcctcattctttccatcgtatgttcccgggaccatggcaggtatgtaaaatggtnggtccaaggttgt

SEQ ID NO: 427881 - DNA, 477 bp, Homo Sapiens
  misc_feature (48)..(48): n is a, c, g, or t
  misc_feature (52)..(52): n is a, c, g, or t
  misc_feature (118)..(118): n is a, c, g, or t
  misc_feature (352)..(352): n is a, c, g, or t
  misc_feature (401)..(401): n is a, c, g, or t
  misc_feature (451)..(451): n is a, c, g, or t
gggagcaggcagatacacttcccatggcctgggacatggcccagtgtngccnggtctccctgaaggtgctccttgctcatctcttggcttcctgtcgtctgtcacacagccctggggnaatggatctggctgatgctgaggcccatggcaatggagccaggaagggggaggcagggtcaggaaagggtagaggcacacctctcagtacgctgaataccactgccagtctccctggcacccaccagaactggtccattgtcatcagagagtaaagtttgtactgggagttactgacaaacagttgctaatacaaaaagtcccatgtgaaattttctttgtttcaggccgaggnggcccagggacctggttcagagagtgcccaaatctggggcgtttccagnttccttagaacggaggaggcaccacgatgggattaccacagagatgaacnttttggggggcctttcagggagtttt

SEQ ID NO: 427882 - DNA, 154 bp, Homo Sapiens
ttttttaagggtaggggttatgacctcttcatgggctgggtccccattgcagaatgtaggtgcctggggaccttcaacttgcttcaattaaatggcttgctggaatgggatgactgggacaggtgggatgaggtttgcagagggacagctttta

SEQ ID NO: 427883 - DNA, 376 bp, Homo Sapiens
  misc_feature (91)..(91): n is a, c, g, or t
  misc_feature (93)..(93): n is a, c, g, or t
  misc_feature (221)..(269): n is a, c, g, or t
cttgtactccagggttgagatgaagtcaggggataaactgctgggttctcttttcaatcactcactgattaatcatgtaagctcgggagantnctttactactcctaacttgctcttctaggtattgaggaagtcattgtaccagaagttgatgctccggcttggattcaaacacctatcactaaaattgtttgagcacataccatatgtatatatacatnnnnnnnnnnnnnnnnnnnnnnnnnnnnnnnnnnnnnnnnnnnnnnnnntaaattatgtgtgtacttctgtactaaatattttatgtatactgtaatataatggaaacaaattttaataaggtgggattaaacataaatattaaatacaagcccta

SEQ ID NO: 427884 - DNA, 128 bp, Homo Sapiens
ttccatagtaatctccatactcttctctcttgaggttaggaattcaggacaagcctgggcaaaataggcaagacccaatctgtcacaaaaaaattaaaaacgtatctggggcgtatttgtgcacattt

SEQ ID NO: 427885 - DNA, 290 bp, Homo Sapiens
  misc_feature (66)..(66): n is a, c, g, or t
  misc_feature (105)..(105): n is a, c, g, or t
  misc_feature (132)..(132): n is a, c, g, or t
  misc_feature (141)..(141): n is a, c, g, or t
  misc_feature (263)..(263): n is a, c, g, or t
  misc_feature (269)..(269): n is a, c, g, or t
ggcttcttttttaaagaatcaatgtgagggaagggtgcagagccgcgttatttcagggagacattntcgcactccccctcccacgtgtaggtagcatctggggtncgtgtcgccctgttcgcagaccccatngagagacgntggtcttcggcagatggggctcctttcacggtttcagcctgcagtaaccctaccccgccggcgcagagacttaagaagctcaggggacagctgcgagtttcgaacaaaagcccttggcgctnggtccnaagttcagggacgtggagatt

SEQ ID NO: 427886 - DNA, 263 bp, Homo Sapiens
  misc_feature (128)..(168): n is a, c, g, or t
tgcttcatgagacctctggtatgatgagttggctcattacatttgcttttttaaaaggaaccctataagacattatcaagagacttttcaatccaatctatttgtgattgcatctttgttttcaaagnnnnnnnnnnnnnnnnnnnnnnnnnnnnnnnnnnnnnnnnngtgtggtcaaaattaactacttagagatactaggcaggatgtaactgagtcagctaatggaactcatgtgttgaagaaaaatttcttgacaaaga

SEQ ID NO: 427887 - DNA, 471 bp, Homo Sapiens
  misc_feature (13)..(13): n is a, c, g, or t
  misc_feature (398)..(398): n is a, c, g, or t
  misc_feature (432)..(432): n is a, c, g, or t
  misc_feature (437)..(437): n is a, c, g, or t
  misc_feature (442)..(442): n is a, c, g, or t
gcttattttaatnggtagggagctgtcacagagcccttcaaatgacaacagacagctgcttactttccctagtgcaagcactcaggaagaattagattacattctccttctttggggggtaacttttctctcaggcctcagaggtaattccagccactaaaataaataggaatttccctttccctaccaaaagatattaggagttatctgattcttaaaacactgcttttgaaagtaggctatcccaaatggattgaatttgggaaggtgttttgtttatctgggtacatgggatcagtgggcagtccgaaaagcccatatggaaaggaaggatgagggatcccttatctgggatggggaattttaatttaaaaataaacaaaaaggatgggctaccnttttaggggtaggcataggcctcttatgggccantttanttccntttcaagggaagaggttgatattaaatct

SEQ ID NO: 427888 - DNA, 472 bp, Homo Sapiens
  misc_feature (121)..(121): n is a, c, g, or t
  misc_feature (403)..(403): n is a, c, g, or t
  misc_feature (410)..(410): n is a, c, g, or t
  misc_feature (415)..(415): n is a, c, g, or t
  misc_feature (440)..(440): n is a, c, g, or t
  misc_feature (449)..(449): n is a, c, g, or t
attattcacgattatagcatctacaaacttccaaaaaatattgtcatagatatgaaaaacattcttcagtctccagacaatgcacagcatatacatgatttatgaaattcttacagtaatnctgcagccatggggcatttcgacaatattattgtcttcagaacaatcagtactacactgcttcccattaaaacccaagttacaattatagggcaaactttgaatgataaccacatcgtcaacttctcaaaagtaggtcctgtacttttttcaggcactaaccaaccaggaagggtatagggtatggccacaatttgccttctaggcatcttgtgagggaaaatactggggggccagttttaacttctttgggggggtttcaggttgggggtctaggggtacnggttgcngggcnggggccgcgatggggttccataccnggcattccncaaatcttggggaggtcggaggg

SEQ ID NO: 427889 - DNA, 260 bp, Homo Sapiens
  misc_feature (55)..(55): n is a, c, g, or t
  misc_feature (58)..(94): n is a, c, g, or t
  misc_feature (97)..(99): n is a, c, g, or t
  misc_feature (101)..(102): n is a, c, g, or t
  misc_feature (146)..(148): n is a, c, g, or t
  misc_feature (150)..(150): n is a, c, g, or t
  misc_feature (154)..(155): n is a, c, g, or t
  misc_feature (157)..(157): n is a, c, g, or t
  misc_feature (159)..(159): n is a, c, g, or t
  misc_feature (161)..(161): n is a, c, g, or t
  misc_feature (199)..(199): n is a, c, g, or t
  misc_feature (202)..(204): n is a, c, g, or t
  misc_feature (207)..(207): n is a, c, g, or t
  misc_feature (209)..(210): n is a, c, g, or t
  misc_feature (214)..(216): n is a, c, g, or t
  misc_feature (226)..(226): n is a, c, g, or t
  misc_feature (228)..(228): n is a, c, g, or t
  misc_feature (245)..(245): n is a, c, g, or t
ttattgaagtttctgtcgatatttacatatgatacacggtaaataacagagccgnggnnnnnnnnnnnnnnnnnnnnnnnnnnnnnnnnnnnnnccnnnanncctcgttaaaaatcgctgcgtaaagtcaggttaactgcggcggnnncncctnncntntnccaacctaagatgcaaactaaaagcccccgtccctccnttnnnccntnngccnnnacccgggggncnattttggttccgtgtanagcattgtgttacct

SEQ ID NO: 427890 - DNA, 213 bp, Homo Sapiens
  misc_feature (88)..(88): n is a, c, g, or t
  misc_feature (99)..(132): n is a, c, g, or t
  misc_feature (184)..(184): n is a, c, g, or t
cttaccagcctccccccaatgaggtaagaccgttttcaacaatttgctaatgctcttgtggcgcccggtgggggtcggaacctgagancccgaatcgcnnnnnnnnnnnnnnnnnnnnnnnnnnnnnnnnnnttgccactggacagttgatttattttccaagctgctctctctgcctgccgtncaagggacgcgcaaagggctagagaggtt

SEQ ID NO: 427891 - DNA, 119 bp, Homo Sapiens
aaaaagctacataatatgttatttatttgatattctggagaagtccaaacacacaaagtgattctgtatttgcgagaaatttaaggagatgatgaaaatgggtaaaaaatagatttaaa

SEQ ID NO: 427892 - DNA, 419 bp, Homo Sapiens
  misc_feature (30)..(30): n is a, c, g, or t
  misc_feature (404)..(404): n is a, c, g, or t
ttaattgactcacagtccagcatggctggngaggcctcaggaaacgtacaattatggcagaaggggaagcaaatatgtccatcttcacatggcggcaacaaggagaagtgcagagtgaagggtggcagcaaagcctcttacaaaaccatcagatttcgtgataactcacttactatcaagagaatagcatggagataactgcctccaagattcagttacctctcatcaggttcctcccacaacatgtgaggattatggggaactacaattcaagatgagatttggggtgggggacagagccaaaccgtgttcattccacctctggaccgctccaaaatctcatggtcctcacattttcaaaaacacaatcatggccctttccaacagttcccccaaagtttttnacactttccaggttt

SEQ ID NO: 427893 - DNA, 380 bp, Homo Sapiens
  misc_feature (218)..(218): n is a, c, g, or t
  misc_feature (225)..(225): n is a, c, g, or t
  misc_feature (244)..(244): n is a, c, g, or t
  misc_feature (254)..(254): n is a, c, g, or t
  misc_feature (261)..(261): n is a, c, g, or t
  misc_feature (288)..(288): n is a, c, g, or t
  misc_feature (321)..(321): n is a, c, g, or t
  misc_feature (331)..(331): n is a, c, g, or t
  misc_feature (342)..(342): n is a, c, g, or t
  misc_feature (347)..(347): n is a, c, g, or t
aaaataaaaagtcttaaaaataaatgttttctttgttttaaatctgggtcttcatgtatggagtatgcttataaagcaacaaattgggtaggacctgtacctttggaatcctgacatacatacatcacttaataaatcacactaccccagaaagaagcaggttattttggcctggctataattgaaaccaagatgaagagacttctgactttcagatnacccctnagtttcccaatatacattntgactcaggntgacttngaaaataatcagttttcattgtctttngtaggtgtgcaacaaaaaatgttattgcttcgnaaggaaggtncggcacagtgncccanatccttggggttggacataggtgaattttccct

SEQ ID NO: 427894 - DNA, 268 bp, Homo Sapiens
tttttgcctttatgcagaaacaggccttaaatcaactgtataacaaatcttcctctatcaataagtttggctggtaaagaaagtttctgggtaaggaacaaatagaattatagccccacttactttaccacataatcagctttgctaataagaaaattcagagctaaaatagaagatcgaaacatttggcttgcctaagtacttaccacgttttaaagttgctctgtgctgcttattttaggtagggtgaatgcaaaatataaacttt

SEQ ID NO: 427895 - DNA, 124 bp, Homo Sapiens
  misc_feature (46)..(46): n is a, c, g, or t
  misc_feature (97)..(97): n is a, c, g, or t
ctacagtgtgttctttatgcagcatatgtgctacagaatgctggtngtctgaggctgtgggttttttcaattattaatggctagtctgtgtaaggtnaatgccccaaaactcatctttggagtc

SEQ ID NO: 427896 - DNA, 325 bp, Homo Sapiens
tgcgttgatcttccagctttgagtgcagcacatttcacagccacatctagaaaatggaagaactacaggaataaatatgagcagattagtcagtgagctgcttgagacagctcagtatagcattttgtttggagttgctttttttggtcttgcttaattttgttataagcaatagttatttgcattttataaattttattccttaatcaaattatgtatggcttgtaatatgaaaaccagtgctatgggaaaaatgcgtgattagtggcagatactatgatatgtattgttctaatttagaagtgttgttcactccctgagggtg

SEQ ID NO: 427897 - DNA, 448 bp, Homo Sapiens
  misc_feature (343)..(343): n is a, c, g, or t
  misc_feature (405)..(405): n is a, c, g, or t
  misc_feature (420)..(420): n is a, c, g, or t
  misc_feature (433)..(433): n is a, c, g, or t
agacaggatcgttggcaatctaggagaatttcttaaatctcaagaggtatacaactccctggagcacatttgaattttatctaaatcaccagctcttgtacagttcagttagatagttgagcactcaggtagcttcttctcttcccttctgattgctctctgtttccaccagatggcgcatttgttccttagagagttgtgtcaagtctcctgtgagatcgttttctattcaaagttagtttcatttctggagtaacgtgtttctacattgttcagtgcacagtagtgagaattcatacatttgattccagaattaacatgtatttgaagtgtaggtgtagtngggacgtaaggaacccagcagaggacttgaacaatgagatgagacaagcaggttttcatttncttaagcccatgttnatttctagggccnttttgttgtgagcca

SEQ ID NO: 427898 - DNA, 496 bp, Homo Sapiens
  misc_feature (147)..(147): n is a, c, g, or t
  misc_feature (361)..(361): n is a, c, g, or t
  misc_feature (414)..(414): n is a, c, g, or t
  misc_feature (442)..(442): n is a, c, g, or t
  misc_feature (451)..(451): n is a, c, g, or t
  misc_feature (462)..(462): n is a, c, g, or t
  misc_feature (471)..(471): n is a, c, g, or t
  misc_feature (480)..(480): n is a, c, g, or t
caatatgcatttaacctccttaagccaaacttagatctgggattatcttaccctccagctgcctcagtggattttctttcgaagctactgctttaggttctcctgaagcagaaacctgcccgtctccagctagagccttcacctggnaacgtgggcccctctcccgaacataaaaccctgtgttctgagagttgtttttcaaactgtcctttgttagacgtgctagatggataatgtcagctttttctcaaatctatcttgatttggggtcctctttgtcctaatgagtatttcacagctccatctatgaactcgcttccatttgcctgggactcctgagagtggaggtacctgggccttnccagtgatgcataaaagatggtgttttgtttattccattttgaaatcatcttncccaccaagcaacccatgtgttcgtaantcaagcaantctggttgggncgcattgangaattttancatgccattgcatttt

SEQ ID NO: 427899 - DNA, 342 bp, Homo Sapiens
  misc_feature (17)..(17): n is a, c, g, or t
  misc_feature (167)..(167): n is a, c, g, or t
  misc_feature (203)..(203): n is a, c, g, or t
aaatatcagaataaagnccttattttcttcaatttcagtaaaggaaaatgacattcagaggttaagtatattagtaaaagtgtccaagtgtgatctgcattatttccacatccataacacacttctgatacactatgacattgagaaaaatggaacaagtataaaangccttgccaaaaattcatgactaaatatagacaagncagagccaaagcaaagaggggttaaggttcctcattatagattcaaggtaaggatgtgctagtccctaggcatatacttactgatgtagtattaatataaacataaacctaagtgatgctgtcttaaagagtggctacc

SEQ ID NO: 427900 - DNA, 279 bp, Homo Sapiens
  misc_feature (183)..(183): n is a, c, g, or t
  misc_feature (225)..(225): n is a, c, g, or t
  misc_feature (231)..(231): n is a, c, g, or t
  misc_feature (240)..(240): n is a, c, g, or t
  misc_feature (251)..(251): n is a, c, g, or t
caaccacgcccggctgatactgttaaagtcttaaacaaggaagatattaagcagcccgtaatatggatatttgtaaaactgtaggaaaataactgaataattttgtaggctgtgggtgatgaaagtgggaaaacctactctaggggaaatgctaaaattgtataaatagtattaaaatacttntatgcatgtttctaaatggttgaggttatttccagggcattncaggtnagttggggnggcctttctgncttgctggaaatttcagagatcctgggg

SEQ ID NO: 427901 - DNA, 247 bp, Homo Sapiens
  misc_feature (18)..(18): n is a, c, g, or t
  misc_feature (27)..(27): n is a, c, g, or t
  misc_feature (41)..(41): n is a, c, g, or t
  misc_feature (43)..(43): n is a, c, g, or t
  misc_feature (45)..(45): n is a, c, g, or t
  misc_feature (47)..(47): n is a, c, g, or t
  misc_feature (51)..(51): n is a, c, g, or t
  misc_feature (61)..(61): n is a, c, g, or t
  misc_feature (65)..(65): n is a, c, g, or t
  misc_feature (67)..(67): n is a, c, g, or t
  misc_feature (72)..(72): n is a, c, g, or t
  misc_feature (75)..(75): n is a, c, g, or t
  misc_feature (80)..(80): n is a, c, g, or t
  misc_feature (84)..(84): n is a, c, g, or t
  misc_feature (96)..(96): n is a, c, g, or t
  misc_feature (102)..(102): n is a, c, g, or t
  misc_feature (105)..(105): n is a, c, g, or t
  misc_feature (108)..(108): n is a, c, g, or t
  misc_feature (116)..(116): n is a, c, g, or t
  misc_feature (128)..(128): n is a, c, g, or t
  misc_feature (136)..(136): n is a, c, g, or t
  misc_feature (141)..(141): n is a, c, g, or t
  misc_feature (146)..(146): n is a, c, g, or t
  misc_feature (152)..(152): n is a, c, g, or t
  misc_feature (156)..(156): n is a, c, g, or t
  misc_feature (159)..(159): n is a, c, g, or t
  misc_feature (162)..(162): n is a, c, g, or t
  misc_feature (165)..(165): n is a, c, g, or t
  misc_feature (186)..(186): n is a, c, g, or t
  misc_feature (194)..(194): n is a, c, g, or t
  misc_feature (204)..(204): n is a, c, g, or t
  misc_feature (207)..(207): n is a, c, g, or t
  misc_feature (222)..(222): n is a, c, g, or t
  misc_feature (227)..(227): n is a, c, g, or t
gggaaaaaacgggccctnttccaaagnttttaaggggattnantncnaggncgaggggcangaancnggggnttnccccncagnttccagggcatngccccnagnaancccccggncgtgaagcgggnaaaggggnttggntaagncgcccnggantcncanctnttttaaagcccaatggggggncagcccangaggccaagncgncttgggaggaaattnttaancgaatgggggttccaaccgg

SEQ ID NO: 427902 - DNA, 143 bp, Homo Sapiens
  misc_feature (26)..(26): n is a, c, g, or t
  misc_feature (49)..(49): n is a, c, g, or t
  misc_feature (88)..(96): n is a, c, g, or t
  misc_feature (102)..(102): n is a, c, g, or t
  misc_feature (122)..(122): n is a, c, g, or t
ttttctctaagaaaagtagccagggnttgggaaatatcgagatgggggntccccagatcgcaatgggataaacgaacagaactttcannnnnnnnnccaaantcacttttgggggtgggggntcccagtctcggggactttgg

SEQ ID NO: 427903 - DNA, 333 bp, Homo Sapiens
  misc_feature (84)..(84): n is a, c, g, or t
  misc_feature (201)..(257): n is a, c, g, or t
  misc_feature (296)..(296): n is a, c, g, or t
  misc_feature (304)..(304): n is a, c, g, or t
  misc_feature (318)..(318): n is a, c, g, or t
aaaaatgtgttttcatgttaacatgtgataggcttacctttttcaattagtaaacattttaaaattttatcagttttaattttnaatatggtgaatatggataaatataacccacatgaacaagacctctttaagatcctctgtaattgctgagtgtctaaaagggttctgataccaaaaagtttgagaactactctgacnnnnnnnnnnnnnnnnnnnnnnnnnnnnnnnnnnnnnnnnnnnnnnnnnnnnnnnnnaaaggaaaatctattttatcaaggttactccgccatttnaatccatngatatacagggggntaaaactcctcaggg

SEQ ID NO: 427904 - DNA, 294 bp, Homo Sapiens
  misc_feature (172)..(172): n is a, c, g, or t
gacttttttcatggccaacctcgactggattcccacaggaaagggaaatctgggaaacatgttcccacgtagctaagtcaacacaatagaaaaccactgcagttggcttaggaaacccgagctggaagtggcaggatggaacgtgggcacgttggggcaggagactggggtngtatgatagggtgttagcctatgtacagtggtaaagcagcaatgatgaccttgaggagttttatcctctgtatatcaatggattaaaatggcggagtaacttgataaaatagattttcttta

SEQ ID NO: 427905 - DNA, 510 bp, Homo Sapiens
  misc_feature (399)..(399): n is a, c, g, or t
  misc_feature (418)..(418): n is a, c, g, or t
  misc_feature (442)..(442): n is a, c, g, or t
  misc_feature (458)..(458): n is a, c, g, or t
  misc_feature (465)..(465): n is a, c, g, or t
  misc_feature (497)..(497): n is a, c, g, or t
attcggcacaggccctgtttaatttttataaagattgtaaaaatacattttagctcaagagttcaaggctttcagagccctttttgcagattgctgctccagtcccgggctattgtgtattgtgataaattgtgtgctcttccagggactgttactcatttttctatccagcacagcttggcacatagtgggaacacagaaaacgttagttgactgacatttgattctaaggagcagaatcaaagtgtagatttcggattcattttagtcgttgaattgtgcagttttagtttaacaggacaataagaaaatgactagttcatgtgcaaaatgcgcgttttgaaaaaatacttaaatgggagcaactcatgggggtcttgggaaaattctgtcagtttngcggatcctcttccgttcncactattcatgttttgaggcttcngttcccctcacttccngagttcngaaagagcagtctattgctgggccgcttcccnttctttcacgtct

SEQ ID NO: 427906 - DNA, 124 bp, Homo Sapiens
  misc_feature (47)..(47): n is a, c, g, or t
  misc_feature (77)..(77): n is a, c, g, or t
tggggaaatttacccactaggggaattgggcaaccttgggaacaatntgggctggcaaaagtttaaaggaatgactntgtaggtgaaggacgtgaaggaaagggggaggcaggccaggcatagg

SEQ ID NO: 427907 - DNA, 247 bp, Homo Sapiens
  misc_feature (73)..(73): n is a, c, g, or t
  misc_feature (111)..(126): n is a, c, g, or t
  misc_feature (136)..(136): n is a, c, g, or t
  misc_feature (145)..(145): n is a, c, g, or t
  misc_feature (150)..(150): n is a, c, g, or t
  misc_feature (154)..(154): n is a, c, g, or t
  misc_feature (172)..(172): n is a, c, g, or t
  misc_feature (178)..(178): n is a, c, g, or t
  misc_feature (181)..(181): n is a, c, g, or t
  misc_feature (223)..(223): n is a, c, g, or t
  misc_feature (233)..(233): n is a, c, g, or t
aatccatctgtctcctacagcttttgagctaattaagttttgattaagatagtgacctcaactcctagatttnacatgcagcctactagatttttcttggaagatttacannnnnnnnnnnnnnnngggatttaanctcttggtnctganagantttacttttgtaagcagnctaagntgngggcccaattttattttcttctacatatgccagcaccaaaanttaaataatncaccttcttcttac

SEQ ID NO: 427908 - DNA, 452 bp, Homo Sapiens
  misc_feature (141)..(368): n is a, c, g, or t
  misc_feature (391)..(391): n is a, c, g, or t
  misc_feature (408)..(408): n is a, c, g, or t
  misc_feature (426)..(426): n is a, c, g, or t
  misc_feature (441)..(441): n is a, c, g, or t
ggcaaaggaggaatagaatagaacttccttaatctgtccaaaggttatcaacagaacactccacagccaatattacgtaatagtgaagtattgaaaactttcctcttgatatcaagaatgagattaagatgatcattatgnnnnnnnnnnnnnnnnnnnnnnnnnnnnnnnnnnnnnnnnnnnnnnnnnnnnnnnnnnnnnnnnnnnnnnnnnnnnnnnnnnnnnnnnnnnnnnnnnnnnnnnnnnnnnnnnnnnnnnnnnnnnnnnnnnnnnnnnnnnnnnnnnnnnnnnnnnnnnnnnnnnnnnnnnnnnnnnnnnnnnnnnnnnnnnnnnnnnnnnnnnnnnnnnnnnnnnnnnnnnnnnnnnnnatgggaggttggtgattgagctngggatttgcacccattngttaccttcccagccctngaaggcaagccaggnaggcaaaaagg

SEQ ID NO: 427909 - DNA, 389 bp, Homo Sapiens
gggatctctgtggacttctgccagtcttgggaaccagacctaatgtgggcaatcaagcccaactatcggactttaagtgttagagaatgaagctgtataatctaactatggtatatttgattgcttgaaataatcgctttataaatttattctgccttttaagcaaacttaacagatggctgaatctggacataactgtggagaccactttcaacacttttattgttggctaaagcatgctttgttaatgatgttcccaagttattcattcatttttaccaacctgcaaacactgttatatattagttattgaaaggttctgatttcacaaaaggaaagtttcactagggattggggttagcacattgtcattccctttttggcatgct

SEQ ID NO: 427910 - DNA, 496 bp, Homo Sapiens
  misc_feature (124)..(132): n is a, c, g, or t
  misc_feature (384)..(384): n is a, c, g, or t
  misc_feature (422)..(422): n is a, c, g, or t
  misc_feature (451)..(451): n is a, c, g, or t
  misc_feature (466)..(466): n is a, c, g, or t
  misc_feature (481)..(481): n is a, c, g, or t
cggcacgaggcggcacgagggaataaatagcttaaactctttgaagttatagtttctcacttataaaacacaagagttgggctaggttgtcacaaggcaccttttggttccaaaattctgtgannnnnnnnnggacctaccacaagcttattgctataaattgtataaagaagagggtgatgggaaagaataggaacaaagattattttggtcattgaaaatagctctcaaatgtttctgagcatggagacagattaaaatagaaattatgaatatttatttcacaaaagaaagtctgtgagactttctaacaaagatagaaaaaccattaatgaaggaatattttacaaataccatattaaatacagattggccaagtagganaggaattattaaaatgttttatttaatctgttgtgtcnatttgttgcctttgtccggaaagtggccngattaaaatttaggnattttgggaaggggnaattttgtgctatta

SEQ ID NO: 427911 - DNA, 316 bp, Homo Sapiens
  misc_feature (182)..(182): n is a, c, g, or t
  misc_feature (206)..(206): n is a, c, g, or t
  misc_feature (218)..(218): n is a, c, g, or t
  misc_feature (255)..(255): n is a, c, g, or t
  misc_feature (262)..(262): n is a, c, g, or t
  misc_feature (306)..(306): n is a, c, g, or t
acctaaatgtatgataaacagtagggcatacttctgaaatccagaactggcctaacaaatacattcttgtcaaaatcagagttattatcttcagagtgtaatgatctcttacattcaattattaaaactatctataaaatattatagtctttctttacaatgaagtttttagagccataagntaaggagtaaaagtttccctactnataaactctgantaccttaccaactgtaagttaaaagccatcatagggntgcttancctgggagggagaacacagtgaatgtgagcccagtcccttgttnttggatgcaa

SEQ ID NO: 427912 - DNA, 402 bp, Homo Sapiens
  misc_feature (357)..(357): n is a, c, g, or t
  misc_feature (382)..(382): n is a, c, g, or t
ctgtgagtggtgtgtgcgtgtgatctcggctgcagcccgactgtgatgtggccagggtcacgtgtgtgcaagagggcaccgtggtcagtccgggcccaagtgtggttatatctgagtttgccgggcagtacctggggctgtttggctctatgtccatctgtgtggctggagcgggtgtgtgtatgcagtggacacatactcaattgagaacggcgtgcggaacccggctgtgtgttctatgctgctgtcgtatggctgggctggggggcgtgtgtgagtacccggtggacgctactgtctggctgtgagcagaaatggctgttgctgagttggtgtggctgtatgtggacctgtgtngggtgtaagctgaatctgtggggtngcattcttgcagccgctggt

SEQ ID NO: 427913 - DNA, 315 bp, Homo Sapiens
  misc_feature (116)..(116): n is a, c, g, or t
  misc_feature (223)..(223): n is a, c, g, or t
  misc_feature (275)..(275): n is a, c, g, or t
gtgtcagccaccagcacttggccgtcttcctctaatttttaattttttcactttgagaagcctatgatatgacatggaatttgatgtctcatcctgtgtggtcctgtgcaccctgntcctacagaagtacagagggaatcttttgggagggagggataaacttagagtcttaaaaataatgcatgtgggtttttcagtgttcattttaggattctcttcaaancagtcagaagccccctaccctaatctcaattccctgtctgctccctcctggntccctggcagtaaccccttctccacccgatcttcccgctg

SEQ ID NO: 427914 - DNA, 422 bp, Homo Sapiens
  misc_feature (261)..(261): n is a, c, g, or t
  misc_feature (300)..(300): n is a, c, g, or t
  misc_feature (365)..(365): n is a, c, g, or t
  misc_feature (400)..(400): n is a, c, g, or t
actcaaaatatttaaataattcctgatccctcgtcctaatttccatcatcttttcagccaaaagaatactctttgtgtcatcaaatttttcttacaggcagtttaaaatgatttttctttccctgattgctaaaaatatttaaaattcttttgaaatcaaaagtcaattttggtatgcatattttcattttaactatgggttaagccaaccctttatgcacaattaaacacctcggcaaagtttacatgatatagtggggnaaatcatggggctttatgggtcaggcctggggtttaaanattaggttctacttcttattgggttttattaccatggggcaagtcatgcaacttccctgtggccncagttttctcggtaaatcggggagaataatttccntggaagggtgggggaccaggga

SEQ ID NO: 427915 - DNA, 464 bp, Homo Sapiens
  misc_feature (237)..(398): n is a, c, g, or t
  misc_feature (404)..(404): n is a, c, g, or t
  misc_feature (415)..(415): n is a, c, g, or t
  misc_feature (441)..(441): n is a, c, g, or t
cctcccacaagggtgtttaaaaattccctgtgcccagagtaacctaccgctctactgggaagagcacactgaaatgtaaaacacaggagccagacctttccagggaatggaggcaacaccaaggaaggccttggaagaggtgttggctgtctcagcagccacgccctccgcttccttcgagccagagcctctgtttcatttggctcttttgcccttgcctcatgtgactcagtggcnnnnnnnnnnnnnnnnnnnnnnnnnnnnnnnnnnnnnnnnnnnnnnnnnnnnnnnnnnnnnnnnnnnnnnnnnnnnnnnnnnnnnnnnnnnnnnnnnnnnnnnnnnnnnnnnnnnnnnnnnnnnnnnnnnnnnnnnnnnnnnnnnnnnnnnnnnnnnnnnnntaaggnaaaggctggtngggttagattcagtggactcatgccntttaaggcccaacattttgggga

SEQ ID NO: 427916 - DNA, 172 bp, Homo Sapiens
  misc_feature (29)..(29): n is a, c, g, or t
  misc_feature (123)..(123): n is a, c, g, or t
ttattgggttactaagattatacataggnttcaagtctgtggctgttatctggagggaccgttatttgatttctgtgcttggctggagaaatactgtaagtatcttgatgtaggctgcctttnaaatagaggccagtgttaaaactagagcagctactgccacaggacacac

SEQ ID NO: 427917 - DNA, 221 bp, Homo Sapiens
  misc_feature (38)..(38): n is a, c, g, or t
  misc_feature (97)..(157): n is a, c, g, or t
gcatccacatatggctttgcctgacacagttcctaggnatgcttgtggtacttaacttggcttctaatttttatgttaaaaattgtattattgggcnnnnnnnnnnnnnnnnnnnnnnnnnnnnnnnnnnnnnnnnnnnnnnnnnnnnnnnnnnnnngtcacccagccacagtatggccagttttttaagtgtttcacatgtgcttcctaattatgtttcc

SEQ ID NO: 427918 - DNA, 333 bp, Homo Sapiens
  misc_feature (79)..(79): n is a, c, g, or t
  misc_feature (176)..(176): n is a, c, g, or t
  misc_feature (246)..(246): n is a, c, g, or t
  misc_feature (260)..(260): n is a, c, g, or t
  misc_feature (309)..(309): n is a, c, g, or t
tcagatatacccagaaggactgaatgagaaagtgggaacttgctatatggcagtatttcaagaaatggcttagctgggnaaactaacagtaaaatactcgtgtctattagcaaatcaaatctaatgagtgaactcttagtgggggtttggaactgcctgagaatattcctataganactgggtcatcttgccttctgtgccactagaacctcctgtctctccaatagctgcttctctctaattctncaccatagttttcnttctgtggggttttgaggggctctccacactttgcttttgacttaagtnctccactgcctgactcacccaaat

SEQ ID NO: 427919 - DNA, 227 bp, Homo Sapiens
  misc_feature (120)..(120): n is a, c, g, or t
  misc_feature (135)..(135): n is a, c, g, or t
  misc_feature (194)..(194): n is a, c, g, or t
gacgtttccattggaacgatgtgcatggggagctgtgtatagagaggacagggtgctggaacccagagccctgggagggagtggtcctcacagggcagcttcagtgggccccgcagacanccctgcttctgggtngagaagcccagatgtgccttctgagcacgatggcccttgaggccagagctgagagaatnatgaccgctctctcgtgttaattcacaaaaccc

SEQ ID NO: 427920 - DNA, 356 bp, Homo Sapiens
  misc_feature (284)..(284): n is a, c, g, or t
  misc_feature (305)..(305): n is a, c, g, or t
  misc_feature (316)..(316): n is a, c, g, or t
  misc_feature (329)..(329): n is a, c, g, or t
tgcacttgaaatcaatttcttccattggaaaatattttaagacaactataactttacagattaaattgaaattggctactgatgaaggactaaagttcaattttgaaactacagcattgtctcagtggtgaccaacttaataaatgaatattttgtgtttgccaaaattactctaaaatgtctttctttattctaatttacctctgtgagagacttttttctctaggtatggttttcattaaaacaggaatacaggaaaccgttttatatattaaattattccnccaggaggggaggattgtccntcaacccaccntaaggtaattccntttaactgggcaggaggcaggtttttt

SEQ ID NO: 427921 - DNA, 340 bp, Homo Sapiens
  misc_feature (181)..(181): n is a, c, g, or t
  misc_feature (199)..(199): n is a, c, g, or t
tcagatttattgcccaccatagtcacaaacagactggaaataagatagatttacagaattttctgcctaactctagaaataggatggcagaagagtcattacattaagaaagcccaatgctgccatttactttaagacatataaatttgggatttcaaacaaaacagcttacaaaagggtntttggcatcaaaagggantagcacaggaattatacctaagtccattacatataacactgaactatacaagtaaatgtgtttgacaataaccaatgcttatttgattgttgggggaggtgacagctaggtaatacgttgggcttgaattatattttttcc

SEQ ID NO: 427922 - DNA, 474 bp, Homo Sapiens
  misc_feature (301)..(301): n is a, c, g, or t
  misc_feature (311)..(311): n is a, c, g, or t
  misc_feature (324)..(324): n is a, c, g, or t
  misc_feature (331)..(331): n is a, c, g, or t
  misc_feature (343)..(343): n is a, c, g, or t
  misc_feature (382)..(382): n is a, c, g, or t
  misc_feature (392)..(392): n is a, c, g, or t
  misc_feature (405)..(405): n is a, c, g, or t
  misc_feature (447)..(447): n is a, c, g, or t
aacacagatgcaaatggtatctattttttatggagaagaaaggacttctcagaggacaaaaagcccacagttcagagtcaagagatgtggagaagaatggactagagaaacattcagaggaagtggtaagaggcaatgtactgaggagccactcattaggaaccaagtgactcctagtcaaagaatatttccaggcctgcgtgtagggcaacctgtcaacttatgctctacaagacttcagaatgataatgaagcagtaatactatgtgcctcccactgggaatagggatactgatttccnttttctaccnttgtaacttaggnttgtgcnggttcagacaanttgtaatttttagtttcatgtacatcaagggggtcccantcctaagggntttacaccacacntgtattgggttgggggattttgaacttcaggtttgatggccncattgggttggctttttgggggtttct

SEQ ID NO: 427923 - DNA, 323 bp, Homo Sapiens
  misc_feature (55)..(55): n is a, c, g, or t
  misc_feature (82)..(82): n is a, c, g, or t
  misc_feature (127)..(127): n is a, c, g, or t
  misc_feature (139)..(139): n is a, c, g, or t
  misc_feature (167)..(167): n is a, c, g, or t
  misc_feature (184)..(184): n is a, c, g, or t
  misc_feature (198)..(198): n is a, c, g, or t
  misc_feature (249)..(249): n is a, c, g, or t
  misc_feature (281)..(281): n is a, c, g, or t
  misc_feature (297)..(297): n is a, c, g, or t
taactgcacccggccatgttccaaataatttcttaacacttaactaactcttggngtatttccttattcttctgaagtacancttccagtagcatcctaagaaggacaaaaaattgtcttctatccncactcgtttggnatatcttcatcacaccattaaatttggntgataatgtgggctggntacattgggcaatnttaacaagtacccaaagtttactgggcttaaaacaaaaccatttattacangattctgttattcaggcaatctagggctgggnatcagctggggtgggncccttgggctagggcaggtctagggt

SEQ ID NO: 427924 - DNA, 275 bp, Homo Sapiens
  misc_feature (265)..(265): n is a, c, g, or t
acttaggactcccacacaataatagtggtaggacaaagatattcagggacctggaaatcagtaccaggatcaaatgggacatgataggacatctacaggggctctccatcccaaaacaacaggttattcattctcctcattgccacatgggcacataatctaaaacaaatcacaaaatcagggaataaaacactcttcaggcaaaaggcaaaaactggaaatcattaacaaagagtctcttggggccaggggcacaatcaaattngggaatcaag

SEQ ID NO: 427925 - DNA, 285 bp, Homo Sapiens
ttttatattgaaaacctgtattttccaaaactgaaaagtggtgagaaaagtaacattgtctcaacttctgcaaatctctttaatatctgccttaacagaatgaagctagatttttcaggtctgcttctgtattcaaacagctgcaatatcatactctggaaaactccacaatatattcatgagagattgagagtgaataagacaaataacatttagtattattaagaaattggttttgacctcatagatccactgaaggattgccagaccacatttaagattttc

SEQ ID NO: 427926 - DNA, 505 bp, Homo Sapiens
  misc_feature (324)..(324): n is a, c, g, or t
  misc_feature (370)..(370): n is a, c, g, or t
  misc_feature (401)..(401): n is a, c, g, or t
  misc_feature (423)..(423): n is a, c, g, or t
  misc_feature (437)..(437): n is a, c, g, or t
  misc_feature (454)..(454): n is a, c, g, or t
  misc_feature (469)..(469): n is a, c, g, or t
  misc_feature (487)..(487): n is a, c, g, or t
attatttttgagacggagaaaagaagtctaactgactcacagttccacatttccacatggctgcgaaggcctctgggagtttacaatcatggcggtagaggaagagacatgtcttatgtggcggcaggtatttcagagcaagcaagtgtgtgaaaaaggaactgtcagacacttttataaaaccatcagatctcatgcaaattcactcactatcatgagaacagtatggggggcactgttttcatgatccaatcacctcccactaagtctcttccttggcacatggcgattatggggattacaattcaagatgaaatttgagtngggacacaaagcctaaccatatcactaccccattgggcatttaccngggtgggataaaaattattacataggtaagntgctattgaagggaaaaaagtnaaggttgtttaacngggaaaaattaaggagnggggttttaattttntaaggttttggaatttcnggaaaggttgtctccagg

SEQ ID NO: 427927 - DNA, 319 bp, Homo Sapiens
  misc_feature (47)..(47): n is a, c, g, or t
  misc_feature (110)..(110): n is a, c, g, or t
  misc_feature (112)..(112): n is a, c, g, or t
  misc_feature (122)..(122): n is a, c, g, or t
  misc_feature (154)..(154): n is a, c, g, or t
  misc_feature (191)..(191): n is a, c, g, or t
  misc_feature (232)..(232): n is a, c, g, or t
  misc_feature (240)..(240): n is a, c, g, or t
cttttctggacagggtaaattcttctgaaattgcatagatgatggancatcctaagatatcatcctaagataatgctgtgcttgccccttagacttgtgggatgaaggantntagccagcgnttcatataaacttgcgcaatagtattacagancctacttttcagaactgagtacagatgggtttgagantagaatctggtagagagatggccaaggaagcagaagtagantgctggtnttagttaggattgggtttggccacatgtaagcaaatacttaatataatgatggcttcaacaagttagtttatttattta

SEQ ID NO: 427928 - DNA, 353 bp, Homo Sapiens
  misc_feature (287)..(287): n is a, c, g, or t
  misc_feature (295)..(295): n is a, c, g, or t
  misc_feature (342)..(342): n is a, c, g, or t
tgacacacacactcagcctacgaacttctttattaatgtaatagcgcacatatacttaacttctggtttctacttaagagcatctcaataacctccgatatagaatacgatgaaaaatgaaacctgtgtgcataatgtgcttgtatctacctgtcagaagccctttgctttgataggcatttgctgcctcagtcttcctcatcacccaacctctctggggttgcttgttatggataaacctaagtgcctccgtaaatgggttaggaggcatgtgttttctttggtcnttgtgganttcccttgtctggggggataaggactgcttgtaacttctccccaggnttggccctttt

SEQ ID NO: 427929 - DNA, 440 bp, Homo Sapiens
  misc_feature (390)..(390): n is a, c, g, or t
  misc_feature (419)..(419): n is a, c, g, or t
cgtggtgccagatcaacacttctatccctctgcactgaccacgttgtgaactgggagaccaaatgcaagccatttcatggacatagcaatatacaaccaaactctgttccttggagttatattgtaaactcttgcaggtgggagagcagttcacctccttagctctgtttgccagctcttacagggtaaaataaacctgggcaatttatcctcagtcctagtttgtggtttaatgttgctatcttaagcactggcatttggggcaaaacatgactgtgttctgtggggagaatccaaagggcattattcactctagttgaggataggaattggggtgggctaaaacagggtgtgtgggtacccaaaagatttaaatgtttacatgttccnttttagttccttgaccaggtctaggcctnggcaggaagcaaggggaggcc

SEQ ID NO: 427930 - DNA, 317 bp, Homo Sapiens
  misc_feature (49)..(49): n is a, c, g, or t
  misc_feature (125)..(125): n is a, c, g, or t
  misc_feature (146)..(146): n is a, c, g, or t
  misc_feature (150)..(150): n is a, c, g, or t
  misc_feature (256)..(256): n is a, c, g, or t
  misc_feature (262)..(262): n is a, c, g, or t
  misc_feature (282)..(282): n is a, c, g, or t
  misc_feature (296)..(296): n is a, c, g, or t
tcaagcaatcctcccacctcaacctcccgtagttttgggaatacaggtntgagccaccatgcctggtcatatagctttcacccaggctggaggttgagggaggttatgagggcggcaggcagctntttgatggcccacgaggagantttngggcacaggaaacaacacacttaacagcccgcctttaagtaggcatgaacttggaagaaccaacaagctgaaggtgcagcttctcgaaagagggggtcctagggantgaagntggagaggtgcccctagttnggcagcgagctttngagaaacaatgggagcggggc

SEQ ID NO: 427931 - DNA, 437 bp, Homo Sapiens
  misc_feature (194)..(212): n is a, c, g, or t
  misc_feature (275)..(275): n is a, c, g, or t
  misc_feature (352)..(352): n is a, c, g, or t
  misc_feature (369)..(369): n is a, c, g, or t
  misc_feature (381)..(381): n is a, c, g, or t
taatataatgactgcccacattcctaccatcagaattagtcattgtgaaacaatatatatatgtataggtttcctgtttttcttgtttaagaaatgaaagggataaaagtaaattcccctttactgcgtgcttccagttttcactccctccccagtctccactttgagtttggtgtgaacattttcctaatgtnnnnnnnnnnnnnnnnnnnggagacagagtctcgctctgtcacccagggctagagtgcagtggcccgatctcgacttcactngcaacttccacctcccgggtttcaagcgattcccctgcctttgcctcctgagtagctgggaattacaggtgcggtgnccggcaccacacccggntattttttgtanttttagtgacggggttttcaccatgttcgcccgggtggtctcgaaattctgaggtt

SEQ ID NO: 427932 - DNA, 370 bp, Homo Sapiens
  misc_feature (54)..(54): n is a, c, g, or t
attgtctctgaagtgatgggtgatgctgggggcctgagtgtggagggcagtttnacatctcaggacaatgttttctcagatgctcttccagaaagaaaagccaggagtactcctggctggaggcggcatgctgaggtcagagtcaaagtagggtttgtgctgtctgaatcctttctcccactctccccagcctggctcagcttctcagcttctcaggtggattggtgagtcctggccaattgcgcttcagctcatctctactctcagcaaataggaaaagggagtgaaggactgagttttaactcttctaatttcgtaacctgactctctataagaaaaagtaggagaaagactgaagaacccgagagaa

SEQ ID NO: 427933 - DNA, 501 bp, Homo Sapiens
  misc_feature (388)..(388): n is a, c, g, or t
  misc_feature (431)..(431): n is a, c, g, or t
  misc_feature (438)..(438): n is a, c, g, or t
  misc_feature (462)..(462): n is a, c, g, or t
  misc_feature (475)..(475): n is a, c, g, or t
  misc_feature (489)..(489): n is a, c, g, or t
ataacagcctaccatagaggtgttacagcttccaccattttacacaggaggaaacagagctcagctcagagaggttgagttttccaagaagccaagtcatggggccaagaatagtgcccgggtgccatgagactctgcccactactgccctgctggctgcagagcggcttcagatacggctgtcatccaagccagggagcctttgagccagtgctgctgagaaaattgggaaaaagcccactgcccggttcccagcacatcttcactgttcctcgggctccctccatgtctgtttccctctgagtgtagtagattggggactcagaaccttctagaacagaagttatggttttgtaaggggaagaaatatggtcaagttgcacatctnttattttaggagtatttaaattttccttgttacccttatgganttatttntagaaggttcagcacattgattanaaagttaatgttnggctaacatttaanccttcaggtttt

SEQ ID NO: 427934 - DNA, 425 bp, Homo Sapiens
  misc_feature (333)..(333): n is a, c, g, or t
  misc_feature (359)..(359): n is a, c, g, or t
  misc_feature (369)..(369): n is a, c, g, or t
  misc_feature (376)..(376): n is a, c, g, or t
  misc_feature (390)..(390): n is a, c, g, or t
  misc_feature (407)..(407): n is a, c, g, or t
gtatagattcctgaaaaagttctaagctgaacctgtacaaatggaatcattttaaacacaccatttactgtcacacagactccctgatactttagtgtgtgcacatgtgaaaccatttttttgaagtatgaaataattaattgctcaccattttatctatataactttggattttggtgtcctgagctctctaaaaaccggtgtgtttctatagtatttgaatattatggggtaatagttttgcagagtacagtatgcttatactaaattataacagcatatcctcgtgggtaaccctatttgatagggcaggaaagcttgtacactgatccnggaaaagtcatctgataattcttggnttagggcaanttaactnccctgtcccgggtnaggggagggcagacccntttggattttttaccccc

SEQ ID NO: 427935 - DNA, 371 bp, Homo Sapiens
  misc_feature (54)..(54): n is a, c, g, or t
ggctgaaaaggatttcggattgcttgcacaatgggtacattattgaatgcctcngtggaagggcatgataaagatgaaaaatagtgacggtggtaatgcctaaggtggagaaaggaggagcgtggataaacgcacctcggaggcctctgtgctgcagtgatatgcacattatttagcagcattccaatgatttgcttgtaatatggaccagagggcccagaaaaaaatgatttccacaggatgtcatgaatccaaacttcaattattggatccaatcagtgggattaagtgcaccccctttcaggaactggaaccttcaggttgttaaactcaagtttatggaaagggacatccccgggtctcaccccacc

SEQ ID NO: 427936 - DNA, 418 bp, Homo Sapiens
  misc_feature (21)..(21): n is a, c, g, or t
  misc_feature (29)..(29): n is a, c, g, or t
  misc_feature (284)..(284): n is a, c, g, or t
  misc_feature (308)..(308): n is a, c, g, or t
  misc_feature (338)..(338): n is a, c, g, or t
  misc_feature (346)..(346): n is a, c, g, or t
  misc_feature (365)..(365): n is a, c, g, or t
  misc_feature (382)..(382): n is a, c, g, or t
attgtttaaattgcaactatnactctttncacaattaaggaaatgggacagagtagagtcaagagacttttcatgatcccaaacatagttgcagaatattaggatttatggacatctaggcccagagtatttttctttcctccctgctactatatttaacttatatttctcttccactacatttgggctatactcttcgtatgataaagtttttctaaaatttcagtgtattatattgttttgctgattcacattttaatatactgagtagccttttaggcaangcagaccctatgttttatatgggnaatttttgtttccagggcttaaggttaatncgatgganggtctttccaggggaggtnaccagtggttgggtatnattccggaatacctccggaaggattgggccttttcc

SEQ ID NO: 427937 - DNA, 447 bp, Homo Sapiens
  misc_feature (18)..(18): n is a, c, g, or t
  misc_feature (40)..(40): n is a, c, g, or t
  misc_feature (46)..(46): n is a, c, g, or t
  misc_feature (61)..(61): n is a, c, g, or t
  misc_feature (67)..(67): n is a, c, g, or t
  misc_feature (70)..(70): n is a, c, g, or t
  misc_feature (89)..(89): n is a, c, g, or t
  misc_feature (116)..(116): n is a, c, g, or t
  misc_feature (121)..(121): n is a, c, g, or t
  misc_feature (170)..(170): n is a, c, g, or t
  misc_feature (192)..(192): n is a, c, g, or t
  misc_feature (397)..(397): n is a, c, g, or t
caatattgctttatctgncctcttcctacaacattcgggncgaggncctatattacggatncatttnctnctacttcaggaaaccctgnaaacattcggtcattattccttcctgncttgncaacttattaggcaacagccttcattagggcttatgtccttccccgtgnagggccaaattattcatttctntagggggccacaggtaattacaaaacttacttattccggccattccccattacattgggggacaggaccttagtttcaaatggaattctgagggagggctacttcaggtaggacagtccccaaccccttcaacaacggatttctttaaccttttcaacttcattcttggccccttcattattgcaggcccctaggcaggcacttncacctcctattcttggcacggaaacggggatcaaaacaaacccccctagg

SEQ ID NO: 427938 - DNA, 427 bp, Homo Sapiens
  misc_feature (46)..(46): n is a, c, g, or t
  misc_feature (61)..(61): n is a, c, g, or t
  misc_feature (128)..(128): n is a, c, g, or t
  misc_feature (181)..(181): n is a, c, g, or t
  misc_feature (241)..(241): n is a, c, g, or t
  misc_feature (301)..(301): n is a, c, g, or t
  misc_feature (336)..(336): n is a, c, g, or t
  misc_feature (416)..(416): n is a, c, g, or t
tgggcatgaccctgttcaagggttcccttctgggcctgacctctgncctgggccttgggcnccagatgcaaccttgcccttcccagctagtgtctggtggggccataagatgctgaaatgtccttctncccctgggacagtctgtacatctttgtcctcgatacaagggtgctacagactnagtcaagaaagggtagaagccctggatgatgccaagtggaaacctcaggcaagggccttnaggaagggattttaaactcctcctaccctccatcagctttctctccattcttgaaatggncaatgacttcctactgtcatgcaagcttccagggngtatgtagcttctagcatctttccatctaaccagagtgctttccctaaaacctttcaataaagaaatttcagaatagttnttgttagaaga

SEQ ID NO: 427939 - DNA, 563 bp, Homo Sapiens
  misc_feature (213)..(225): n is a, c, g, or t
  misc_feature (407)..(407): n is a, c, g, or t
  misc_feature (468)..(468): n is a, c, g, or t
  misc_feature (480)..(480): n is a, c, g, or t
  misc_feature (497)..(497): n is a, c, g, or t
  misc_feature (519)..(519): n is a, c, g, or t
  misc_feature (542)..(542): n is a, c, g, or t
gacaaatgacttttccattggtattaaacctgctagaggttctttgtgaggtggattcaagaagaaaagacccagagtttcacaatataggtagcgataaccaggtctcactttccccttccgtgagaacttcgtgggacagaccgaccgcgcaggatcaggtatttccaaattcaagtactaacacaagtttggggattaatcatgccagcnnnnnnnnnnnnnaatgtttgatatgggggtcaaggttaagcttttctatgcagtctctttgttctttcttactcttagcccattttgtcctcttctctgtggctgtaactccatggctgcccagggaccatctggtagtaccttcctgctcctttgcttctaatagtcatatttattaacaggaacaagtaccnagggaagcacttattcccagtattctgggaagcacttattccaagtactttgtgcttaagnactttatttttngcattttctcatatctncccacaaccccacaaggtaggnttattattcccattttacctagngggcatgcttgcttacagtgg

SEQ ID NO: 427940 - DNA, 412 bp, Homo Sapiens
  misc_feature (16)..(16): n is a, c, g, or t
  misc_feature (289)..(289): n is a, c, g, or t
  misc_feature (316)..(316): n is a, c, g, or t
  misc_feature (339)..(339): n is a, c, g, or t
catggagtggattggntgaattaaacatatgtgcaagtgcttgtaaatagcaggaaactatgcaaatgttactcttaatttctatcagggggccttttcatccacccatgcaaatgtttcattagcctgtgctcaagtattctgaatggcattctgccagttcatttccattcactaaaacaatcaacattccagtagaatattgatctgggcctcagagtagaaagcaagactaatttattcatgacttaggtaacagagacaaagaaaagatgtgttaccttagggncaattttcattatgtacaaggaaaggncaaagggaccgtacaggacaccnttaacaacaaacctcacagcacaaaacctctgcatggggaaggaaacccagtcctgttagagggagggctttt

SEQ ID NO: 427941 - DNA, 398 bp, Homo Sapiens
  misc_feature (24)..(24): n is a, c, g, or t
  misc_feature (55)..(55): n is a, c, g, or t
  misc_feature (80)..(80): n is a, c, g, or t
  misc_feature (101)..(101): n is a, c, g, or t
  misc_feature (134)..(134): n is a, c, g, or t
  misc_feature (160)..(160): n is a, c, g, or t
  misc_feature (165)..(165): n is a, c, g, or t
  misc_feature (174)..(174): n is a, c, g, or t
  misc_feature (206)..(206): n is a, c, g, or t
  misc_feature (288)..(288): n is a, c, g, or t
  misc_feature (371)..(371): n is a, c, g, or t
  misc_feature (386)..(386): n is a, c, g, or t
cttctggcatcgcctgggttcagncttcgtaggtgtcgttcggcggccttcctgnctgggcgccccagtaacggcggcanaacttcttctggccaacccgncttcaaaaccttcatcggacattgtgtctgtgnctgccccttctaatctcaacggctgnctggnctggtgtgnggcaactggggcgaacccaggggcgggcaaangaagtttcgggcccaaccctggggcaaaggtgggtgcaggtgttccgccctcatgccggcaatcttcccgcgtaactcaaanttggccgcgccatttccaacccggggctgcgcttcgcctgggaagccaacggctcaaaggcaacaagctaacccgtgaaggtnggggcaatcttgctnctgtaacctggg

SEQ ID NO: 427942 - DNA, 150 bp, Homo Sapiens
  misc_feature (46)..(46): n is a, c, g, or t
  misc_feature (85)..(85): n is a, c, g, or t
  misc_feature (108)..(108): n is a, c, g, or t
  misc_feature (128)..(128): n is a, c, g, or t
ctacagtgtgttctttatgcagcatatgtgctacagaatgctggantttgaggttctggttttcaattattaatgctagtttgtntagggtaatgccccaaaactcantcttgggagtcgtattgccngtccagagactcaagagtcaac

SEQ ID NO: 427943 - DNA, 357 bp, Homo Sapiens
  misc_feature (181)..(181): n is a, c, g, or t
  misc_feature (211)..(211): n is a, c, g, or t
  misc_feature (304)..(304): n is a, c, g, or t
tttccatcagtgcctttggtttaaactttttagtaaaatctttattttcatgaaggttgaaagatcatctagcaaaacctttttttcccagctatatataaggtattttaaaagcagcataaaatagttaagaaaatgtgccaagattacctcagtacttctggtctgtgttctcagaagntcctgaaaatgaccaatgataaggtaatgntctcccatggcagaaagagttttgctcagagagttagccaaaagaaagaagggccagggtatagtggctcatgcctggcaatatagcactttngggagggccaaagtgggccaccatggggtccacacaagggtccaagagtttcc

SEQ ID NO: 427944 - DNA, 312 bp, Homo Sapiens
  misc_feature (51)..(51): n is a, c, g, or t
  misc_feature (53)..(53): n is a, c, g, or t
  misc_feature (55)..(55): n is a, c, g, or t
  misc_feature (89)..(89): n is a, c, g, or t
  misc_feature (180)..(180): n is a, c, g, or t
  misc_feature (192)..(192): n is a, c, g, or t
  misc_feature (263)..(263): n is a, c, g, or t
  misc_feature (271)..(271): n is a, c, g, or t
  misc_feature (297)..(297): n is a, c, g, or t
gatgtaggcattttcatactgaatgagagagtaaataatggcatccatttntntncttctattcacaataagttgaaatgctgtctatntcccatattctaggacctaactcctattgctttgaatttctcctaagacagtaatcatagttatgagcaaatgtatagctatatgcatatntccttaaggctnttctgtatttccaaaacacattaacctaagacttgagcgttatggactattccaatcaaaagacaaatgancatagatncctactccccgcataacacaaaactntatccaaagtggatt

SEQ ID NO: 427945 - DNA, 174 bp, Homo Sapiens
gagattatgcagaagttgcagatatagagttgctttattgtcttggatcatcatgccagtttaatttaaggtctttcaggacagaaacaacatctgcccattttgtttgacattctcttttcccctttatttcaaacaatacacgtgccctttgtagtaaaattagtcaatgag

SEQ ID NO: 427946 - DNA, 358 bp, Homo Sapiens
  misc_feature (260)..(260): n is a, c, g, or t
  misc_feature (330)..(330): n is a, c, g, or t
tgaaatccacatacatctcatttgtttaaattaaggccatgcacaaatattttttttagttcagtgctgaccattaaaaactatcatgcttgatacggtgcaaaagttaaaatgagtatcactaaaaatgccttctttttatgtggtgcaatatgaaatacaccaagactgtgtcttggacattctgatgggacccagggtaaagttgttaaaagaacgaataaaactttattaaaataatttaggacacctgtgtaccnggcaacaattggatttaataggacctataggtgtctattactatccctttgggattaaagggtttatggntttccccgatactagggtgccggtcacc

SEQ ID NO: 427947 - DNA, 191 bp, Homo Sapiens
  misc_feature (22)..(22): n is a, c, g, or t
  misc_feature (34)..(34): n is a, c, g, or t
  misc_feature (53)..(53): n is a, c, g, or t
  misc_feature (71)..(71): n is a, c, g, or t
aagttattggggaacaggtggngtttggttacangagtacattttttagtggngatttgggagactttggngcacccatcacccaagcagtgtacattgcaccatatttggagtcttttatccctcacccccctcccactcttccttccaagtccccaaagtccattgtatcattcttacgcctttgcgtc

SEQ ID NO: 427948 - DNA, 140 bp, Homo Sapiens
  misc_feature (55)..(56): n is a, c, g, or t
  misc_feature (58)..(58): n is a, c, g, or t
  misc_feature (60)..(60): n is a, c, g, or t
  misc_feature (92)..(92): n is a, c, g, or t
taagccccgcacccccttcctcggccggccccggagcagcccgcggtggggctgnngntngggaggtgaccttggacttccaggtaccaggnagggtgggggacggggcagggggagggcgctgggctccctcctcctcg

SEQ ID NO: 427949 - DNA, 482 bp, Homo Sapiens
  misc_feature (368)..(368): n is a, c, g, or t
  misc_feature (412)..(412): n is a, c, g, or t
  misc_feature (453)..(453): n is a, c, g, or t
  misc_feature (471)..(471): n is a, c, g, or t
attcggcatgagggcgaatttcttggggtgttaatgtaaacatatctttagaatatctcatcgggtttcagtcagagccatgctttgggtttttcctagcagcagtgatgatatcaacttacaaggtttggctttcaggatttcagaagctggcattcaagacaacaggcagtttgtcagagctgaatgagaatcagcctgggacaaatcaagtgctttaacaagggcatcttcctctgggaataatcagtccttaatacagtttgcacttgacataatagttttggtaaatgtctttttctgggctgcacccccttttaagtaaggcctttaattttaaatgggtctgggaaagatcttcggatgcnttctgtaagggtttaggtcaccaaggaagccagaacttttgggnggaaaacaggatttattaaaatggaaaccgaaccctctccnttctttaccaattaaggntccccgtcaga

SEQ ID NO: 427950 - DNA, 289 bp, Homo Sapiens
  misc_feature (251)..(251): n is a, c, g, or t
  misc_feature (263)..(263): n is a, c, g, or t
  misc_feature (269)..(269): n is a, c, g, or t
aagacagatggtaatatgactgtcctctaaaggaaatggtttctgttgctaggtttttccacttagctaaagtcatcagctgtttgatgaatagacaatagtttggattaaaaaatatttaaaattcttttattgttcacattcaagatttaaacatgaaggccattaggaaatgaatagggggcaaatcaaggagttctaggggcactgggaggcatgtccagggaggaaaagacctctgttttccttcnttatttacaaantgctcntctggaacagggccctcctc

SEQ ID NO: 427951 - DNA, 400 bp, Homo Sapiens
  misc_feature (82)..(174): n is a, c, g, or t
  misc_feature (215)..(215): n is a, c, g, or t
  misc_feature (287)..(287): n is a, c, g, or t
  misc_feature (297)..(297): n is a, c, g, or t
  misc_feature (303)..(303): n is a, c, g, or t
  misc_feature (339)..(339): n is a, c, g, or t
  misc_feature (367)..(367): n is a, c, g, or t
aggcagtggagtgacatcaagtgctgagagaaaacaaaacaaacctgccaacctgggatcctatacccaataacaatatctnnnnnnnnnnnnnnnnnnnnnnnnnnnnnnnnnnnnnnnnnnnnnnnnnnnnnnnnnnnnnnnnnnnnnnnnnnnnnnnnnnnnnnnnnnnnntgtgttgggcagaaggtgtatggtaccaggtgacatttggntctccacaaagaaatatagagtacctgcaataatgtaaaagccatcgaatgtaaagacattgcatgtctaangccaaaacantgcaantatattatgagatttaggacatgtagggataaagcntatgacataataggcacaatcataggcngggctgggaatgttaaatgttatttaggggtag

SEQ ID NO: 427952 - DNA, 285 bp, Homo Sapiens
actctgaggttctcgcggcaagacccaaatggacagtgatttggctgccagctggtgttaaaaacaagccaactccaagaaagttatggattacctctaagtgagaaaaaggaagcattagaacaacaaagaaaagaacaaaagactcaagttctccagcccccaaaattattccatctttatgaaggcaacactgatctccacgagcacaatcatccaaacggagatgggaacccctgttctaactctctcagagggcctgaagttagttttctaggcactctc

SEQ ID NO: 427953 - DNA, 244 bp, Homo Sapiens
  misc_feature (176)..(176): n is a, c, g, or t
  misc_feature (184)..(184): n is a, c, g, or t
  misc_feature (192)..(192): n is a, c, g, or t
  misc_feature (199)..(199): n is a, c, g, or t
  misc_feature (220)..(220): n is a, c, g, or t
agcataaaagtaatgaaatcgctcactccgacttccctgggctctcagctcttcagtggaatggcagaaaaaagtgagaaggaatcaagtccggagtaataaagaaccaaggatgtcaaaaggccccagaatcttcccaacctttcattctcccggccccaataaatcaatattcnaaagtttngccttcancgttttncaagtctccccagttttcgantgttctggcctctttttatttacg

SEQ ID NO: 427954 - DNA, 413 bp, Homo Sapiens
  misc_feature (342)..(342): n is a, c, g, or t
  misc_feature (349)..(349): n is a, c, g, or t
  misc_feature (357)..(357): n is a, c, g, or t
  misc_feature (378)..(378): n is a, c, g, or t
ctaacaaagtcagtgaaaagtaaccgaggttcactccagaaacatgtaaagaaagtaaaattattaaaaggccaaatatttaattcttgtgacattgaatctgcttttattataaagagttaagaaattgccatttccatgacagtttcctccatcaacaatcttaatattgaagcttgaatttaggtctgctgggtcagtgattctagtctagcaaattactttagggactgaaagctcttgtttctttaggaaaatatactatgggagattaggatcctgtttactagtggaggactctgtcttcttttccgggtcaaaacatttttgtgggggaatatncccgttncgtgaacncggggggaaccagggccgggnaaccaaatcttttccttcattttatggaattttcc

SEQ ID NO: 427955 - DNA, 444 bp, Homo Sapiens
  misc_feature (298)..(298): n is a, c, g, or t
  misc_feature (389)..(389): n is a, c, g, or t
  misc_feature (398)..(398): n is a, c, g, or t
agtgtccatcagtaaaagctattggaatggaaatttgattttggcttgtaaagcaaaatgtatctgaaacagatctcagtcaatttagtttattttgccaaggttaagggcatgcacctaggagacaggtctgtgcctttctctgaagatgagaatattgagacttcatatttaaagggaaaaggcaggctggaggggaaagaagaaggtggtcacattactgaatccacatgttgcaagagaaaagaaatagataggggaatagtcaattatgtattcatctcacgctcagtaaatnaacactttacagacaataagggtgaacataggagtaactacctgtgggagatatttaacctcttatctgtaggctctctggcttagggggncaaaagggnaagggcagcttcttgccgtgactcagcttttcagcttaatcttctt

SEQ ID NO: 427956 - DNA, 376 bp, Homo Sapiens
  misc_feature (190)..(217): n is a, c, g, or t
  misc_feature (240)..(333): n is a, c, g, or t
gcaagctgcatatgtgtttcctgtcatcttgacatacagccttggaatggactgtgaatctccactccctatccttccccattccattctcccatgccatatgctcatttatttacccaaacactcgtcaagcacataccatgctcacttatctggtcatgtatttccttagaagcctcaggggctggannnnnnnnnnnnnnnnnnnnnnnnnnnngcgatggagtcttgctctgtctnnnnnnnnnnnnnnnnnnnnnnnnnnnnnnnnnnnnnnnnnnnnnnnnnnnnnnnnnnnnnnnnnnnnnnnnnnnnnnnnnnnnnnnnnnnnnngggactaacagggcgcccggcaactaacggcctgaataatttt

SEQ ID NO: 427957 - DNA, 370 bp, Homo Sapiens
tctgtgactgaaatggtttcagtgtctagaacacgctgtaaatgatatcttcctactggtatggcatcgtccctagatgacatttataacacaccaagcttgaagaaataagcactccaatgacatttttggtgctcccactttaaattcataaaatgtctatggccttcatccagacacaggagaattgagaagttttgtgtatgagaatgacttctcatcccttccgttcttgcatataacttcttagatgatgggatttcctcatttatccaatcctggcaactgttttgtctgggcagaggttaattaacatctaccaggtttacataggtttctttggacatttaacatgctccccgtggacttg

SEQ ID NO: 427958 - DNA, 413 bp, Homo Sapiens
  misc_feature (53)..(53): n is a, c, g, or t
  misc_feature (185)..(185): n is a, c, g, or t
  misc_feature (314)..(314): n is a, c, g, or t
ctgttttcttcagaggaatcactgcggcgattgtagccttatgaaatatattncttaagtaataagactggaaaatctaaattacttcttaatctatgggctgtagaacggatgttgtgttagcaggcattaaaacaatgttaatctccttgcacgtctccatcagagctcttgggtgaccaggnacattgtcaagcagtagtaatatttggaaagaaatcttttttctgagcagtaggtctcaacagtgaactttaaatattcaggtaaaccatgctatgggacagatatactgtcacccacactttgttgtnctatttgtaggagccatagggcaggagtaggatttaggcataattcttaaggggccccaagggattttccaggatgggggaaataaggcattgggcctt

SEQ ID NO: 427959 - DNA, 309 bp, Homo Sapiens
  misc_feature (18)..(18): n is a, c, g, or t
  misc_feature (52)..(52): n is a, c, g, or t
  misc_feature (149)..(149): n is a, c, g, or t
  misc_feature (187)..(187): n is a, c, g, or t
  misc_feature (260)..(260): n is a, c, g, or t
  misc_feature (272)..(272): n is a, c, g, or t
  misc_feature (286)..(286): n is a, c, g, or t
ccacaattatatgggggnaaatacgtaattcaacccatagcatcgtattccngaagcacctagtgaagaaagtaacttgtttatagttatgtgaccaaggaataatcttcagccaaagattccatacacttaccaaatagactttaagnaacaaatgcagtccccacgaccataatagaaaatcctntcacccagtgaggccaaaagcacagagttgtcaccaagcatgattttataaaaatttaatattagtattatgncctgttgttgtnattgttattatggngcccgggatttatctgaacaact

SEQ ID NO: 427960 - DNA, 159 bp, Homo Sapiens
  misc_feature (43)..(43): n is a, c, g, or t
  misc_feature (49)..(49): n is a, c, g, or t
  misc_feature (65)..(65): n is a, c, g, or t
  misc_feature (68)..(68): n is a, c, g, or t
  misc_feature (70)..(70): n is a, c, g, or t
  misc_feature (84)..(84): n is a, c, g, or t
  misc_feature (91)..(91): n is a, c, g, or t
  misc_feature (100)..(103): n is a, c, g, or t
  misc_feature (110)..(110): n is a, c, g, or t
aatcgtgaacggttgaaaaggttgccaaaaataagaaaccaancaatcntgatgcttttcttggnttncntttgagaaggatgnttgaggngggatgtcnnnnaaaattnaaggggaaaattggggaagaaatggggtatgaaaagagatatgatgaaa

SEQ ID NO: 427961 - DNA, 144 bp, Homo Sapiens
  misc_feature (51)..(51): n is a, c, g, or t
  misc_feature (87)..(87): n is a, c, g, or t
tcattacttcttaatccttaggggttgcattcaacagggctagatgtgggncattactaggacagagggttctgggatgccttgggnctatggacctttgcccatttctgcctttcattaaaaataaaaccaagagggagggca

SEQ ID NO: 427962 - DNA, 398 bp, Homo Sapiens
  misc_feature (44)..(44): n is a, c, g, or t
  misc_feature (84)..(84): n is a, c, g, or t
  misc_feature (104)..(104): n is a, c, g, or t
  misc_feature (175)..(175): n is a, c, g, or t
  misc_feature (239)..(239): n is a, c, g, or t
  misc_feature (318)..(318): n is a, c, g, or t
  misc_feature (342)..(342): n is a, c, g, or t
  misc_feature (360)..(360): n is a, c, g, or t
acatatataaatgctactgattttgtatgttgattttgtatccngcaattgtactaaactcatttatcagtgttaacaattttntgtggagtctttaggtttcnctaggtatgagaccatgtcatctgtgaacaaggctaatttgacttctttctttccaatttggatgcccttnatttctttatcttgcttaattgctctggccagggacttctagtattatgctgaataacagtggnaaaagtagccattcttatcttcttccactcctaagagaaaaggctgtcaatttctccccatacaatatgatgttaggcnatgaggtttgtcatttatgggccnttattattttgaggggangctccctctataccccttttgatgaggggcttttatcc

SEQ ID NO: 427963 - DNA, 340 bp, Homo Sapiens
  misc_feature (96)..(234): n is a, c, g, or t
aaaagctactatactcccttctttctgaatcaaaaacattcagagataagaattagatggaagtaaagctccctgtggtttgtgctccatcacaannnnnnnnnnnnnnnnnnnnnnnnnnnnnnnnnnnnnnnnnnnnnnnnnnnnnnnnnnnnnnnnnnnnnnnnnnnnnnnnnnnnnnnnnnnnnnnnnnnnnnnnnnnnnnnnnnnnnnnnnnnnnnnnnnnnnnnnnnncagccttcatcacaattttttatggaaacagaatacaaagcagcaggaagctctaagtgtccagattcaagttttcatgttggtgccttctttaaatttacttttt

SEQ ID NO: 427964 - DNA, 437 bp, Homo Sapiens
  misc_feature (32)..(32): n is a, c, g, or t
  misc_feature (43)..(43): n is a, c, g, or t
  misc_feature (110)..(110): n is a, c, g, or t
  misc_feature (133)..(133): n is a, c, g, or t
  misc_feature (141)..(141): n is a, c, g, or t
  misc_feature (147)..(147): n is a, c, g, or t
  misc_feature (245)..(245): n is a, c, g, or t
  misc_feature (324)..(324): n is a, c, g, or t
  misc_feature (337)..(337): n is a, c, g, or t
  misc_feature (354)..(354): n is a, c, g, or t
  misc_feature (369)..(369): n is a, c, g, or t
  misc_feature (394)..(394): n is a, c, g, or t
ttctgtacccgggatctgagagtcaacacagnaccttgaaatncccgcaccgcttcccttccaccccgtgtaaattcagggcgtctccgtgagagtccggcgctcgcttncctgtgtgttaaaatcgctcggngaacgggntcctgntccccgcttcgttctggccttgggccaggtaaacacggattttcgagactcctttccgcttaaaactctttactgacccaatgtcctggccccggcgncttttaaaagtccttaccgcaagtggattcccgcccggggagcctcccaaccttgcccccggcccctgaagcgcaggcngcagcccccagtnccggcgggggaggccgngttctgtgctgggtnctgggaccttgagaacccacacttntaataattaggcccaccctttttcttccttgatcgggctttct

SEQ ID NO: 427965 - DNA, 191 bp, Homo Sapiens
  misc_feature (61)..(61): n is a, c, g, or t
  misc_feature (123)..(123): n is a, c, g, or t
  misc_feature (135)..(135): n is a, c, g, or t
  misc_feature (168)..(168): n is a, c, g, or t
  misc_feature (174)..(174): n is a, c, g, or t
gattcagttttattaggctgattagcaataatttgcaaaaactgtttaaacaagtcatggnaaataaaatgaaaatttaattagcaccagtgtcaagggtaaaaaagcaattaatattaaacnctaatgtgaagntactgttcttttgtttttaattattcaataccncactgngcagattttgattattt

SEQ ID NO: 427966 - DNA, 388 bp, Homo Sapiens
  misc_feature (212)..(212): n is a, c, g, or t
  misc_feature (366)..(366): n is a, c, g, or t
attctgaggacttgttggctcaattgcttggacataaagacacacatacatgaagctggagagataggaagaagcgctcaacacagaacaccctaagtatccctactccctttcaaggactaaatcccttcagagatttcctttgcttcagtccttcaggagcctcccgaagatgctaggagtcgtttaagaaggctggaagatggccgttnggaaggaactgttggtagctggcaatacttcatcccaaggaggcggtggcaatagctccctggggcagcagacatcatggattttcctccctctgggaaccagaggtccctccgtttctggtttgaatcccttagagacaaagaactttcattnttttcccataacccgcgtgggg

SEQ ID NO: 427967 - DNA, 486 bp, Homo Sapiens
  misc_feature (362)..(362): n is a, c, g, or t
  misc_feature (377)..(377): n is a, c, g, or t
  misc_feature (386)..(386): n is a, c, g, or t
  misc_feature (414)..(414): n is a, c, g, or t
  misc_feature (426)..(426): n is a, c, g, or t
  misc_feature (441)..(441): n is a, c, g, or t
ctgtagatggagtcctcaggggccctttacctgatggaggggaaatacttcacttggtggagagaggctccagcttcccccttgtgatggggagagtggatgctgacaatcagttcccaaaggtgagcccaggtggagcactgcttgaggaaggcctgagtctgtttttttggtacatccatcggcctgtaagggtctgtattatggctgtgaatatatgttttcaggacagccccctggatgagagataagagagttcctgggctcaaaaaaggacaagattctttactgagattgggaagtatgggctacttagaaacgttggagcagccacccctggcattccacatgttcaccatttnttaggatcttgggcntctctgtgnaggtttttgcaccaatgctgggcagccnggggcaggggcntcggcttcctttttnttttccatttcagacaggtaaccctgcagatgttaaacaaggttt

SEQ ID NO: 427968 - DNA, 339 bp, Homo Sapiens
  misc_feature (276)..(276): n is a, c, g, or t
  misc_feature (298)..(298): n is a, c, g, or t
aattcggcaagaggactccaatgattttactttctttgcttggcttaatatccgtggatcttgctatcttctcttgagaagaacttggcctttcattctaatgactcacaaaagaaaaggcaatgacacctggggcacatatgtttttctaagtcacttgaaaaattctctttgaccttttctttcaagtagatttttttaaatgcatgactggagaattatcttcaatgattcatgatgagaggcaggtagggattggttaagaagtatgagccnggaaaaattatttgtttaatcncctggaagggcaccatcttttccagtccaaaagggccccaa

SEQ ID NO: 427969 - DNA, 430 bp, Homo Sapiens
  misc_feature (345)..(345): n is a, c, g, or t
  misc_feature (351)..(351): n is a, c, g, or t
  misc_feature (360)..(360): n is a, c, g, or t
  misc_feature (387)..(387): n is a, c, g, or t
  misc_feature (401)..(401): n is a, c, g, or t
tcatggtaattattttacctttcccaactgggagttactatgctattaaaataatggcctaaggagtttacatagcatgcatttaaatattaagagaatctatttgtgtttttctgttggacatttttgtcttaattgatctatttcttccacattaatatgtattagtcttaataaagacactggctatgttcaagtggccaaagatagaccacttttctaagagtttattcagaagaaatatctcatccaaagttaccttcaatgcaagcttcacaatttgacaatgtggcatttgggaaccataaatcccggggccgggggttttctacttcaggggaattngattcnggaggaagnttaatttcccaaatatggagtggggtnaggggggaactttngggcccaaggtttataggcctatttatta

SEQ ID NO: 427970 - DNA, 320 bp, Homo Sapiens
  misc_feature (25)..(25): n is a, c, g, or t
  misc_feature (40)..(40): n is a, c, g, or t
  misc_feature (50)..(50): n is a, c, g, or t
  misc_feature (74)..(74): n is a, c, g, or t
  misc_feature (94)..(94): n is a, c, g, or t
  misc_feature (100)..(100): n is a, c, g, or t
  misc_feature (110)..(110): n is a, c, g, or t
  misc_feature (157)..(157): n is a, c, g, or t
  misc_feature (173)..(173): n is a, c, g, or t
  misc_feature (179)..(179): n is a, c, g, or t
  misc_feature (187)..(187): n is a, c, g, or t
  misc_feature (198)..(198): n is a, c, g, or t
  misc_feature (230)..(230): n is a, c, g, or t
  misc_feature (256)..(256): n is a, c, g, or t
ctttgaaagttgttgttttcccagncagacccattatagnacactactgnacagacatagctctagatgttatnccaaaacagactgagtggtncattancatgaaaagncaccaaaacttgaggtggtcctttaaagataattctcagtgtagtgnacagtacagaaacagnacgggncatacagnacacattcagnactagtgcagataatacctgttcagattaggnaaaacaagatctaactgctgacctgnaataatgaggctctaagttgattaaggataaattgactcactttcatccttctatcacctaccc

SEQ ID NO: 427971 - DNA, 109 bp, Homo Sapiens
  misc_feature (49)..(49): n is a, c, g, or t
  misc_feature (53)..(53): n is a, c, g, or t
  misc_feature (60)..(60): n is a, c, g, or t
  misc_feature (65)..(65): n is a, c, g, or t
acctagtcatgcttggagcccacgctctgccactggggtccttttgtcngtgncacaggncaggntgagttaccagattcaggattcaggagaggcacctgtaccccag

SEQ ID NO: 427972 - DNA, 138 bp, Homo Sapiens
tgaaatagagtaccttaaaatagactgatcagtaaatgttaatttgaaactgactgataaatgttacttggaagtttttgggcagaaaagttaattatggaagctgctcctttttgcacactgaagtttctgaaatta

SEQ ID NO: 427973 - DNA, 214 bp, Homo Sapiens
  misc_feature (70)..(70): n is a, c, g, or t
  misc_feature (97)..(97): n is a, c, g, or t
  misc_feature (149)..(149): n is a, c, g, or t
gggactttgataagaattgcattaaatttgtaaatcaattttggaagaactgacatctttattgaatctnccagtttatgaacatggtatatctctncatttatttagatcacctttgattcctttcctcagcattgtatagttttgancatctaagtcttatacgtatttggctaggatatacatttaagtttttcatgtcataggaattata

SEQ ID NO: 427974 - DNA, 458 bp, Homo Sapiens
  misc_feature (390)..(390): n is a, c, g, or t
  misc_feature (396)..(396): n is a, c, g, or t
  misc_feature (443)..(443): n is a, c, g, or t
tacattgctacagcccagatttccaatgaccttgagaggtctatgcgtgggtatgtacatcctgatgtgggttactcatttcccatgtaatcttacaggtcctttatttctgcccaaatgtgagaggctccagtaaagtttctagctagaagtaattataatctatagaggtggttgatagaattattttcatgctcagtgttttcctttagggtctctattctccaaatcttgcagggtaaagtaggtcctttattcaggggaaggatggatgacggttcataattgcagggcctaggaggaggaaagctggtcaattggtccataacatttccacagggaacatccaaacagaggctcctttagtttgaggggcatctccaatttcantgaggnggaggccagtcttcactggtagtgttgatccggattgacagagggtngggccaaggcccgtt

SEQ ID NO: 427975 - DNA, 392 bp, Homo Sapiens
ttttatagtatcttaaatatgaagtacttttcattagacaggggaacttgagagaatgttgtgtaatataatgttgtttgcctaccacaaacccatcctctaacccccatcctcttcttccttgctagaaaagtcctatttgttccatctcctttaggtagccaggtccttaagaggcaactgcatgcctctcaggtcctaagatgatcgtgtaaacatcattccccttatgtgattattttagggcataaatatgttgtcatgccataggagttgacttcatgtgggccaatgttctttaaggggtagtcttctggaatggatttatgtgtaggaatattcttactcttttaaatgggccggaactgccccgggcgcgggtgggcttcccc

SEQ ID NO: 427976 - DNA, 378 bp, Homo Sapiens
  misc_feature (307)..(307): n is a, c, g, or t
  misc_feature (329)..(329): n is a, c, g, or t
  misc_feature (359)..(359): n is a, c, g, or t
cagaaacatggctttaccagtatgaccctcaagacaaaatacaaaacaatggctaccaagaggtggaagtggcccagtcacagcaagagcagattgatcaagagcaaaggtcatggtaacagttttttggatcctcaagtcattttgcttgttgactttttggagggccaaataaagatatcatctgcttattatgagagtgtttcgagagaaatccaaagcttagcagagaaacgcctggggaaagcttcaccagagggtcttccaccgtgacagttcccctggcggcattcctcttcattaaagncaaggggcagtttagctaggantttctattcaaaaatcatttagggtatccntcttcccagtccttgattt

SEQ ID NO: 427977 - DNA, 325 bp, Homo Sapiens
  misc_feature (265)..(279): n is a, c, g, or t
  misc_feature (295)..(295): n is a, c, g, or t
  misc_feature (313)..(313): n is a, c, g, or t
agttagagtactaaagaggaaagaaccatccaaagattccccttgccccagtcggtactcagcagaatactgatcagtgcagtcatgtgtgtggtaactactcaaggtcaagagaaacctatctgaaaggattcgaggatagtgcctgatgtgtgttctgggctgagaacagtgcctgttttcaccagttagactgggcaaaacacatacaggcctatcttaatttattgtgctttggtttgctggcactttgtaggatattgcnnnnnnnnnnnnnnnaaacaaattgatgggnttgtgggcagcctgcatnccagcaagcctg

SEQ ID NO: 427978 - DNA, 479 bp, Homo Sapiens
  misc_feature (456)..(456): n is a, c, g, or t
ttgtagttgtgtgtggttctcgagtggctgcgcatgtgaacacgtgtgatttctcagtgtactgtactgtgatttgtttttattgcttgttttgtttcccctcagtgtctgtaacccttagcaggctctgacctagtcaggctagaagaagcataaggatcttttattgctttgtgctgggtgagggctggccctaaacatctgcctaatcctttcaacgggcccagggaaaagccagactggcattcatgtccacagcatcgcttaatatcgttggttgtcatccagacacctcaacttgtgctggcagagggaaataagttccttcttcacggatgcatcatggatgggatatttgaaacctgcaggggtggcaggaacttaacacctgtttccatccatcgtggggatgtttaaaggatttggggttaacatggcccaagccggttaaggccnttggggtggggggccatggagga

SEQ ID NO: 427979 - DNA, 427 bp, Homo Sapiens
  misc_feature (387)..(387): n is a, c, g, or t
aattggcatacatttaaaacatcccttaattcatattataagcggatgaatacttggagtccagttgcaggttcacctacaatctataaccttccatgtggctgggttaaccttctccctccgtctgcacctttcactcatttatccgtagaagcaattatcaggctgcagaaaatataaggcacacagagccttcgaaatacaacgtggtagggggattaatttggcaaatgacttttaaaaagtctgatgttgtaaaacagtgtgagggaggtaagtagggcagagggaacaaggggcactctgtcgctttctgctcctggagcaggaattttatccacacctcttatggataggcagccttcacctccttacttcaccttcctnatggaaaacaagttcgcggacaccttaggcccatttttga

SEQ ID NO: 427980 - DNA, 364 bp, Homo Sapiens
  misc_feature (16)..(16): n is a, c, g, or t
  misc_feature (193)..(193): n is a, c, g, or t
  misc_feature (270)..(270): n is a, c, g, or t
  misc_feature (326)..(326): n is a, c, g, or t
  misc_feature (339)..(339): n is a, c, g, or t
tggtaaacatgttgtnccaactctgcaccgtatctgtagttatctagattcccactggcgcttgggggtctcattcagaaaacaccaatccctaggagagaccaagtgagattgcctaccctttaggaattctgcctgtcagactggcccagggtaaaaccacaggtcagtcaaactcgtcctcttcagccgnccacggtgggcttcccgaacctgctttgtgggtattcaccacagggaagtcaagggctatcacgtgggctccccgantccccaagggaaggccgtggggccattcccttcccctttcagtcttttttacaggntacctccttcacntcaggaggtcacctgttcctggccc

SEQ ID NO: 427981 - DNA, 413 bp, Homo Sapiens
  misc_feature (122)..(181): n is a, c, g, or t
  misc_feature (350)..(350): n is a, c, g, or t
  misc_feature (365)..(365): n is a, c, g, or t
aaaccattgggactttaaatgtaaaatttatacaaggattatttatagtcccttatgtgtgcatgtgcaaggagtactatgcttgaagtcagaaaaaacgcatttgatttctggccacaagnnnnnnnnnnnnnnnnnnnnnnnnnnnnnnnnnnnnnnnnnnnnnnnnnnnnnnnnnnnntgaaagagtgtccccatctagcattcaaattctttgggaatctagactgatacctgaaaatcaagccatacattgttttcatggaattatctcatttactctacataatagtgtatgggagggcaatgagggacaggataaatttctccctagtttaatatggattaangggggcttgggaggngtcagtggggacttgccccaggggtggacacacacagtttgtggacag

SEQ ID NO: 427982 - DNA, 378 bp, Homo Sapiens
  misc_feature (254)..(254): n is a, c, g, or t
  misc_feature (302)..(302): n is a, c, g, or t
  misc_feature (320)..(320): n is a, c, g, or t
aatgtatggaattaataataccaaaattaattatttgatggaaagatctgctttgactaaatgtcaaaaatctgcaaaccaaagacattatcttcccctcatcccaactcaactacgaaacttaaaattccttttagagtgataggacatttagtaaagtatttgcaaacttaaaaaaaggaacatttaatgatcatcaaaattaagtacagattcagtaatgtaggaccagaccacacaccaggcacctgtgnggtcttcatctcagatcacaggctctcagcataggggctttcatggcntcaccgcctctacagggnttaagggctgcccggtcaatttggggatttttggcgtggtactggggggccaaaatct

SEQ ID NO: 427983 - DNA, 325 bp, Homo Sapiens
  misc_feature (172)..(172): n is a, c, g, or t
  misc_feature (194)..(204): n is a, c, g, or t
  misc_feature (215)..(215): n is a, c, g, or t
  misc_feature (233)..(233): n is a, c, g, or t
  misc_feature (262)..(262): n is a, c, g, or t
  misc_feature (286)..(286): n is a, c, g, or t
  misc_feature (291)..(291): n is a, c, g, or t
  misc_feature (315)..(315): n is a, c, g, or t
aaagtattgtaaattatttctctcaaatttagagttattacagtttatatcaaattcaaaatgcttaatttgcttttgtgataaagagcaatagaaggtggtgagatttccattgtacagcctccaggtatgcatttcaaatgtaggacttcttaaatgatcgggctcagcntgtgctgcctagggtagtctgnnnnnnnnnnnaatggtcattntacataatcattttcccnttccctaagcaccaaatggaagtttaacntctggagttagccttttggaaagncaccnttttgtggggggtagggggctacntgtttaccca

SEQ ID NO: 427984 - DNA, 125 bp, Homo Sapiens
  misc_feature (45)..(45): n is a, c, g, or t
  misc_feature (47)..(47): n is a, c, g, or t
  misc_feature (71)..(71): n is a, c, g, or t
ccgaacttcaagttatactttgtctaagagagaaatttccacatntngctttcatacacctcttgaggatnttattatattaaaatctatcattaagttctcaaaaaaagtgttcaaaccaataa

SEQ ID NO: 427985 - DNA, 281 bp, Homo Sapiens
  misc_feature (21)..(21): n is a, c, g, or t
  misc_feature (96)..(96): n is a, c, g, or t
  misc_feature (180)..(180): n is a, c, g, or t
  misc_feature (204)..(204): n is a, c, g, or t
  misc_feature (248)..(248): n is a, c, g, or t
tagaaataatgaacaaatctncactgagcataacccatgatgcatagtactgcagaacagtgctgtacagtgctcttcagggcctcacaggaggtncagatgggtgccgttgacaacacagagagaagagagaacctaaacaatgaaacaagtcccctgcccacgtgctgtcagacactngagaaaagatcagaaccaaagaanagccactgaggcaaacacaatgggccttatcttattacctttgnttgtgggcacaatgcaggactaggacagcactg

SEQ ID NO: 427986 - DNA, 404 bp, Homo Sapiens
  misc_feature (331)..(331): n is a, c, g, or t
  misc_feature (374)..(374): n is a, c, g, or t
  misc_feature (383)..(383): n is a, c, g, or t
cacctatcaagaattgttcccacttccttcaactttggtggtaggatctaggagcaatctgattgtctcaaggttgcccaaattgcccacttgttcctactcagtggctaatacattcacatcttttctaaaagactcagatctccatggtggtgtgtgcatactgttaatgaattaacagtgtttatggcctctggatgaaatcgttcttaaggaatatcctaaaaggaacttgctaactgctactgggatattttaggtaattaggagtctggggagctaggctgtaggatttggggtctcaggatccaggccactttacttaggctcntatggacagtggggtccatatttattttaaggttatggaaccntcaggcttncattattttggcagggatagg

SEQ ID NO: 427987 - DNA, 426 bp, Homo Sapiens
  misc_feature (375)..(375): n is a, c, g, or t
  misc_feature (381)..(381): n is a, c, g, or t
  misc_feature (399)..(399): n is a, c, g, or t
ttatatgtgccaaaaatacactgaaaacactaggttggctgagtgtgcaaacaatataatccaaagatttcttgtattaagaatgataaaacctcttatttccatacactgtattgtcccaaatcatcaacctggccctgcggtcctcatgatttattgctctcagctggtaacttggcgaggcagcgggcagagcgtgtcaggccttctgtactcacgcaccagcctttaacgcctgctgctccaaccagcagagcaggaaagttggggagggacagtgttgaagcctcggccatctgaggcgttgcattcttcgcgctgcctcccccgggagccctctggttccttctcgggagttcagcagaagctcctctncctctnggcacagggacacatggnccttcggagtaggaatcagcagaggca

SEQ ID NO: 427988 - DNA, 224 bp, Homo Sapiens
  misc_feature (132)..(132): n is a, c, g, or t
  misc_feature (180)..(180): n is a, c, g, or t
  misc_feature (202)..(202): n is a, c, g, or t
cctcaatagcttcccagcctacttttcagagttgtcatgagaaccagggaaagtgtgtaaggaaacttaggaagaaagtgttttgtataccctcttcaaggatgtgaaaaacctatgggacttaattatttnttgtcctgcctcggatgtttccttctttggcatggatgtctttcaggnttcaaggagtttgggttttccnttaggcttagggaaggaggggg

SEQ ID NO: 427989 - DNA, 423 bp, Homo Sapiens
  misc_feature (327)..(327): n is a, c, g, or t
  misc_feature (352)..(352): n is a, c, g, or t
  misc_feature (401)..(401): n is a, c, g, or t
aattttgtgacaaggatgtatagtccattaaggaatatatacaacagaagaagcatttaagtggacttgaggtttgtgaatctgaactagtttctatcgactttcacatcagcagctcctattctggggaaagagaatggaggctgggagtgatcctgacaaaccttgatgtgcaggcttgtggagaaactggattcacacccagggctcgtggagtgtgggagaggctggcctgtcacaatatcaggacagcctctcttaataacactgcagaaggaatcgagggccctgtggtttgcggtcagtgtgcctcttgtgccaactttngcacttacaatgtctttcaatcacnttatctttccaaaccggctcttcatcctatggtccttatttctggctantggtattcaattctcttatttc

SEQ ID NO: 427990 - DNA, 314 bp, Homo Sapiens
  misc_feature (50)..(51): n is a, c, g, or t
  misc_feature (100)..(100): n is a, c, g, or t
  misc_feature (234)..(234): n is a, c, g, or t
  misc_feature (282)..(282): n is a, c, g, or t
  misc_feature (302)..(302): n is a, c, g, or t
acttgtagctgagactacaagcgtgtgcctctatacctggctaatttttnntattttaagtagagatggggtcttgaactcctgagctgaagcatatccntccaccgtggccttccaaagtaccaggattacaggcatgagcaccacacccagccagattttaatttctcattatatactacgcaaacatatactaaggccagcaggagtatatatatgtgtactgtacttgantttcacatccattttcttcgacattaggcaactggggaaatactggangggaagtttcaaaatatttnagtgtgggccag

SEQ ID NO: 427991 - DNA, 149 bp, Homo Sapiens
  misc_feature (128)..(128): n is a, c, g, or t
atggacagtagcttatgcgaaataaaacctttggtctttttagtgaactatttttattatgatgaaatgagatcatactaaccttctcccataacttgtaacactaaaatctttaaatcagacagatnatctcacaagtacaatttttg

SEQ ID NO: 427992 - DNA, 218 bp, Homo Sapiens
  misc_feature (155)..(156): n is a, c, g, or t
  misc_feature (190)..(190): n is a, c, g, or t
  misc_feature (206)..(206): n is a, c, g, or t
acttttcaagtaacttcagttactccattgaaaaccactaaattggttatgtgatactgattaacacacttcccttgaaattcacaaacttcccttgagctgagatatcaggtagaatatattcaaggcaaatgtatttaacagagttattgggnncttactatttgccaagccctgggaatacagaggnggaggagagggacatnttactaggtttt

SEQ ID NO: 427993 - DNA, 334 bp, Homo Sapiens
  misc_feature (50)..(104): n is a, c, g, or t
  misc_feature (126)..(243): n is a, c, g, or t
  misc_feature (309)..(309): n is a, c, g, or t
ttacttcttggagtgggttgtatttaaattttttaaaaaccaccaatgannnnnnnnnnnnnnnnnnnnnnnnnnnnnnnnnnnnnnnnnnnnnnnnnnnnnnnttattttaccagctctgtgatnnnnnnnnnnnnnnnnnnnnnnnnnnnnnnnnnnnnnnnnnnnnnnnnnnnnnnnnnnnnnnnnnnnnnnnnnnnnnnnnnnnnnnnnnnnnnnnnnnnnnnnnnnnnnnnnnnnnnntaggtaattaacaattaggctaaatgttactttcccaatgttatgtgggggttaggtaagtggggnaaaacctacccggattcccattctg

SEQ ID NO: 427994 - DNA, 497 bp, Homo Sapiens
  misc_feature (397)..(397): n is a, c, g, or t
  misc_feature (433)..(433): n is a, c, g, or t
  misc_feature (457)..(457): n is a, c, g, or t
gaaattccccttttaaaatcccttaccattagtttgccttcccacccattctaatattctagtattagtctccaagtgtgttgctatctgtcctatgtatcttaagtaatgaagaagctcagagctaacaggtcaatttccccagcaatccttccagtgggaaaataaagagaaattacctttgtgagttgtgttttagggcatctggctcattcagcatggatttttccatttgcctgtggtggttaaccagcctgcagtgaagaggaattgcccatctgtagtcagaaaattgggagtggtgacatatatttcctcccttgagtgacacagaggagttccctcttcatcatcaattcacttaggaagggaccattttcaatagaaaaatgtaccnggattctttgccccatgtttcaggaaaggcccagcntaagggatttctccaaaccatttncattttcagtttcaggcttttgtggacctaatttcccccc

SEQ ID NO: 427995 - DNA, 475 bp, Homo Sapiens
  misc_feature (291)..(291): n is a, c, g, or t
  misc_feature (343)..(343): n is a, c, g, or t
  misc_feature (365)..(365): n is a, c, g, or t
  misc_feature (370)..(370): n is a, c, g, or t
  misc_feature (394)..(394): n is a, c, g, or t
  misc_feature (413)..(413): n is a, c, g, or t
  misc_feature (420)..(420): n is a, c, g, or t
  misc_feature (425)..(425): n is a, c, g, or t
  misc_feature (434)..(434): n is a, c, g, or t
  misc_feature (450)..(450): n is a, c, g, or t
aacatgatagagattttattggaagaaactaaagataaaccaacagttatcacacgtagtttcactgctatgctctttcaaaatatatctggcatgattattatttttattatatatgaaggaaaaggaaatcaacataacatgtatgttatataattatttttgaggacttgatttgtaaatctcagtaaataaccaagaatggaacctattacttaatctgtatgaaatgttttatctacttacccctctcttaacccaagacagcttttcaatcaagctgcttgaggnccatttattatgaaattttgcatgcttatcacctaatactactgggcttggncactaggtagggcactccaatnaaatnatttgttttaatcccatttaaccntttattccaaaaccaaatnttccccnttttnttccatatntccactcccatctggncccgtggcacccccgggcatccttt

SEQ ID NO: 427996 - DNA, 511 bp, Homo Sapiens
  misc_feature (290)..(290): n is a, c, g, or t
  misc_feature (402)..(402): n is a, c, g, or t
  misc_feature (441)..(441): n is a, c, g, or t
  misc_feature (469)..(469): n is a, c, g, or t
  misc_feature (498)..(498): n is a, c, g, or t
gaacaagaaagagagagggactttccaaacagatgaacaaaaacctgcagggaataggagatttggataagaattgacaataatttcctgagggtcttgggagttgaggggatatgctagatgagatcagattaggagattagaggccaggtaatcagggtaacctggattttcaggttcattccggagaccagtgtattccttgcttaggaggtatcaaatggaatgttgtgtttttccatacttggttacttggttctaaacaaataaagttattaaaggaccagagnattgagttatttcaagtttgtcagaaatttagtggccctaactgggaggctttttcatggacaaataaccaaattaggatgttgtttgagccccgctgtgtgttaggatgtnttaggctgggtttgtcttgattagagggttagttttttnattccccttaaccaggcaccgcccaccnccaggcttcctgacccttcttggcccttnaaaaagctcccct

SEQ ID NO: 427997 - DNA, 486 bp, Homo Sapiens
  misc_feature (316)..(316): n is a, c, g, or t
  misc_feature (341)..(341): n is a, c, g, or t
  misc_feature (404)..(404): n is a, c, g, or t
  misc_feature (420)..(420): n is a, c, g, or t
  misc_feature (425)..(425): n is a, c, g, or t
  misc_feature (459)..(459): n is a, c, g, or t
aaaagtaatctgaaaaaagatgatgtggtagttaaaatgaatttgaatcatgtattctttttaccacagaatgatttcataaccttgagaaagtcactgacctcctatatgcctctattcttatctctttaaagtaaagctaatatcttcaccttattatctacttcagtaatgaaggtgtaaagactaataaccataaaaagcacatcaggctttctggaagtcaggctcagtataaatataaagtatttatgaagcagagcacagcacgaatttataaatctaaagacaaagttttttttaatgtatcttgggnaaaaaaatacacagggggaaattanatcatctttggatattcatttttctggaaggtactcctgtgtccaccctattccctgccattntttggtctggatggangggcntgggggaattttttatgtcgttgccaccttggcnttccggtttggccttccccttgctggg

SEQ ID NO: 427998 - DNA, 132 bp, Homo Sapiens
ttttttactctgaaaaaaatagggtatttgaatcaaataattcaattggatttttttcttgggatatttaaaataaattactagacaccccaatgtgccaggtatactttgaagttacttctttaaaaccac

SEQ ID NO: 427999 - DNA, 128 bp, Homo Sapiens
ggcacattaaatatgttgtgtgtgggatatacggagtgtgtgtggcacatatatatgaggtgtgtgtatatttatggtttaacgggaattgggcctcttccggggaattttaaggtatggtggatatc

SEQ ID NO: 428000 - DNA, 538 bp, Homo Sapiens
  misc_feature (438)..(438): n is a, c, g, or t
  misc_feature (522)..(522): n is a, c, g, or t
tgaaaatgggtagtagaagtatgatgatattatttcgtggtaatgaatttacctttatgacagatcattatccccttctgtagctgaactggatgaaggacaagtctagcagaataacctggtagtacttggatttattggctttaaatttttaagctggaaaaatgcagtagcagccaggttatctctgtatgaatgttgcagaggaggacagagatgaaggaagtcacattttctttctagtaatggtagaaagcaggtgatgatgacagtcttttaacgaaacatgaatgcagttgctcatatgctttgccattttagtgcacaagtcaaggagtaaatgagtaggaaaaaaatccataagatatcatcatccatccaataataaaaaattggctttaaggtctccatttggagtgtttacaccatagggaaagngccaaaggttttctttttttaaaatggaggtttaggacgaggacttcccctcttccgggtgttgtattaattcccgggggtccntggccttttaaagggc

SEQ ID NO: 428001 - DNA, 102 bp, Homo Sapiens
  misc_feature (54)..(54): n is a, c, g, or t
caaacatgacttcaagtaataatagcactttctgtgttccttcctagcactttngattaaaatgtgtcgtttaatctgtacaacatccctgccaagtagcca

SEQ ID NO: 428002 - DNA, 423 bp, Homo Sapiens
  misc_feature (345)..(345): n is a, c, g, or t
ccagaaatccccattagccgacatctctttcataggccagactccagataatgatgtaggaatttccagttcactacacatttctacttcctaagatggggtggcttgcatttctccacccatgaacttccaggacatgccctcctacgtctcctcctttaaatccctctgtcttcagtcccatacagaggtgagaacttctaccttttccctttgagaagcaggccgggaggattggaaccaattcacagtttagtaactaggaattcaggtattataaacttttccagggttgcttttcctattgtttcattattattatcaaagttgatcctcacttattcnagggtaggctcttgggcccttttgtttccacttcagtatttcttcttgataaactccaggtgtggcaggactttgtct

SEQ ID NO: 428003 - DNA, 411 bp, Homo Sapiens
  misc_feature (102)..(102): n is a, c, g, or t
  misc_feature (258)..(258): n is a, c, g, or t
  misc_feature (271)..(271): n is a, c, g, or t
  misc_feature (339)..(339): n is a, c, g, or t
  misc_feature (345)..(345): n is a, c, g, or t
  misc_feature (359)..(359): n is a, c, g, or t
cccagataacttctttctaatttttattgcaggatattctgttcattactataggcctcaagggactcaaaaatgtcccttcgttcaactacaaaaagagtntttccaacctgttgaaacaaaacaaaggtttaaatctgtgaggtgaatccacacatggcaaagcattttcacacatagcttgtttctagtttttatagcaggatattcgttttttcactataggcctcaatgtgctcagaaatgtcccttcacagnttttaccaacagngcatctttaacctgggggaagtaaaacacaggttgcattcagtgagattaatatacattttcgtaggntaactngtttctcatttatntcacaggttattcaattttttactatagggcttcaatgggtctcaggaaatg

SEQ ID NO: 428004 - DNA, 195 bp, Homo Sapiens
gaacttggtaaactgtggaaatgttcaggttggcagtaataaaaccactttttaattagctgctgtactacctggttattttttatctttatatttcagtaatgtatgttttactcgatggagcagtctactgtgcaagtggggagaatatgataaagttgggaggagcagataaatagaatattgacattatgg

SEQ ID NO: 428005 - DNA, 284 bp, Homo Sapiens
  misc_feature (17)..(17): n is a, c, g, or t
  misc_feature (49)..(49): n is a, c, g, or t
gaaaggacccggagcgngtttcctgctctaaatcctgcccccacgggtngggactggggcagaatcccatcagtgaataaaggctgcagagtgaaggatggtccctggcgagtgtacctgtgtcccagtcttcttgcctgagggcgccttcccacccatgtgaggagtggggaaggagcaccccttctctactaggccccagggttctcagagcgggctctgtcctcaccccagctggctcccacaaggccctcctggccccagactctgttggacccccaact

SEQ ID NO: 428006 - DNA, 502 bp, Homo Sapiens
  misc_feature (405)..(405): n is a, c, g, or t
  misc_feature (414)..(414): n is a, c, g, or t
  misc_feature (421)..(421): n is a, c, g, or t
tttcctgtgttgtggattcttcctcaagaaatgtttgcttagtccactgtccaagagagttttccccaaagttttcttgtagtagtttcatagctttaggtcttagatttaagtgtttaatccattttcgtttgatttttgtatatggggggagataggactctagtttcattcttctacatgtgggtatccttttttcccagcacaatttattgaagagactgttctttccctaaggtatgttttttgcacttttgtcaaaaatgagttctctgtaggatgtatgggatttgcttctggggtttctctgttctgttccattgggtctatgtgtctgtttttatggccagtatttgatcattacttttatggaaatctactttttgagtaggtaattactattcntttatggcntttcccnctaaaaaggtttttcaggggaaatatccattcatggcttaaggcaatccaaaggtataggggattaaataatccgtaaccg

SEQ ID NO: 428007 - DNA, 455 bp, Homo Sapiens
  misc_feature (83)..(83): n is a, c, g, or t
  misc_feature (392)..(392): n is a, c, g, or t
  misc_feature (401)..(401): n is a, c, g, or t
  misc_feature (414)..(414): n is a, c, g, or t
  misc_feature (420)..(420): n is a, c, g, or t
  misc_feature (434)..(434): n is a, c, g, or t
tttgtgacagcaagaacacatggacagctgctggggcatttctaacacagcccttctcaggcagagatcttggctggggacanatgactccatcctccaggagaggacaagccatgcgcatctctaattagaacccaggctggaacattcagcttaatgagctgggagttggaaacgctcagctggaaacgagttggtctggcagaaaggacataggactgagggacacattttctaaactctgtcctcatctcagttgttaatcatcttcttgcttctgtcttatccattcagttggttattagactgtgttatttgtggcatttgcctcaagtttcaggagtgaacatgccgttaaatatatttggacgatgggctttaaatggggtggntttttcccnataggtcttcctngggganggtcgctcccatgnttgccccaatacttggggcag

SEQ ID NO: 428008 - DNA, 443 bp, Homo Sapiens
  misc_feature (98)..(98): n is a, c, g, or t
  misc_feature (344)..(344): n is a, c, g, or t
  misc_feature (371)..(371): n is a, c, g, or t
  misc_feature (415)..(415): n is a, c, g, or t
tattcttatatattttcttagctaatgattatagtcttcataattacctactaaacaagcttgtttataaaatctatcactctagatgataaatctanattaaatggtacttgctcataattaaaatatctagtgagtgcatatgttgaacagtggtagttttgaagatgtggttgcaatctgtagattctgaacttcttcactatctcttctccaatagatgaattctgctaatagcccctagggatagtaagtgttactgtattaggcaaagcaggcctaggcatattccccttggatttgggtcatctctttaaaaaaacactgggatgcttgttaagggnatttaaacttttgtggtacccatatgnaaggggcctcattaaaggtattctggaagggggttaaaaaatgnaaaggcccaaactcccgggggttttttt

SEQ ID NO: 428009 - DNA, 415 bp, Homo Sapiens
  misc_feature (384)..(384): n is a, c, g, or t
ttaactaatattcaccataacaagagcagcctcaccacaattaatgtagatatactattgaaattgaaatacaatgtctaatatcccaagttcatgattttacttttagaataatatattcatgtcagggagccacctgtagttaagaattttataaactggaatactgcctcagtgttttgtttgctgctcagtattttgtttgttattattgtttgctggctgctgtaaccagaataccttaggacttgctaatttataggacaacataactttaggctctgggagggctgggggaagccccaaggaaaagggcaccaggcaggatttggggtgttctgggtggggggggctcttctggctttccattacggttgttggccnttgttttactgtggtccactggggtaccagg

SEQ ID NO: 428010 - DNA, 496 bp, Homo Sapiens
  misc_feature (431)..(431): n is a, c, g, or t
  misc_feature (440)..(440): n is a, c, g, or t
  misc_feature (469)..(469): n is a, c, g, or t
  misc_feature (480)..(480): n is a, c, g, or t
tacaagttaaaggcaaattgagcccatggcttcattgtgctacttagaataccctgtgacccagctctcctcagaaaccctgatggctttgttgcagcattgcattgcacagaagacctcagtggtggtcctgagtcctcacaacaaggtcaacccgtggcctggccattaaggcaacagagagggaaataaattttagaaaacgcttcccttaaaaatgagttaaaatgtacatttgcatcatgagactaggttaactgtcagctgaggaaagtcctatatttcaggaaaggactttaatcctgggaccagggtaaaattgagggcatttgcttgttatgtttcttttgtttatggaattttaattgcttaccaaaggaggaaaaatggggcctttggatggcattaattcttgggggttaaaaaaaggnggatgttcnggaagtttgggggaaaaggaacttgcccnggaaggagctnttgttttttagggttt

SEQ ID NO: 428011 - DNA, 438 bp, Homo Sapiens
  misc_feature (361)..(361): n is a, c, g, or t
  misc_feature (390)..(390): n is a, c, g, or t
  misc_feature (399)..(399): n is a, c, g, or t
  misc_feature (402)..(402): n is a, c, g, or t
  misc_feature (423)..(423): n is a, c, g, or t
aattttcagaccattatatatattttcatgtatatttataataaatagtagtgctaaaagcccttttacatacagtgggttaaattaggtttaatgtatattccagaaacaaggtaataaaatgagttcattccagaccccctataaaatcagtgatatagcatcttacctcatgatcaaacctggcaacagagagcctagccctaaaacacacaaggagattcttttaacaaacaacagtgcttgccttttaaaaatacataatttcaacttttattttaggatacaggggggttgtgtaggtttgttacatggggtattatggacgtggatgctgagggtttgggggttaccaaatggntcctgttcacccggggcagtggggttacngttaccccnggngggtaggtttttttaaacccnttcccccactccttt

SEQ ID NO: 428012 - DNA, 484 bp, Homo Sapiens
  misc_feature (373)..(373): n is a, c, g, or t
  misc_feature (385)..(385): n is a, c, g, or t
  misc_feature (398)..(398): n is a, c, g, or t
  misc_feature (412)..(412): n is a, c, g, or t
  misc_feature (425)..(425): n is a, c, g, or t
  misc_feature (431)..(431): n is a, c, g, or t
  misc_feature (438)..(438): n is a, c, g, or t
  misc_feature (454)..(454): n is a, c, g, or t
  misc_feature (462)..(462): n is a, c, g, or t
aataagtgtaataatatcatagatagaaagctattataataatatgacattagatatcatagataaaaagctattattttctgttcctattgtaatcaggatctgagccttagactacttcaatacatgcttcacaccgagaggctgtggaaattaggcttcatgtccaaagaaaaagaagaattggaagaagaagtctctttcccaccagcatcgtagtagctgggatttgatggaacgtgtgttctatctctattaatttgctccagttacttttcagataaatacatttgtgatttgggtgctgagagaagggctaggagggaccccagaggccaaggggccgacagacagggcaggacacttttctccnggggggcaacantcgggtttcacangaaggggtccctgnccctttaaagtcnttgggntttttcngttttttattgagacntttagggntttgccaatttttgaggttttt

SEQ ID NO: 428013 - DNA, 441 bp, Homo Sapiens
  misc_feature (429)..(429): n is a, c, g, or t
tttatgttaatggtttgtgggatactaaaatagcttgaagatgacttgatgactgtgcattttatatagttttattctcctaaaatctcaggagggcagcaagtgctgtcaacgattatatagtgatgagatttttatgggaatgatttcttcttggtgcgttttacacatttgtactgatagcaaaactaaagtttaaagcagcaaagtttaagttctccttaaatcctacagaaaccaaccttttaaggacataatttcatctaaaacatgacgatatttagcacaccttttaatgtgggtatatatcaagtgtttaaggactggctagtatgtgatagggccaagacctgaggactttataagtatttgctccgtgtctgttgacagacctctttctttccaaacttgttaggagggtgggtaggncctatcccattg

SEQ ID NO: 428014 - DNA, 369 bp, Homo Sapiens
  misc_feature (36)..(36): n is a, c, g, or t
  misc_feature (158)..(305): n is a, c, g, or t
ctcaaactgcaaaatgttcaccaagtaccatctttngcccagttagggagacctgtaggaaacaaagcctcaaagcagactctgtagccagcaagatagtcttatgactcaccaactcttccttcacttctacagcagctaagaaagaaggtgccaannnnnnnnnnnnnnnnnnnnnnnnnnnnnnnnnnnnnnnnnnnnnnnnnnnnnnnnnnnnnnnnnnnnnnnnnnnnnnnnnnnnnnnnnnnnnnnnnnnnnnnnnnnnnnnnnnnnnnnnnnnnnnnnnnnnnnnnnnnnnnnnnnnnaaaggattaagtgtgaagtttgtcataggaagtgggtccgtaagcgatgggtgcttatgctgaa

SEQ ID NO: 428015 - DNA, 386 bp, Homo Sapiens
  misc_feature (291)..(291): n is a, c, g, or t
  misc_feature (318)..(318): n is a, c, g, or t
ttagaaaatccataaattggatatctcctgctcccagtaatttggatttgattatattgtttactatttggacactggggattttgtaaatccaaaagaaaggcttctcatgagggattacatgtattaatgttttagagtttgtaagagtgattttattatttgatacctattgaaatcctggggagataggtgagcaggtgtcctgaggcttaggagagggtaggccgcctctgctacgtcagggtgtcacatacgttctgggtctcagggacttgtgcttttccactnatacaggggcttccctgtagggatctngggtaaagggagtttagggggtgatcatgtcctggggaggagccagccatttttagggggccccatct

SEQ ID NO: 428016 - DNA, 345 bp, Homo Sapiens
  misc_feature (303)..(303): n is a, c, g, or t
  misc_feature (330)..(330): n is a, c, g, or t
tcattaatcatgaagtgctctgttccctaagttatgacatttagaagaaatcacatgctcaaccttaatctgagaacctaagtgtttttgagcattccagtaaaggagtagtgttcttttcctaacttacatcagggtacatctgtgtggcacacagatactatcttttcattcttcactcccagtcttaatttctttcccctgtatgtcactgtattttatgtcacttcacattgtgttaaacagggtaaataggagatcctcagtatctcagtgctgtgggcataggctcccaataggggngtgctgtggggggcacttgcaggggangtattttggcattaa

SEQ ID NO: 428017 - DNA, 302 bp, Homo Sapiens
  misc_feature (46)..(156): n is a, c, g, or t
  misc_feature (158)..(158): n is a, c, g, or t
  misc_feature (176)..(176): n is a, c, g, or t
  misc_feature (209)..(209): n is a, c, g, or t
  misc_feature (248)..(248): n is a, c, g, or t
  misc_feature (283)..(283): n is a, c, g, or t
catgaaagtagctggaattagatgcccgcaccccgctagctaattnnnnnnnnnnnnnnnnnnnnnnnnnnnnnnnnnnnnnnnnnnnnnnnnnnnnnnnnnnnnnnnnnnnnnnnnnnnnnnnnnnnnnnnnnnnnnnnnnnnnnnnnnnnnnnngnatgagcaccatgcccggncaatgccatctattaaaaaaacaaaggaaaagngtacacaaccacaaaggacttgggcaaatgcattgtttncatgtttgcaagggttttccataggaatattaggnttatgcaaaaattaaattt

SEQ ID NO: 428018 - DNA, 417 bp, Homo Sapiens
  misc_feature (368)..(368): n is a, c, g, or t
  misc_feature (380)..(380): n is a, c, g, or t
gcttatgagacaattagataaactcatggaggaggcaggtcctctgttattagatgattttgtgctcttggggctgacaataatacactcttgggaagtgatggtagagactgatgggaatagtctttctgcctggttgcaagtcccaaatttttaagggttaatggaagtaagtggatgtttcctcatgttaactactgaatcagatgttaggagcttgtccctttggggtttgacttatgcccagcagtacagggacacagcttcattagagtgttagtgtaaactaactccaaagttagggagttaatgtgaaaggatcatccttgaaacaaatctgctgtttgccatgcttgtagtacaggaancttcacatgggngttttgggtggggtttgtgtttttcaccaggtaaaaa

SEQ ID NO: 428019 - DNA, 167 bp, Homo Sapiens
  misc_feature (17)..(17): n is a, c, g, or t
  misc_feature (40)..(40): n is a, c, g, or t
  misc_feature (46)..(46): n is a, c, g, or t
  misc_feature (60)..(60): n is a, c, g, or t
atgaacggatacaggtncggcaggcccgagcgtcaggtcntgctancgcgtcggacagcncgacgtcttgcccggcagccattcgaggttgccgtgcttgccgagatggatgaccgcgtcgatgtgatacgcatcacgcagccagaaatagaacgcgagatacggtg

SEQ ID NO: 428020 - DNA, 462 bp, Homo Sapiens
  misc_feature (74)..(127): n is a, c, g, or t
  misc_feature (417)..(417): n is a, c, g, or t
ttaagttgaaatacaagtcttcagctttggatatcttagttttgaagtctctgtgaggcatctagatagagttnnnnnnnnnnnnnnnnnnnnnnnnnnnnnnnnnnnnnnnnnnnnnnnnnnnnnntacaaagaagaaaagactgattagtatttacctggttaatctctccttgtcatgcatatctatgcttccatttcaattatgccaaggaagctttcttgtagtcccctgtctcaaccctaagactggcgtgattgactttcagtgctcgaataacagatgcaactaccctatcacagctctaactatcttgtaggccactttctgtttcttgtactacatcttgaacttcttacatgggaaggcactatttatagggtcatggacctccccttttctgcacatagtagggnatttgaataaaatgttttgcctgagtggaatgggaaaaattgaac

SEQ ID NO: 428021 - DNA, 179 bp, Homo Sapiens
tatgagagaggcttagcttttctctttcaaaggaaaccatcatttttctaaataaaccctactggtttgatgctcttttctctacttgaaacacattttctccctcctacccgagcaggatatttgcagtggagtgattctggtttctctttgttctccctgtctgacatgcctttgat

SEQ ID NO: 428022 - DNA, 528 bp, Homo Sapiens
  misc_feature (131)..(239): n is a, c, g, or t
  misc_feature (280)..(289): n is a, c, g, or t
  misc_feature (337)..(337): n is a, c, g, or t
  misc_feature (347)..(347): n is a, c, g, or t
  misc_feature (375)..(375): n is a, c, g, or t
  misc_feature (491)..(491): n is a, c, g, or t
  misc_feature (496)..(496): n is a, c, g, or t
atgaaagagagagtcatcttttaaacacagccaataatggtgactccggaaaggcagaaaaggaatctctgaagtaggtgtcctggagtcagttgttgaaacaatcctattgacaagtactgtgatagacnnnnnnnnnnnnnnnnnnnnnnnnnnnnnnnnnnnnnnnnnnnnnnnnnnnnnnnnnnnnnnnnnnnnnnnnnnnnnnnnnnnnnnnnnnnnnnnnnnnnnnnnnnnnngggggaaatagccattgggggaaattcgtgggctctaggannnnnnnnnnctggggaggatttttcgttttgatggcaggggggtatctttttgtccnttgggtaggnaaagttttcccccaggagccttttggantctggcagtttacttgacttttacccatttgttcccctttccccaaaccctttgccaggggaccccaaagggggggaccaccaagggggttttcttggggagggtgcctaggttantgggntctcctttttaggagcctgggggttttttgcc

SEQ ID NO: 428023 - DNA, 235 bp, Homo Sapiens
  misc_feature (77)..(77): n is a, c, g, or t
  misc_feature (147)..(147): n is a, c, g, or t
  misc_feature (169)..(169): n is a, c, g, or t
  misc_feature (181)..(181): n is a, c, g, or t
  misc_feature (197)..(197): n is a, c, g, or t
gcagacacaataacataaaaagcagtgctgacgtttgaacaggacttttggtttcaaagccattgtaccttataggngtgttccatatacatttattaattgaattaacgggcaaaggccaatcatactgggctttaacttcccttnagtcacaagatgttcttttagntccccgagtgangatattaaaaacacgnttctgggctttggttcagttgctaaaagcatgtgtagt

SEQ ID NO: 428024 - DNA, 424 bp, Homo Sapiens
  misc_feature (107)..(119): n is a, c, g, or t
  misc_feature (237)..(283): n is a, c, g, or t
  misc_feature (314)..(314): n is a, c, g, or t
  misc_feature (325)..(325): n is a, c, g, or t
  misc_feature (334)..(334): n is a, c, g, or t
  misc_feature (366)..(366): n is a, c, g, or t
  misc_feature (376)..(376): n is a, c, g, or t
  misc_feature (402)..(402): n is a, c, g, or t
caaaaatcaagataggagttgcctctgagtggggtgaaaggggatgggacgagagagggagcgcacgggaattgataatgttctagttgttggattcggcagtatgnnnnnnnnnnnnnccatctccccccaacacacataatgtagttttattcagttttaaacaaactgtaactcttttggggcagtaagttcatgagtgttcattttattgttagggctttaggaactcccatnnnnnnnnnnnnnnnnnnnnnnnnnnnnnnnnnnnnnnnnnnnnnnnggaggggaggagaatgttttccaaatatttnccatggatatngatgggggncccgggaaggaggaggggggggttggcctttncccggtcctnccccccttgggaggggcaagtcttgngcccccggggcccccgggggtt

SEQ ID NO: 428025 - DNA, 417 bp, Homo Sapiens
  misc_feature (364)..(364): n is a, c, g, or t
  misc_feature (389)..(389): n is a, c, g, or t
tggaagaattcgtggccccccgccctgggcccagcacctgtaggtcctggagcaccgattcagggaaagcgcaaacaaatgaatgctggccatcaggtggtgaggatgctcctgtcagcctcagggcacctggatcccgaatggtcaggaaggcagattgggggtggggaagggtgtcaggatgtgtcaaaaaatgaggttttctaactcaaccatggcttagatagagagaaagcaactctgagggaacacccctttgtgtgggggctctgggcttctgaagcctgaaaggtaaaatgaccctgagaatgatctcgtgggctcccccatcccacacaccacctgctgctagaagtttgatctngaccacacccacccccgttcctttnctggggccagggcccctttattaggagc

SEQ ID NO: 428026 - DNA, 444 bp, Homo Sapiens
tcttaatttgcatcatttagatcataacccatgattagtttaaagcgatttggattataaatgctatcccatactttcaacatttgaaaatatcattcagggttggttaaaaaaatatgattgcacctccctttgggcctcacagtaaggcattcgttgccttggtaatttgactgtgtctggtgtagggtctgtcactcagctttgccaactcagaagtctgatgttgtcagcactcagagggcagatccgtctctctcgggtgaactcacattaactacattcatgaggctaataaaaccagaatgccaaattattcgcttaccattaggaaatacaatcacacagatgggaatggcttgtcttaggcaagacttcaaacattcttttttcaaaatggaaggagccagatttacacttaggaaggggggcccagtgtggcct

SEQ ID NO: 428027 - DNA, 231 bp, Homo Sapiens
  misc_feature (34)..(34): n is a, c, g, or t
  misc_feature (146)..(146): n is a, c, g, or t
  misc_feature (151)..(151): n is a, c, g, or t
  misc_feature (176)..(176): n is a, c, g, or t
  misc_feature (189)..(189): n is a, c, g, or t
  misc_feature (200)..(200): n is a, c, g, or t
  misc_feature (217)..(217): n is a, c, g, or t
gaagtaaaccgccccgccaatggtgcaggcaggnagtgaagccgacaagaagccctatgatggattttgaggagggctgaagctgtggactctcaaaatagcctctgctagtggcagttatatttccctttcttgcattcaacttnctttnccaaatgacccagccattagtacantcttaagaaaagnacaagcctganctgtgctattgcatggntattaagaagagga

SEQ ID NO: 428028 - DNA, 434 bp, Homo Sapiens
  misc_feature (43)..(43): n is a, c, g, or t
  misc_feature (355)..(355): n is a, c, g, or t
  misc_feature (360)..(360): n is a, c, g, or t
  misc_feature (383)..(383): n is a, c, g, or t
  misc_feature (394)..(394): n is a, c, g, or t
atgctgccctggtagggtggttgtggtggcaatggggtgagcncctctagcaccacgatttcatcttgcagagaacagagaggccttggagtgtctgaaagggcaagtgtgatttggaagtggtaatcacagtgagtcagactacagggaattcctaggtcttagcactgaaaggcaagtcttgcagcccccaggaacatcaagtggtgggtgctgttcccctgacccctgagactgggtgagttccctttgctgggtagtgtgttgatataggtccctgtgtgtcccctgttgcatcagtatttacagtagtgtgttaattgctggtttaattatctgtctttcccttctatanttgtnaagcccccatggaagacagggantgggtctgggntcagatctgttaaccacagtggaccagcagagtgcctggg

SEQ ID NO: 428029 - DNA, 436 bp, Homo Sapiens
  misc_feature (317)..(317): n is a, c, g, or t
  misc_feature (359)..(359): n is a, c, g, or t
gagcccagagctgaacagggaccctttcacttcaaggcaggcacctttcatccccaacagcagagggcactgcagcctccccctggccacccggtgtgtcccagagccacagctctctagccctgagttcatgcaggtgactgtcacttccgcaagagtcctcctacctcccagctggccacactcccagctgccgtcccagcccacagatgggccaatgcagtcgagatggcagtgtctgcccaacccatgtcccccagcccgaccccatgtctggggagaggccatgtaggccccttgggcacccacccggtttncctccactggccattgcttgcgttcagccttgccttcacagncttaaaagggagggcttgccttcttggggaattttaacccagggttgttgttgttgaattgccttttggttaagggg

SEQ ID NO: 428030 - DNA, 414 bp, Homo Sapiens
  misc_feature (307)..(307): n is a, c, g, or t
  misc_feature (332)..(332): n is a, c, g, or t
  misc_feature (360)..(360): n is a, c, g, or t
  misc_feature (368)..(368): n is a, c, g, or t
  misc_feature (388)..(388): n is a, c, g, or t
  misc_feature (399)..(399): n is a, c, g, or t
tcccattaaaaagttcttggcctgcttctctattaatatagagtcccatatgcattttacattgttgacttctaggttgtcaattatttagaagtatttttggaaaaacctaccttatctgatttcagtttattagcacctttagttacagaaacatgaactctaacatacactcaaactgatcattttaatattttatccagtagtgggaaaaagggtttactgggaaaaggatgtcccaattatctaggattgaatgagggtagtttttctctgtggcattacagctaggcaatatttatacggngtaaatgataggagttatttgaggngcaggaaggcaatgttggggattttccnggaaatgnaggtcctccaatggggggtncaggttttacntgggggtaaaaagtt

SEQ ID NO: 428031 - DNA, 259 bp, Homo Sapiens
  misc_feature (165)..(165): n is a, c, g, or t
  misc_feature (237)..(237): n is a, c, g, or t
acagaggattaagcataatagaagtgtcttgctctcatcttaaaggagtgtaaaggtggacagcctagggatgtatgtcagtgatatggtagagtgaaggatgtttttatctttctgctccatcattctaatgcatggcctccacagttaaggttgctttatggntcaaaatatttattggatttccactgatcacactttatggcaggcaaaaaagggagagcagggggagcaganggggtacaaatgagccccttcc

SEQ ID NO: 428032 - DNA, 208 bp, Homo Sapiens
  misc_feature (156)..(156): n is a, c, g, or t
  misc_feature (164)..(164): n is a, c, g, or t
  misc_feature (187)..(187): n is a, c, g, or t
  misc_feature (197)..(197): n is a, c, g, or t
tcccaatctgttcagaacttcccctctgtagccagtgcccggctctccttcctactttgtcacatttatccacacggcacccttcaggctaagtgagtatatcctggggtctaagggtaggcccactgagatccagggaaaacacacaaaatgggncaagaatntagctccacctgggcatctgtgnatacgaaggnccagggaggca

SEQ ID NO: 428033 - DNA, 365 bp, Homo Sapiens
  misc_feature (149)..(149): n is a, c, g, or t
  misc_feature (344)..(344): n is a, c, g, or t
  misc_feature (349)..(349): n is a, c, g, or t
ttggttatgaaatcactcacagatttataactgcaggcttggctccttccgggagcttgagacccactgccgcctccgcaacacctccacctgggagtttcagaggcgctctccctcagcgtgtctgcagctgcgtgcctgcagctggntgcctgccttctccctgcacctgctctgctccccaggtccctttctcagaccaaagcctgcccgggcttcacaggctgagggtccaccttgccacctccgtttgcctcagtcctcatggagccctggctcaactgtctgctggcttctccccatctactctgtgtcactccatccgaccaccattgttttccatncaggnacagttgggaacacct

SEQ ID NO: 428034 - DNA, 506 bp, Homo Sapiens
  misc_feature (461)..(461): n is a, c, g, or t
  misc_feature (469)..(469): n is a, c, g, or t
ggaggatataaagttttaattcacttttccaaactttctcattcaactaacttttttcatatcactttacaaagttccagatgatttccaggctgccgattttaatattaagctctatttgagcagggtcccagaggataattagcaatacaagaaaatattttttattctacccaagtaaatatctttattatctaaaaatgacaatagatgatggaaaacacacgggggagaaaaccttgattccaaattctaaattatgatctgtcggaaatgatgctagtacttgcaataatgtagtgaagtccaagaatctcttgtattaccaacagatgcatccacaagaaacacttctgagggtggcctcttgccttgtggccagaattgcaatttgcatagtttgccattgtttgtaacttcgcttcactgactcctagtggaacttgaaggctttggcacanatggaccntagccctggaatttatatttcactcacctgttttctt

SEQ ID NO: 428035 - DNA, 502 bp, Homo Sapiens
  misc_feature (57)..(82): n is a, c, g, or t
  misc_feature (222)..(338): n is a, c, g, or t
  misc_feature (488)..(488): n is a, c, g, or t
acaggattcagcatccagcaagaaactactgatgagaccccatattcccaaataggnnnnnnnnnnnnnnnnnnnnnnnnnntcttgcatcctgattccccagtctagtaatcacaaagttgaagagaataccatggtctcaccatggaggcagaccagccggctgcagtcccaactccaccacttacagccttgaggggccctggacaagttcatgttcgnnnnnnnnnnnnnnnnnnnnnnnnnnnnnnnnnnnnnnnnnnnnnnnnnnnnnnnnnnnnnnnnnnnnnnnnnnnnnnnnnnnnnnnnnnnnnnnnnnnnnnnnnnnnnnnnnnnnnctatggaagattactttttcataaaataggaacaggtttaggttctaacattatgttgctgatgctcttagcagagtgttcttgtctggcagcctgcctgagcactccacttaggctcagagtgcataacgacacaaattatttcttccngctgtgggggtttt

SEQ ID NO: 428036 - DNA, 181 bp, Homo Sapiens
  misc_feature (100)..(100): n is a, c, g, or t
  misc_feature (118)..(118): n is a, c, g, or t
  misc_feature (124)..(124): n is a, c, g, or t
  misc_feature (135)..(135): n is a, c, g, or t
  misc_feature (160)..(160): n is a, c, g, or t
cacacctgggccataatgtagtttttaatatttgaaaagaggaacttcactgtggggtaaaaaataatttgcatttggtttttcttggggaagtttaccntcgaagggggaacttccntctccnttcatttcaantttttaaattttacctaaaagggtntttttcttaaaaggaactttt

SEQ ID NO: 428037 - DNA, 450 bp, Homo Sapiens
  misc_feature (87)..(108): n is a, c, g, or t
  misc_feature (121)..(370): n is a, c, g, or t
  misc_feature (390)..(390): n is a, c, g, or t
  misc_feature (405)..(405): n is a, c, g, or t
  misc_feature (415)..(415): n is a, c, g, or t
gaagatgtttaggccaagggggaaatggttgtagccccttaacacacactccgcagcagtaactgggaggtattaggaactctaacnnnnnnnnnnnnnnnnnnnnnngagacagagtctnnnnnnnnnnnnnnnnnnnnnnnnnnnnnnnnnnnnnnnnnnnnnnnnnnnnnnnnnnnnnnnnnnnnnnnnnnnnnnnnnnnnnnnnnnnnnnnnnnnnnnnnnnnnnnnnnnnnnnnnnnnnnnnnnnnnnnnnnnnnnnnnnnnnnnnnnnnnnnnnnnnnnnnnnnnnnnnnnnnnnnnnnnnnnnnnnnnnnnnnnnnnnnnnnnnnnnnnnnnnnnnnnnnnnnnnnnnnnnnnnnnnnnnnnngggcatggagtcaccacgcnggggccaactttaanctttttttangggtttttctaaatcctaaaaggtttttccagaac

SEQ ID NO: 428038 - DNA, 451 bp, Homo Sapiens
  misc_feature (289)..(289): n is a, c, g, or t
  misc_feature (317)..(332): n is a, c, g, or t
  misc_feature (340)..(340): n is a, c, g, or t
  misc_feature (441)..(441): n is a, c, g, or t
tgtctccataattgtgcttaggactctggtgcataagtggataaactgttaaacaggatcctaggggagctagggtgacaaagttcaagtccattaaaactagcaacatacattccttactgctcacgcatgactcatggtcttaagatgtttacagttaagaaaagcagcttaatcatacctgcaaggacaaactcctacataaacacaatgtccagatgacccaatatcccatgacaatgtatgcttcttaaggcttaattacagttcatgcttttcacgtacttgncacacttaaaataccaagggtagggtgnnnnnnnnnnnnnnnnggatgggngctttcacttttgtcatccgggggtgggagtgcgttgggggacattctcgggcttcatttggcaactttccacctttccggggtttcaggcgttttctccnggccctcagg

SEQ ID NO: 428039 - DNA, 352 bp, Homo Sapiens
  misc_feature (38)..(38): n is a, c, g, or t
  misc_feature (44)..(44): n is a, c, g, or t
  misc_feature (57)..(57): n is a, c, g, or t
  misc_feature (68)..(68): n is a, c, g, or t
  misc_feature (72)..(72): n is a, c, g, or t
  misc_feature (90)..(90): n is a, c, g, or t
  misc_feature (97)..(97): n is a, c, g, or t
  misc_feature (103)..(103): n is a, c, g, or t
  misc_feature (125)..(126): n is a, c, g, or t
  misc_feature (128)..(128): n is a, c, g, or t
  misc_feature (158)..(158): n is a, c, g, or t
  misc_feature (163)..(163): n is a, c, g, or t
  misc_feature (275)..(275): n is a, c, g, or t
actagaaaagaaaataatgacagcactaacttatggangataanacaacttcatganaattttttcantatngttctaagaaacgatgantgcaaancttganaatctcctgaataaagaatagnnanctatttgctctagcagttagccaatcaganaaaanaatgtttcccccaactgattttaccaaactgatttatctgacttacatcttaaaattatgatatgcagtttttctcttctggttgatctaccgggcatagtgggaattttantcctgtttgggagcctgccttgtcgccaaaatgtcaaactgggttgggcataaaacttactccctttggaagttcgg

SEQ ID NO: 428040 - DNA, 432 bp, Homo Sapiens
  misc_feature (396)..(396): n is a, c, g, or t
cttgggggagctagaacacaggaaacatgaatgcaaaaggcatggaaaacactgttttgctttgggttagtaaaatgtgggcaggacaaagattactattggtctgagctttgccaagtgagatagaatcaactgtcaccccattcctttcccagaaggtcttatggtattaaggatacatccagtattttcccacagatttttattcaggcgatgtttcataaattacatatatgaaaacattcattattacatttccttgtgtgtttcaaacagacattgggcaccttcctattgagttaattctctgcatcttttgcaggcagcagcccacaaggaggattcccagaggatgggctcccctaacacacagtcctgtggatttttacagttctnatggactttacagttggatggtttcacaaggtttca

SEQ ID NO: 428041 - DNA, 132 bp, Homo Sapiens
  misc_feature (71)..(71): n is a, c, g, or t
  misc_feature (98)..(98): n is a, c, g, or t
atgagcactgccaaatttagcatttcaactgagggtttcacagataccctgaagcttctccctgccctcgntttcagaaaactcatagatccccaaantaaagtaactgggtcaaggaggtcaagtattaaa

SEQ ID NO: 428042 - DNA, 459 bp, Homo Sapiens
  misc_feature (389)..(389): n is a, c, g, or t
  misc_feature (397)..(397): n is a, c, g, or t
  misc_feature (417)..(417): n is a, c, g, or t
  misc_feature (424)..(424): n is a, c, g, or t
  misc_feature (438)..(438): n is a, c, g, or t
gtttttcaaaaaaaatttgaggggtgggaggtcacactcttatcactgttttctatgacatagggaaactgagtcatgttcccagggtctgcatagctagtaagttcttggaatgggaagtggtcccagttctgattcccaaaaacacatggcttaaccatgccctttaactcagctttcctgagtcccaggaggaaatcccatgctctctcctcagaactcccccaacctttgcatttctgtggacacctgtcatttacttgcatggcaaggaaatatgttgcatagtgcttggcacataggaaggccctgagagtacttgcgcttcttgcccttcctcctgaagggcaagccctgaatcagagtcaggtttctaatggccggcagcngggtgccnggggacgttgggttgggtantttgggntgttttccgtaggntctgtttgttcttgtgggagc

SEQ ID NO: 428043 - DNA, 195 bp, Homo Sapiens
  misc_feature (60)..(60): n is a, c, g, or t
tcttttacgttcctggataacctgtaattttacaatactgatctagaaaccagaagctgncacaaatgatggtgctaaatctgtgcttgaaatggtgggacagaaatgcaaggtgactttacaaaggatggatgatttgagtctctgttcctatatccatgatttgactgtgcaaaagaagtccttactacttct

SEQ ID NO: 428044 - DNA, 453 bp, Homo Sapiens
  misc_feature (332)..(332): n is a, c, g, or t
  misc_feature (374)..(374): n is a, c, g, or t
  misc_feature (410)..(410): n is a, c, g, or t
  misc_feature (428)..(428): n is a, c, g, or t
  misc_feature (435)..(435): n is a, c, g, or t
attgacaatcctgcccatgttctctctcttgagagtgtggcactggggcagaagcagcaaagacgaccactgcatactttgcagctcccagacagaggcgcacttggcttccaatgcacaaggcccccttcgataacaccttttcagggtgcaggataatagagtaaagtgtgggtggactggagtgaagtgcagcccaggatgatagcaccagctcagaacgtcctcagcgaggccagcaacaatttggagaatattgagagatggagctgtccaatgagccagagggtccctgagagatgagatggccttggctgggatttccccacccntcattcacaaaagcagttggtccatgggagctgggggagcanttttcattattattggaacagcccaccagggttgcntcccttcagagcccattnagggggncaggtttagcgttttttt

SEQ ID NO: 428045 - DNA, 453 bp, Homo Sapiens
  misc_feature (397)..(397): n is a, c, g, or t
  misc_feature (426)..(426): n is a, c, g, or t
aagtggttgggtctacaaacatacccaattcctctagtgggatttgatctacaaaaatcaagagataagcacattttttttctgagatatgttattgacattaagccacctctcctgtctaacttaatggatggataatgctttatcagttgggacctacatgtgtgatttcctcatgcattgtcaattccaataaggatatatcatcatgaatggtttctttaggatccagttttattgctgacatcctcagtaacagccaaaaggtcgttttcagagatctaaggctggagcatgatggtcaaggatacccctaaggactgtgtgcacatcattattaatgggacttttcccaccatgtttatttattgggttgatgtatctgttcactcccagnggggacacagggggccttaagggaggagnggattctcctggccccgggccggggca

SEQ ID NO: 428046 - DNA, 378 bp, Homo Sapiens
  misc_feature (126)..(126): n is a, c, g, or t
  misc_feature (219)..(219): n is a, c, g, or t
  misc_feature (284)..(284): n is a, c, g, or t
  misc_feature (311)..(311): n is a, c, g, or t
  misc_feature (343)..(343): n is a, c, g, or t
  misc_feature (348)..(348): n is a, c, g, or t
  misc_feature (358)..(358): n is a, c, g, or t
taccttcatgagataaacttcatgagtaaagttcatgagataaattttttagctcccacatatgattgagaatatgtgatactagtttatctgtgcctggcttatttcacttaacataatgacctnctcttcaatccatgttgctgcaaaagacataatttcattctttgttatagccaaatactattccattgtgtatagccacattttctttatccnttcatccattgatggacacttaggttgactccatatctttactcttgtgaatagtgctgggaatnaacatgagtgcagggtatgtcttccancatatgggatttattttcctttgggataaatnccccnatagtggggnttgctgggatcctgtggtgg

SEQ ID NO: 428047 - DNA, 372 bp, Homo Sapiens
  misc_feature (161)..(170): n is a, c, g, or t
  misc_feature (357)..(357): n is a, c, g, or t
acaacatgtttctacttaagaaggcagggaagtgtataataaattctagaaacatttccacccaataatggtcaaagagaagagattcttagtgtttaaatctgtgaactcatacctgtctataaaacataccagtttttagtattttgaaggtttggggnnnnnnnnnnaactataaatttgttattatctatgcctattttatagccccgggaagatactgctactattatcaataacgtgggaaggaaatgatgtctttccttttatgacataactgtgagtcctatcaaggacaggaatctttgattgaaccagtatcctaggggaactctggggtgctcttcaggaacaggnattttatggacatgc

SEQ ID NO: 428048 - DNA, 422 bp, Homo Sapiens
  misc_feature (314)..(314): n is a, c, g, or t
  misc_feature (330)..(330): n is a, c, g, or t
  misc_feature (357)..(357): n is a, c, g, or t
  misc_feature (374)..(374): n is a, c, g, or t
gtccaaacatagttgttaaaatgggttaaaatcggtgaagtgcctaagaacttgactgagacatggtgtttgttaaatacagtatactatctattcagtaaaaatagatcaatatggcatgtatttatcaagtgaatttcatttttctgttggtagacattcaagttattttcaagatatccctataactgacaatactgcagtgattatctcttgctgttataaacagtgcttcaggtgggtcatgatagtatttctgtaggaattgactccttatgagagtgctgggataaccatgttggctaaattgcccnggaaatgattgtaccnttttatgtttcactcgctccaaaaggngtgttttttatctcccnggctaggccagcactgggatggataagggggattttttaaaaatatct

SEQ ID NO: 428049 - DNA, 478 bp, Homo Sapiens
  misc_feature (341)..(341): n is a, c, g, or t
  misc_feature (372)..(372): n is a, c, g, or t
  misc_feature (381)..(381): n is a, c, g, or t
  misc_feature (387)..(387): n is a, c, g, or t
  misc_feature (418)..(418): n is a, c, g, or t
  misc_feature (434)..(434): n is a, c, g, or t
  misc_feature (453)..(453): n is a, c, g, or t
gtttgactagaactgagccacatgatcatggtggaagctggaaaacatcatctgcagtaggctagctgtgtgttcagctaaaatccatgcatcccattgttaaagcaaggaggagagaaaggattccagtagacacggagcaggctttgacgcccagaccgccagaaacctgggcgtttcctggggtttgccaggtctagtgaactcttcatttataccaggccctgtgaactcacaggggtaggcagaacagaccatccctctttcatgggcgcccttgtctaatggggagaaaggctgaaataatttcagttgcaagaaagggaaggagttaaggggtngggaaggagtgcgtgtttaatggagttctcnttacatggnttttantttttcccaaggattaggtttattaggacantaaaattcctttaaantgtttggatttttgaaaantgttttttttaccagggcaccgggt

SEQ ID NO: 428050 - DNA, 270 bp, Homo Sapiens
gcatcaggtcgacatccatagtaaccatgtgccataacatctacacatttccacttgttttacagacaaggtaacaggcagaaggaaaatccagagtcttgcagtaagcagatgacaaaacttcaatatgcttgggcaccacttaggtgaccccagggagatttagtgtggccttaggaaagcaaaagagcactttttattggaaatatgagcttgtcactgggaaagatttgtaaaattgatcaagaacttgatttataattatgcctc

SEQ ID NO: 428051 - DNA, 407 bp, Homo Sapiens
gagagtttaactggctaagaccaggccagtacatgagcgcaggcccaagatccgagagggaaagtcctgaacgcccccttccccctgtcttttcggcggggctttgggagtttgcagggtgttctgagtgtttgggcctcagggattctcgcctccgggagattccaggagctgtagggggtggaatgcgagtaggaggagagttgcagatggatatcgtggcctgctgatggttttggagcccaggtccagacatttcttgattgaagtagacattcaagaagtgttgaaatgcacagtcagaaaatctgggacttctctttttccttgttcagaatcaggattgaaaaatgatttcagcggggaatagcttcttttacagttgaggagccctgttatttgatttt

SEQ ID NO: 428052 - DNA, 410 bp, Homo Sapiens
  misc_feature (46)..(46): n is a, c, g, or t
  misc_feature (172)..(172): n is a, c, g, or t
acctttctgagtcttacttggttctggaaggctctctggagctggncctcaagctccatcttagatttcatcttctggaactctcctctctccctcatccagcttcagtcactctggtgtctcctcaaacacaccaaatacactctccctctcctcgacccccgggggaatntgtacacaggtcctgggtctaaaaagttccctccacaagggggccaaatggctcctaactgtactcaggtccctactcaaacataaacaaataaaattcttcttttccaccatctctttctaccaccttctcctgcttgattctcccttataggcacgtaacgccaaccaaaatatatttatttgttctgggattaaatttggaatataagctttcatggataggcagaggacttggg

SEQ ID NO: 428053 - DNA, 389 bp, Homo Sapiens
  misc_feature (351)..(351): n is a, c, g, or t
acccaatccatcacttatatctaagtgtatatttgtacctgttaatcaaactctcttcatcccctcctctccactacccttcctggcctctggtaaccaccaatgtaccctctgtcttcatgagaagggatcagtctttactcagaagctttggccatggcttgagcagagtagctgtcagccatctcccaggcaataccagccattggacaagaaacatgaaggtttggggatgactcatcctaggaagttcattgttttcttcaggcttccattagttacacatcttatttgggaggatttattaagggcatggcaaggttcctttttttgggcctgttatggaaaaanggggaggagggtaggattggagtttccctgttaacccg

SEQ ID NO: 428054 - DNA, 174 bp, Homo Sapiens
  misc_feature (88)..(88): n is a, c, g, or t
  misc_feature (154)..(154): n is a, c, g, or t
gaaatgctttgaatacttacgacatggccgctcacactgattgccaagattgacagcactaaccatcgccttcacttgttccagggtnaagcccctagtcaccccgctccggggcacctcctggaaccccggcggcaaacttctgccgctctgnctgcccccacccgggcggga

SEQ ID NO: 428055 - DNA, 488 bp, Homo Sapiens
  misc_feature (298)..(298): n is a, c, g, or t
  misc_feature (340)..(340): n is a, c, g, or t
  misc_feature (389)..(448): n is a, c, g, or t
tcggaatgccaacgtaacaaagtccaagtcaaaggtcaagctgtgcactaaaatctctcaagtcacccgcttggccctcttccaaatgtactttacttcctttcattcctgctctaaaactttttaataaactttcactcctgctgtaaaacttgcatcggtctctcctgccttatgcccctcagtctaagtctttcttctgaggaggcaaaaattgaggttgctgcagacctgtccagatttgccacgctaacaacacaggcatactggaacttggactctggaaataaggagaggnggggcctgaggtaaggacttagggaaatacaggggggaaaantggatatggattggcctactttgtagggtattaaacatattactttttnnnnnnnnnnnnnnnnnnnnnnnnnnnnnnnnnnnnnnnnnnnnnnnnnnnnnnnnnnnnagggtttttttccggttactagggtttttcccccagggga

SEQ ID NO: 428056 - DNA, 130 bp, Homo Sapiens
  misc_feature (53)..(53): n is a, c, g, or t
  misc_feature (78)..(78): n is a, c, g, or t
  misc_feature (85)..(85): n is a, c, g, or t
  misc_feature (96)..(96): n is a, c, g, or t
atgaggcactgtgccggggccccttcctgtaaaatttttaaatgggagaattngggtgcgagatgttggttttcagcngggtgcntggggggttgntgagttagttgagttggtgcagttcaggggaaac

SEQ ID NO: 428057 - DNA, 308 bp, Homo Sapiens
  misc_feature (21)..(21): n is a, c, g, or t
  misc_feature (31)..(31): n is a, c, g, or t
  misc_feature (106)..(106): n is a, c, g, or t
  misc_feature (149)..(149): n is a, c, g, or t
  misc_feature (179)..(179): n is a, c, g, or t
  misc_feature (226)..(226): n is a, c, g, or t
  misc_feature (260)..(260): n is a, c, g, or t
tgcacaggcatttttctagtncccactgctncagtggagtctaagagtccagtaggagcacaaaatggacaaagtcacaaaggctttgaacgctcctgccatcctnctctctccttataatgtttctgagcaatgagtaaattaatttncctgggatgtgtctgtgcactcctgtggtnccacgaggacctgcacttcaccactgcccttgcatagagttaactgngtttattttattttatctttaatttattttgggncagagtctctctcttgtcacccgggttgggtacatgggcacggtcttg

SEQ ID NO: 428058 - DNA, 414 bp, Homo Sapiens
  misc_feature (88)..(101): n is a, c, g, or t
  misc_feature (120)..(357): n is a, c, g, or t
  misc_feature (369)..(369): n is a, c, g, or t
  misc_feature (380)..(380): n is a, c, g, or t
  misc_feature (403)..(403): n is a, c, g, or t
tgtcatgatagaaagaaattttttgcatgtaggtaaaattctgtgacagatgtaagagattttaaaatatctatactatgagtttgcnnnnnnnnnnnnnntggagtctcactctgtcannnnnnnnnnnnnnnnnnnnnnnnnnnnnnnnnnnnnnnnnnnnnnnnnnnnnnnnnnnnnnnnnnnnnnnnnnnnnnnnnnnnnnnnnnnnnnnnnnnnnnnnnnnnnnnnnnnnnnnnnnnnnnnnnnnnnnnnnnnnnnnnnnnnnnnnnnnnnnnnnnnnnnnnnnnnnnnnnnnnnnnnnnnnnnnnnnnnnnnnnnnnnnnnnnnnnnnnnnnnnnnnnnnnnnnnnnnnnnggcgtgacaacncactcccgggntgagtttgatatttttttaaggnggcaatttgac

SEQ ID NO: 428059 - DNA, 214 bp, Homo Sapiens
aaatgcagagaccactggtggaaattcccatgttggatagaaaagggcgtaagtccagtctaagtatctaaatgtgatatgcccttttgtcacagaagtgtaagacttaaagggaatattctgaccttcgtgtatgaatctgatccacccatcctgtcagctaggattataatttgaactgtcgtttcaggagcatgtgttaaatcatatgagt

SEQ ID NO: 428060 - DNA, 505 bp, Homo Sapiens
  misc_feature (80)..(80): n is a, c, g, or t
  misc_feature (195)..(195): n is a, c, g, or t
  misc_feature (197)..(197): n is a, c, g, or t
  misc_feature (380)..(380): n is a, c, g, or t
  misc_feature (389)..(389): n is a, c, g, or t
  misc_feature (397)..(397): n is a, c, g, or t
  misc_feature (412)..(412): n is a, c, g, or t
  misc_feature (457)..(457): n is a, c, g, or t
  misc_feature (481)..(481): n is a, c, g, or t
aggcagtgatgggtggggtgggaaaaagcaccatgtgttttcactctggtccatggaactggtagcctggtccccaggtntcaggctgtcccaggcctgatggtagggcttcactagggacctgctcctttctgcccaggagcttatctgcctcctgctgccatcaacctgctgtctatcgatggtgcccacggnancaggctgttcatgccaagcggtgcctgcaggctcttgccgagctgccctcagccccacctcggcatcctttctgtgctggtcagcagccaaagtccagagggggctgagtcagcaggggctgggcatgttcagtgctggccctggagcatgtgcacacccagttgggtttgttgaacagcacngggggtttnggcttcantttttcctctggaantcaaagtggggttgccagggagttgggggagagaccaggggagcngggacaagggcattttcgggagcnttcaaagggcagaggggtttttta

SEQ ID NO: 428061 - DNA, 408 bp, Homo Sapiens
aactctttttattggaatctcagtttgctaacccaaacaaaggaaccactaatcttttggtgacaacaactaaaccaaagtcactatctctggaactaaatagttcatttaaggcacagctgaccactccctaatgctaatcccaactcctaagtaattactgaagtattgaaaagtgttctgattctatcttggtgtataaaaactttctattttcttctgcttatttgtgatgccactcctccttgttattcaatacattgctgaaacttacttctgtaaaatttttgtgatttgattgaatgagggactcccatgttactcagtcccttttctattctattcaggactccttgtccacggccggcaccctttctgggtcatttatctctgggggacagttttaat

SEQ ID NO: 428062 - DNA, 448 bp, Homo Sapiens
  misc_feature (408)..(408): n is a, c, g, or t
gagcttctagctactgtgatcatcactggagtgcatccttctggcagggatatggaaaaaatatattcatgctaagcttttctctgaagagaaaagacttggaattctctggttgatgagaaaggacccttaagctgtgataggacctatgtgtaaagtttgcctggtcttcatgctctaatgactcctgtgatcagtgccagagtgaactgatggaaaatgtgtggttctttttcccttttgtgagctgtgagcctcagtattaccctacagctatatgaatatcagtgctttcattggaaggacagttgttcagatttgtttaagcttaaagtcttaagtttcaaacccttcttcaaaaagtctcattcctcagtatcttttcacactgtatattgaagaatttcnttcattttgatcttgttttagtttgtgccccgtagtaatg

SEQ ID NO: 428063 - DNA, 510 bp, Homo Sapiens
  misc_feature (410)..(410): n is a, c, g, or t
  misc_feature (444)..(444): n is a, c, g, or t
  misc_feature (473)..(473): n is a, c, g, or t
gggtaattaaatgggtatttataattagaacttaataatttgcatcagggacaaatgagctctgattttaatctgcagcgatttagattagcccaaagatagtgtaatttgatggtttataggcctcctctcggattatgaaacaataccaagccttcaagtgcagtgtgtctatgtcaggagggtgttaaagaagaagatgcaatgaaaatgtttgacaacgtgaaagcagccataaattacatgacaactgtgtaaaagtcatgatgaaacaaataaagggctgacctataatgcgtctgattcattgtgacacacacaactccctgcgctaatctctggcccagccaacgcattcttaaggcggggggaactacttaggcaccggggaacgttgttaaattattcantagttcaacagcctttgattttttagttcggacnttttcattcaggttggaggtaggaattantacccgggttccttccaacagccttttaaccgttcca

SEQ ID NO: 428064 - DNA, 301 bp, Homo Sapiens
  misc_feature (187)..(187): n is a, c, g, or t
  misc_feature (202)..(202): n is a, c, g, or t
  misc_feature (217)..(217): n is a, c, g, or t
  misc_feature (260)..(260): n is a, c, g, or t
  misc_feature (266)..(266): n is a, c, g, or t
  misc_feature (281)..(281): n is a, c, g, or t
  misc_feature (286)..(286): n is a, c, g, or t
caaagaagaatcaccatgtgacatgagtcaggtcctcctaggagttgccatcagggagggaattatatgatatccctgaaaaccaggtctaagcaaagcatacaacactataattgtcctcttatttttctataaaatgagggattttcacatgttcccttatgagttgctgtagcccaaagccttnttcccttgtgatctngggaaaaaagggttncctcctgttttgtcttaggatcaccctgcaggtacatgtgggnttggancttgggtattcactnaactncccagatgaaagggc

SEQ ID NO: 428065 - DNA, 393 bp, Homo Sapiens
  misc_feature (338)..(338): n is a, c, g, or t
  misc_feature (373)..(373): n is a, c, g, or t
ctttttatacttaaaacctcagtaaactggcaaagaattgaaggtaatgtgatttgatttgagaataaaacattgtagcattgggtgaaaaatgagtatttgagttaagcttacatatttatttctgatggttatcttattaaaagcaataatccttaatactgtacttgccattagactaggtactcagtaatggaagtttctctcaagggttaaatgttccatttttgaaagttttaaaaaacctgtttgggtggtttattttgaaaacaaaagtaacctattaggattcattttgcctaactcatatggggaggatgcaggagtattcaacagtnggggagccatccattaaaatggattttccccagtngggagagggagtagggggag

SEQ ID NO: 428066 - DNA, 459 bp, Homo Sapiens
  misc_feature (289)..(352): n is a, c, g, or t
  misc_feature (369)..(369): n is a, c, g, or t
  misc_feature (400)..(400): n is a, c, g, or t
  misc_feature (437)..(437): n is a, c, g, or t
ctcgcagagaaaaagtgcaataaaataaatagtgactgttttctttagcaatagctctttcaaaatcttgctctcaggactgaaaagtgatagatagtacctggattatcagataatgcccttgacttctgggggctcattcacagtctctgtagtttcttcttcttcccacgtgttcacatgactcctgtcctcttgagatctgacctccttctgggaatgggacacatatgctaaggatgcagtgtatggcacaagggaaggcctgtgaggaggggctttgtcactnnnnnnnnnnnnnnnnnnnnnnnnnnnnnnnnnnnnnnnnnnnnnnnnnnnnnnnnnnnnnnnnctccccattttctggcntgctgttcatacaggcatccttaacaacctntagggggatggaaaatcctaaggtttgtggtggaccnttttcaggcccattttgttgga

SEQ ID NO: 428067 - DNA, 252 bp, Homo Sapiens
  misc_feature (80)..(80): n is a, c, g, or t
  misc_feature (88)..(88): n is a, c, g, or t
  misc_feature (91)..(121): n is a, c, g, or t
tgttcaagttctggttgttggagtttttagcccagagtgacatactgaagtcagtaaataattattttataatgacacancacaactnccnnnnnnnnnnnnnnnnnnnnnnnnnnnnnnnctgtatttaagaaaaattcataacaaggcagttgtgaatttttcttaaatgcatatatactgtatttaaaattaaaatataggataccaatttaccaaaggatacatattactaattctaaggcaaaactt

SEQ ID NO: 428068 - DNA, 412 bp, Homo Sapiens
  misc_feature (328)..(328): n is a, c, g, or t
  misc_feature (348)..(348): n is a, c, g, or t
  misc_feature (395)..(395): n is a, c, g, or t
aagtaagtaaaattcatttgttaggtatggcagctcttggctgattacatctaaattggctttggttaccttaagcacacacacaaaaatatattagaacactattgagtaggtcccagaatcaatgggaggtctagagaacaaggcttgcaaatggatagggatcaaagctaggtatgagaaccatggccagaggaatggcactcatgctgtcccagcactactgccttcagcactggtgacaaaatgcattctaaattgcccccattgtatcagtcagagtctttaacaagaatagggtgggcagactcagggaggatcttaaagntctttttttacaaaggagtngggtgtaggggtgagccaccaggggttagttttggttaccttgctgntagttagttagttaacc

SEQ ID NO: 428069 - DNA, 440 bp, Homo Sapiens
  misc_feature (353)..(353): n is a, c, g, or t
  misc_feature (392)..(392): n is a, c, g, or t
  misc_feature (405)..(405): n is a, c, g, or t
  misc_feature (418)..(418): n is a, c, g, or t
atcaattgaagaagggatgaatcagaagcattagctaaagtagtggctttctttgatggtgttttaccaagaggaggaatcagatcaggtcccaccacagtatgcaggctgagatgattcatcttttccaaaaactgagactatcaggagaacaaagtaattcttctttttctgcatatggctatgctgtattcttcattacttcatgagtgtatgaatttgctaggactgctgttacaaagtgctacagactgggtggcttcactatgggaaatttactttctcacagtcccggaggtcagaattccaagatcaaggtgtcagcagagttgattcctttttgagggcctccntccttggacttattaggatgggtcaagggagatgtaccntatttatggtttncctctgtagggtntttgttgtttcaggagtttgat

SEQ ID NO: 428070 - DNA, 419 bp, Homo Sapiens
  misc_feature (15)..(15): n is a, c, g, or t
  misc_feature (304)..(304): n is a, c, g, or t
  misc_feature (314)..(314): n is a, c, g, or t
  misc_feature (322)..(322): n is a, c, g, or t
  misc_feature (336)..(336): n is a, c, g, or t
  misc_feature (398)..(398): n is a, c, g, or t
  misc_feature (407)..(407): n is a, c, g, or t
cgtcagtcgcactgntgatttcctacattctctctctctccacgatgctgcaggggtgttgataaaccctgtgtttaccttcggatcatgccatcttcacaatcccagctactccacgagataagcatggcgggttgtggttgtctcacggtcttctctcttgataaaagcctgagagaggtgggtgtagtaggagatggttatctcttggcttggggtgcgttttctgttcatccgtgcaccttacctcacctcttcaaaggcaggaaggtgtggaagagagaggcacatggcagagggggtngctgagagtngcaggatnggtggaggagaccnacacttcagctcagagtctgcaggcttctgctctggaggggaagctagacccaacgttgagnaagcaccgnttcattttctcc

SEQ ID NO: 428071 - DNA, 204 bp, Homo Sapiens
  misc_feature (146)..(146): n is a, c, g, or t
  misc_feature (185)..(185): n is a, c, g, or t
tttttcttattatgaactatattttcctgactctttgcatgtgtagttccttttgatttcaagaagtcagcatcttgagcaatgaaaaattatttcaacaaaattttaaatttgtttaagaggtgcatattctccagagcagtggncctcaacctttttggcataatgggaccagtgtcatgaanaacaatttttccacagact

SEQ ID NO: 428072 - DNA, 300 bp, Homo Sapiens
  misc_feature (109)..(109): n is a, c, g, or t
ccagctgcttgctttcaggctataatgtccttcttgggtcttcagactgcagttaccttttcttgatgaagcatgtggcagccacttctcttgaacagctgggagtctngtccctgatgagcttcatttgtgttcctccttccacagtggctgactcctggtttagtaaccttggtttcttccattactttgtaacttacaactgggttagaaaaaccaatttttaatttgtcagtaagatctcttctggttttgcaccctgttgtatgctgtgtgccaagagcttaggtggttttctcc

SEQ ID NO: 428073 - DNA, 491 bp, Homo Sapiens
  misc_feature (125)..(125): n is a, c, g, or t
  misc_feature (128)..(128): n is a, c, g, or t
  misc_feature (353)..(353): n is a, c, g, or t
  misc_feature (426)..(426): n is a, c, g, or t
  misc_feature (463)..(463): n is a, c, g, or t
aaactcaaccctaagctctttaagggtgcaagtgtcatcttgggtttctgcgtctcctgacttcctccccaggcctggtgcagaagcactggcaatgcgtcttatgctgggcagacggtgcccanaanagttgaatagatatgtggcaacaggctggctcagctggagtttcaccctcagtagggaggaacacataactccttcttgctgtggtatgggagtcccagggtctcaggacagtagaggccactggtccacacatgtcttctatgttcagtttgatcttgaattttgagattaggcgattctctttctcctctccctagtggggaggaacaacagggagctggggntttggctgttagccaggcagaggtccccagttaggacttcaagggaataacttttcccaagtaggccagagantttttgggaccattttgcccagattgggatttcaatnattgggttttaggacttaggaggacttt

SEQ ID NO: 428074 - DNA, 412 bp, Homo Sapiens
  misc_feature (219)..(219): n is a, c, g, or t
  misc_feature (325)..(325): n is a, c, g, or t
  misc_feature (374)..(374): n is a, c, g, or t
  misc_feature (387)..(387): n is a, c, g, or t
  misc_feature (392)..(392): n is a, c, g, or t
catgtgcggcagggctcggaggcctcagaatcaataaggaccctttagatttaaaactaatgattttctgtgttcagcaaaagtcaaaatctctcaaagttgccattgttgtctctgagtttttccccagagaacaagagatggtgtgataaatcatcatgcttgcaacacgcacgtcagaagagacttgaactaggaccagagatgggatagcgcgancccaaacatcttaattatttcagtcttgaattgaggcaaaaccctttaaactaggaactgtggggaacagtggattcctaacaggcagtaggacacaccatcttantaggggtcatcatggccccccaagggttaccagtgttggaccccttccnggggattgccaangccantcgttttccttccccggcag

SEQ ID NO: 428075 - DNA, 411 bp, Homo Sapiens
  misc_feature (88)..(88): n is a, c, g, or t
  misc_feature (353)..(353): n is a, c, g, or t
  misc_feature (400)..(400): n is a, c, g, or t
tttcttgaataccctctagatcaggtttttaaaagaagttgctcaactacatcaattctaagacttctttctggttcgcagattctgngccttattggttgatatgattctgttcccagcccatgctttcagagcatttcatgagtcccaggccgctgagggaatatatgcaaacccgagactagtatctgctcctaaagaaagctgtgaattctcttgccacagatcgccatcattgtaaggatgatatgggaacttaggaatagggcacttactttaaagctgttagtttattttcttcttacggatgtgctgtctttgtgttgtaggcttcacacaagggtcacttgagntgtttaactctattctgggtttctgggctgatctggggaggatcccnggcaccccagg

SEQ ID NO: 428076 - DNA, 122 bp, Homo Sapiens
  misc_feature (80)..(80): n is a, c, g, or t
  misc_feature (87)..(87): n is a, c, g, or t
tgaggtctacatttacagttaagagtattagtgacttgtatgtgggagaattgggtctactctaacacaagtgtgttctnttcattntagtgtacctgttatataaatataaaatctgtata

SEQ ID NO: 428077 - DNA, 471 bp, Homo Sapiens
  misc_feature (334)..(334): n is a, c, g, or t
  misc_feature (381)..(381): n is a, c, g, or t
  misc_feature (401)..(401): n is a, c, g, or t
aacatgactcaggctggctttaaagcaacaaggacatttatggactcatgtaactgcagagcccagttgtcaatagctcattgatgtcattgggcagctgatgtctttccatctctggcctctactgtcttccatgttggtttcattctcagctctaggtgatgacaagatggctcccaacagctttaggcccactttcttcctggttcatactgcagtgcacctcattggctctggttggatgatggcatgtccatgaactaatcactgaggctggggatctgtgacccactgatgggcctgggccaagccataagtttcactttaggaggtngggagaaaaatcaactccacacaaggctaaggaatgagggaggggtntttccttcttcaggaggggntattttctgggagggagggaattgaattgggatgttagggatgggtaaccaaaaaggaacttgagggtcc

SEQ ID NO: 428078 - DNA, 459 bp, Homo Sapiens
  misc_feature (31)..(31): n is a, c, g, or t
  misc_feature (428)..(428): n is a, c, g, or t
tatactaggtaaaatatcattttacaccttnactagcatattgatgattgataatgcagcttatactgctcagaacaaaattaccctttcccccctctcctaccctaactcaagttcatgtcatattgatctttatgttggaatcacatcacatgacattatgtacattttatgtcttcatggaattagggagaaaaggctttgggaccatgaggaaactcagtgaatttgaaatatactgataggctcactctcataaaccacatattgatgccacatatgggatatattgtcactcaggtcagtgtgaggaatatgatcctttcagtgatgttataggctcacaatcctttttaaagggactattacccaaaacatttaacagctgtccactactaggtattgttacagtttcctacagggttccnggaaatccatctttcggtattttttatccgg

SEQ ID NO: 428079 - DNA, 404 bp, Homo Sapiens
  misc_feature (49)..(49): n is a, c, g, or t
  misc_feature (132)..(343): n is a, c, g, or t
  misc_feature (357)..(357): n is a, c, g, or t
aaaaacacccacctcagaaagctgagggttaccagcggcgccaggccgnagccgccccagtgccaggctcactgcttgccataggagccctgccctctggatctcatatctgcagttctgaccttgcctgtnnnnnnnnnnnnnnnnnnnnnnnnnnnnnnnnnnnnnnnnnnnnnnnnnnnnnnnnnnnnnnnnnnnnnnnnnnnnnnnnnnnnnnnnnnnnnnnnnnnnnnnnnnnnnnnnnnnnnnnnnnnnnnnnnnnnnnnnnnnnnnnnnnnnnnnnnnnnnnnnnnnnnnnnnnnnnnnnnnnnnnnnnnnnnnnnnnnnnnnnnnnnnnnnnnnngacgtgctgtgttnaaaatgtgttttgcagggcagtgttgcttgggtggaaagccatcgcc

SEQ ID NO: 428080 - DNA, 445 bp, Homo Sapiens
  misc_feature (297)..(297): n is a, c, g, or t
  misc_feature (305)..(305): n is a, c, g, or t
  misc_feature (315)..(315): n is a, c, g, or t
  misc_feature (322)..(322): n is a, c, g, or t
  misc_feature (361)..(361): n is a, c, g, or t
  misc_feature (403)..(403): n is a, c, g, or t
  misc_feature (411)..(411): n is a, c, g, or t
  misc_feature (416)..(416): n is a, c, g, or t
cacccaccacttacccttctcgctggtgaagtggccaactgccatctgattctgcaggtgggacacctattggatgaagtgtttctggagtggcccctgcacccagcagtgcctttgttggggatggagagtcagaatgcctgccatcggggacttgagattaatttggtggtggtcctagacggatgtgagggatttggagagagaccaggtgtggaggggctttggggcagagccggggttggcctgacttggcttaatgggcaggaagagggggcatgggagctctcagaccangggaaatnggcagccttncctgatntttgcccagaaaattgctttccatgttcctcttcatctnggtttagggggcccctaaaacaaagggggattcttggaaagntccggggnaaaangcccatttttcttttcagaacccttgggg

SEQ ID NO: 428081 - DNA, 416 bp, Homo Sapiens
  misc_feature (375)..(375): n is a, c, g, or t
gacatccttagatgcccttcctgatgggcagctggtgagtcttcttccagctattttagtgaggtgggtagcagtgcatggggttgctgaggcacgcaccctcggaacatattggtgtctctccctaatggggcagcctactctgtacatgtcagaaaaggtgcctgtgaagctggcaatgtgagcttatatgatcctgggccatgttggcaccaggtaggattagccattggcaaaaagccaggttggccaagtttatttctggtgccttctcacttccacacccttttgtcattgcctcctgtgcagtcttcagggtcctggaatttctatttatcttctacacatctatgggggatttttctaacacatccnggacacatcccgggcctctgttgttccatgccagggttcct

SEQ ID NO: 428082 - DNA, 379 bp, Homo Sapiens
  misc_feature (95)..(127): n is a, c, g, or t
tttattaaatgaatgacatacttaattttgttctctactggtagtttgccctggcgcatttctttttatttctattagccaaggcagggttaggnnnnnnnnnnnnnnnnnnnnnnnnnnnnnnnnnaggattaatgataaagcacttatcttgttggaatgagagtctactaacaaatcctgtacatcataataacagaactatcatctaacaacttgttctcaataaataaactttaaaacaacttcctttattatttcaaagggcatacatagtcatatatataaccagtaaccaatacttgtcagtgtttattttaaaatgcaggttaggtttccatttaggtttgctacctaccttaaagcccctcttcctccg

SEQ ID NO: 428083 - DNA, 330 bp, Homo Sapiens
  misc_feature (129)..(129): n is a, c, g, or t
  misc_feature (282)..(282): n is a, c, g, or t
gaagttcaactatctttaagagaaagacacatgaacgctactgccacatttggtgaaatttccaagcaacggctgtggcagaactacatttttaccaggcagaacctgctgtgaagggggtgaaaccangtagcccagctgagtttcccagtgtaaagttctgtcgctgcctaccaggacttttcaatggtcaccttcctctgagggggccaaggagaggtccgagggcctagggatgacagacacacagagctctctgcagcagcgggtttagggacacanggtgacttgggcagttgttcatccctgttctttgaagggaaggagcgt

SEQ ID NO: 428084 - DNA, 315 bp, Homo Sapiens
  misc_feature (285)..(285): n is a, c, g, or t
  misc_feature (290)..(290): n is a, c, g, or t
gtgaatatggttgaaagtgacctaccattcttagagtcctggctggatttagggagaggcataagaaaggataggttatcatggacttggaaaatgggagtttttttactgatccatgtgtgggtaaagacccggccaagggactaatttctactcactggtcctgcaatgtatacaagtcaaatgccatagtcaaaaatatgaattatttcaggtaatagatgtttaggttactattagtaggttcaaacagatgaggcaaatgccaagggtctacttgtactnaaaantttctaaggggggttggctagccag

SEQ ID NO: 428085 - DNA, 436 bp, Homo Sapiens
  misc_feature (88)..(88): n is a, c, g, or t
  misc_feature (159)..(159): n is a, c, g, or t
  misc_feature (162)..(162): n is a, c, g, or t
  misc_feature (278)..(278): n is a, c, g, or t
  misc_feature (295)..(295): n is a, c, g, or t
  misc_feature (300)..(300): n is a, c, g, or t
  misc_feature (305)..(305): n is a, c, g, or t
  misc_feature (354)..(354): n is a, c, g, or t
  misc_feature (384)..(384): n is a, c, g, or t
  misc_feature (401)..(401): n is a, c, g, or t
  misc_feature (412)..(412): n is a, c, g, or t
  misc_feature (420)..(420): n is a, c, g, or t
ggaatacttagaaccttttctgatgccttgtgactttcagaatttaaaatcccccttgcagataaggccacccacggcggaaggcggnaggcgagacggggctgaggggaccttgctcccattggagctgcagggcgggaaggggtgctgcggtcaganagnggcacccttcgcctgcgccgtgtgcagtgcctgcagtcactccctcattcccagggagtagccttgggtcagatgctggctcagatcttataactgctcctgtctggtagccaggnctgcccagatgttgcantgggntggantaaagggttcttttggaaggcaatttttttaacaggcaccctttggggntgttggctttggctttttggccacacgttnaaggtttttgtttttcnagacctacttncccggggnaaatgggccgcattgg

SEQ ID NO: 428086 - DNA, 422 bp, Homo Sapiens
  misc_feature (358)..(358): n is a, c, g, or t
tcacctggatggtgagtgatgtggaacctttattgagactcaggatgtttgcctttctaactattgggccagaaaactcttagttgttttgttttattattaccaacacaacacatgctattggcaggaaacttgtatggttgatggtgttccctgatatgtgtcataatttatcctgttcccttttggacatttaggtcatgtgcattttttgcttctataaataacaaagctgtgcatgtctttacacatcatctttgtatacaactctaaatatatccttgggtataaatttctaggatgtgggcgatcatggggtcaaatgggtattccaaggggttctggatatgtgttgccngagggactgggaggggcaaagttgcaggatttttagggtctcagtcagttttaagggtatggac

SEQ ID NO: 428087 - DNA, 469 bp, Homo Sapiens
  misc_feature (356)..(356): n is a, c, g, or t
  misc_feature (382)..(382): n is a, c, g, or t
  misc_feature (411)..(411): n is a, c, g, or t
  misc_feature (430)..(430): n is a, c, g, or t
  misc_feature (437)..(437): n is a, c, g, or t
cttgttggtcatttaggcacaaactccaaatgatttcccatgcaggtcagttcaaggaggagtgagagggtcgaaaatcaatctatgtggatgtgaatctaaagccaactggtggatgtgagttttcacttaggtggtcttgaggtggccctaaaaatcctggacactgtaccagtgtaaaataggcctgacacctgaatcattttcccagactgagaatattggccagaagcccactgtctagggatgtgtgtaggtaacagctgttctctttcatataatacagcaggatgggcactgggtgtttcagctctaccatttcacttcagtgaggaaaccttatgttaaatttaccnttgttatctcccggcttcttctttancccgtttttcccaaacccctttagtgggnttccaggaaaaggctgggntcacccntcattcaggttttttaaaattccggagttgcc

SEQ ID NO: 428088 - DNA, 493 bp, Homo Sapiens
  misc_feature (408)..(408): n is a, c, g, or t
  misc_feature (468)..(468): n is a, c, g, or t
cctaaaataaataatccacataattgtaaatgaaacacatcaaggatttgagttaatagcctctgagcagcattaatatagccattagactggagtatttgttatcaagagggccagagaacccaccgctaaagccgtaggtgggaggaaccctggattgcagctacatggcttatgtagggagtttgtaacagccccaagctgaaaccagcttctacacccatgactgttgagtgaggcaaacacaaacaagtggtgaaatgagaaaatatatgacggcaaccaggatatataaactgaaatattcttgaactcattttcccaacagtactgacatactcaagtcaggatagatccacaggaacaggccttgcattccatggttaagaggattctagagtctgtctngcacttgacgtgggcaacccaactctaggagccggactcttgaaatttgcctagtgttgntaaccattccaaaccacggggcttt

SEQ ID NO: 428089 - DNA, 477 bp, Homo Sapiens
  misc_feature (156)..(173): n is a, c, g, or t
ctcctatctgtgagactctgattctgtggtgctgggatggagcccagaaatttatattttcagaaagtatcccaggtaattcttaacttacagaagtttaggaaacagccatatggaacataataaacttttgatgatttttctgaaaatgactannnnnnnnnnnnnnnnnngcctttctctggtacaagtctaatagtgcagtttactcacctactgggctgtgagaggcccctgttttccccgccttggctcactgggcctgtccatccaggggaaaatgggaccacaaataaggacagtctcccgcagaagtcccccttaaatttaggcctggattcctgatgggccccaggggcaggcatgggctcttccatggaggaccccaccagggttgttgggtccccaccggaaggcccagggttgcaggtgggggccccatttttcatggcagggttttgccagccgttgtttttt

SEQ ID NO: 428090 - DNA, 402 bp, Homo Sapiens
gtaagtaaacgtgatgataattataaacaacattcaaataaccttggaccttggtgaaatgacttgtggtggccagaatggtgcaacaagatgttatttgcaagtttttttaagacacaaatatctcagatactaataatgagaataaagactgttgaatatgaaattaaagccaagcaataatgtgccaaaaagaggcagttataccagcaaatgcatctattatggggcacaccattatataatgatggtttgctttatggaagactgactgtaacccacagggttaaaataaggcaaagggcatagtttctgctttcttcctggggaaaacttgtttaggaggcttccattaaagagggtacagcacttaatgaggcttagttcagggatacagttggg

SEQ ID NO: 428091 - DNA, 358 bp, Homo Sapiens
  misc_feature (327)..(327): n is a, c, g, or t
tttgttcacagtaagttatatcaattaagttgcttagaatgaacatatagctgaactaataagcatgaaatattttcactgatttataagaatccagaaattatcaatgagttttctttttctattatttaaaaaagtttttgcttggcaaatcttcccctctaggagattaaagtattttttgctcattaatcaatgtaagaacaccttactttacattcattgaactctgaggttataggaactgtggaacctttcaatttgttcgggcttgggggaatgtcatagttcattctgttgagtgggaggttgcctttaaccacatgnggaccaatagggggaatattaaaggttttac

SEQ ID NO: 428092 - DNA, 449 bp, Homo Sapiens
  misc_feature (235)..(235): n is a, c, g, or t
  misc_feature (269)..(269): n is a, c, g, or t
  misc_feature (361)..(361): n is a, c, g, or t
  misc_feature (375)..(375): n is a, c, g, or t
  misc_feature (412)..(412): n is a, c, g, or t
  misc_feature (421)..(421): n is a, c, g, or t
tggaagttctcatgtttttccccacataccaatgcacctgtttgtataaactattgtggggtaagcccttctttggagaccagtgacatagacatgattcccattatattataacaaataattattaataatctgtactattactgctttagttatctagtgttattgagaaaggagaagtcagcatagtttattttccatgtaataaaagcttaacacattatagggtaggggncaaaatctggctagctatcaagttatgcactgantgcttaccacatgtcaaacacaggggtgacagggtgctttgtctcccataatctcatttaattctagggccatcctgcggaggtaactttcntaatacttacttcntagggtttttggggaggttaaatgttaatgacgggcncgtcggggngttccggctccggggtttggtttccctc

SEQ ID NO: 428093 - DNA, 349 bp, Homo Sapiens
  misc_feature (270)..(270): n is a, c, g, or t
tttcagtgacaacagatttcaacagattttcaactagactaatttgctttattctttagggtagtttacttattttctctgaaaacacaagaaaagatactccctttccagtaactgatgttaatgtataaaataattttacataggcaaacttttgtatttggatgcatattttgacataaatgtaaattaagatgtttatgatcatgttattttcaggctagttgataacctatttactagggatttaaaaaaacaacaggcacgtangaggggacttattttaaatttctattggactttattatattcacataacagcttagggccttaaaatcaataccacctt

SEQ ID NO: 428094 - DNA, 348 bp, Homo Sapiens
  misc_feature (329)..(329): n is a, c, g, or t
gaaaagagttcagttattcttaagaatataactctatgctcataaatttgcctgtttatgtggaatttgaactcttcaaaaaatggtaaatctttcagaagataacaagaattaaattaacacatctggccgtagctaaaggcacatataaattatctcattcatttgccaaaatttcaaaccaaagctaaaattttctttaggaaagccaaaattaggcaaacatttcttataaatctttgtaactaggttaatctggcaaattgggcgtacttcaatgtactttattataggggaggaaggtaaaaatagtggcttttaaccaaaantcccctcttattggatttt

SEQ ID NO: 428095 - DNA, 482 bp, Homo Sapiens
  misc_feature (339)..(339): n is a, c, g, or t
atgtccagttgtacagataaatacacaatgttctaatgttacctcaaggcctgaatttaggaattgaaagtctttggtttttcacagtggtgaagaaaccagtagtaactttaaaatacccttgagtttccctctgctcatttatctcccaaatctatagttcatgttttctttctgtgatatccacttccttgtaataattggcttctgagattaataaattcttgaaaggcatagggaaaaaatgaaaatttgtctctttgaggaggcaggggacaagtttttttaagaggggaaggaatggaaaaggatggcagttattgtttttaaagccagagngagggattgtggctgggccattaaagggagatttgtggaggtgctttgtggggatttggaagtttctgctttgctttctccggccacactaggagagccccatttcaccgtccctttcaacaccacccgtatttttggtaaac

SEQ ID NO: 428096 - DNA, 412 bp, Homo Sapiens
  misc_feature (139)..(139): n is a, c, g, or t
ataacctggagatttgttttgcaatgtgttgtataacaatgttgatttaattgcctcagggatttcacatgaaaatccaggtagaaaagtggaaaatatagcaacagtgggattggaggtgaatagctgcctccacctntggatgaggcatgtcctctctttttatcaaactctcatcacctcttttcttatatcctgtctgcttcatttatttatatcatctgcttgcctctgttggtatggcagttagcaacactaatcatctggtttggggaggacggtgctgcacttattttcaccaacaaagggccagggggacgttttgcactcatttttttgatagcaggaacacttacagggatccatggaacaccacattgggaattcaggagggggcattaagtggctaatt

SEQ ID NO: 428097 - DNA, 570 bp, Homo Sapiens
  misc_feature (350)..(350): n is a, c, g, or t
  misc_feature (431)..(431): n is a, c, g, or t
  misc_feature (444)..(444): n is a, c, g, or t
  misc_feature (483)..(483): n is a, c, g, or t
  misc_feature (506)..(506): n is a, c, g, or t
  misc_feature (515)..(515): n is a, c, g, or t
cgtgctatgaatctgtccaaataaacatgggaagtagtgaaacaatgacaccacatgaaaaatatatccttattcattaaatagaatccaaaaaattctctggaatttaattgtagcaatgacgtgaggactgtctggtctattaagagaggatagtgacttccctcttcagttagtccagcacggatgagtgtgatcttaagtggctctacaattccacatgcatcgtcctaaatctagatacatgaaaatggatcatttcctatcaacccctcactcacacccgtggactctagggcatttgtggtagagttttatggtaattacaaacataaggcagcttgtcaganttcaaataatcaattttaatttctgtgcttcaatcacttaaaggttactgaccactatggatggaaatttaagggagtgcntttctctgggagntttgcaaacacaaggggcaggggaggaaggttaggaggnttctattttgttgggtccagttnttggaaaanttaccgttcaaaaggccgtagcccttattccacctttttaggggggacccctgaa

SEQ ID NO: 428098 - DNA, 383 bp, Homo Sapiens
  misc_feature (316)..(316): n is a, c, g, or t
ttgctgaactagtaggtaaaactcccttcctcttaactgagctgactgatttttgctagatttttcttttcgtttcttcattttgtttcttccgtttcctgggatttcatgtgtgatttctttttctaaagcacaacctttggggtgtagttaagagacatttttccctgtgtccccaccaccccttccacacatgtgcacgtctcccctgagtgcccagacagcgcaggaccacgcagtccactccgtctgcccctcagagattctgcctctctctcctgacctgtgccacattcttgtgtcaggaccccacctnccgctgcgttttcttgcaacatatgaggagtctaggatggggcacagcatttaggagggaggtggcc

SEQ ID NO: 428099 - DNA, 427 bp, Homo Sapiens
  misc_feature (405)..(405): n is a, c, g, or t
  misc_feature (412)..(412): n is a, c, g, or t
ccaattttgcccagatgaatctttccgacttcaaggatgcaagggatccaatgtaatcatctgttactgactggctgttggtcttatcaagaagtagcaccattttggggattgagcattgctctgttgctggcagattagttattcagctgtggctaaatgtgccatcccaattcaccatcagtgtgcatattaagagtttcagtgttactgaatgccaagaactattatcacaccatccatttcaagtggtgaggtcctcgttgccagctatcatgaagtgatctagtgtctcttttcctgggacaacttctgattttaatggttgtttgttcagtacctcggtaatagactcttgaggatgggagattttgcatacaagcaattttattaggagtgtgtttnccggggnccaatttgttaatgg

SEQ ID NO: 428100 - DNA, 450 bp, Homo Sapiens
  misc_feature (342)..(342): n is a, c, g, or t
  misc_feature (359)..(359): n is a, c, g, or t
  misc_feature (369)..(369): n is a, c, g, or t
  misc_feature (378)..(378): n is a, c, g, or t
  misc_feature (402)..(402): n is a, c, g, or t
  misc_feature (423)..(423): n is a, c, g, or t
  misc_feature (440)..(440): n is a, c, g, or t
tccaatcagaaccaggttgttgaaaggagcgtccacactacagctcgctcagaggttttggaattttctcgctgacattatgaaccgcaaaggtctttgcctaactctgtagaacctgttttcttgatttggctgttgggcgacaccagacgccttggactttccctaggaggcgtggggagtccctgggtctcctggttagggtcagtgacagggatgctcagagcacattcatggctcaccacagacaatgtgacccccaacactgctgcagaaagggtgccgcaagcgccccagggactgaccttttcacatccatcttcccaagcatgtttgacagantatctgggagggagggntgatggatanctcttgaanttagggattttaagggggtgaagnttcatattttgttaaaggganttttaaaaacacccaantgggaggggc

SEQ ID NO: 428101 - DNA, 108 bp, Homo Sapiens
  misc_feature (98)..(98): n is a, c, g, or t
tctggacccagcactcagaaacaccatacacccctggccgacgccatcatgcccctggatctgctataggccacactgaccacatgctcctggattcnctaattcact

SEQ ID NO: 428102 - DNA, 199 bp, Homo Sapiens
  misc_feature (100)..(100): n is a, c, g, or t
  misc_feature (155)..(155): n is a, c, g, or t
  misc_feature (176)..(176): n is a, c, g, or t
  misc_feature (185)..(185): n is a, c, g, or t
agtgggtgagcaagaggaatatttatagcaattgagtctggacaggtaagcagaagactaaccacacagagtcttgtccatagcacagactctgcctgtnttcagaaatggggaagagcacattaaaggggtgatcaagggaatggcataaagtngagttaaaaatcaccacactnccatatggncattactctttgaa

SEQ ID NO: 428103 - DNA, 369 bp, Homo Sapiens
  misc_feature (131)..(131): n is a, c, g, or t
  misc_feature (146)..(146): n is a, c, g, or t
  misc_feature (187)..(187): n is a, c, g, or t
  misc_feature (236)..(236): n is a, c, g, or t
  misc_feature (267)..(267): n is a, c, g, or t
  misc_feature (275)..(275): n is a, c, g, or t
  misc_feature (299)..(299): n is a, c, g, or t
  misc_feature (305)..(305): n is a, c, g, or t
  misc_feature (350)..(350): n is a, c, g, or t
cctgcgcgtgctaagaaactgcatgttaagattccacctactgaatcatgagcggaggaagtcgtgggacactggctggtggagaagccatctagcatattattcaagatgacaccagctccaagtctggnatgagtctgtggganaccaaggtacttcttggacattcacctataactcacgtgtntcgtggactggtcacagtggttcggataaattgaacagaactttatgancacctcccagcaccaggtgttgttatagaanctaaggancagagcaatgagaagggacccaantcctgntcttcaaatggatgcagtgggaaaataaggcagattttggaaccnttggtttagttcagaagag

SEQ ID NO: 428104 - DNA, 360 bp, Homo Sapiens
  misc_feature (321)..(321): n is a, c, g, or t
taagtcttgtatttcacctcctggtggtaaatattttttaacaatttgtcactgttcctccttttgttttcctttctgtgagcaatgtcacccaaattggaaccatgctgtatacagtttggtagctggctttttatgtcttaccattatctctcatttgcattctcccacatctttaattataggcgtatcagttagggcccagcaggaaacagatgggcccgtcaatttagggataatttgaggtgggggttgataccagaagcctttataaagcgattgggatagtaaagggcaaatgacaagagctagtgcaagctnctgggggccagcatggggtgagggggcctcatccacagg

SEQ ID NO: 428105 - DNA, 374 bp, Homo Sapiens
  misc_feature (163)..(163): n is a, c, g, or t
  misc_feature (187)..(187): n is a, c, g, or t
  misc_feature (240)..(240): n is a, c, g, or t
  misc_feature (267)..(267): n is a, c, g, or t
  misc_feature (278)..(278): n is a, c, g, or t
  misc_feature (295)..(295): n is a, c, g, or t
  misc_feature (307)..(307): n is a, c, g, or t
  misc_feature (349)..(349): n is a, c, g, or t
  misc_feature (356)..(356): n is a, c, g, or t
gaagttaagttgtaattgtttttaagtgattatgtacacttctgttttagattgctctctttcactaaaccttttagcatagtgttcattcaagtctcttgctcatcctcacttcaactctaacaaattgaattctcttctctaacttcgagcattctctgtnagaaaacttcagtgatgatatgtngtgtttgtgcaacagagctttaaaattcacagcacataggtacaccgtctagngtgaaccccacaaccactctggggagnatagacaaaanggtgttattcccatttnggaggtaggaancactgagacccgggaaatgctaagttactttgcctatggggnctctctncatttgacagtgctttgg

SEQ ID NO: 428106 - DNA, 265 bp, Homo Sapiens
gcattctgtattctgaattcctcctgggacattagtgatgtgtttttttgtaacttaggaattgtacctaatttattttttaaccaaatagcatatcttcttgagatggctagctgagaaagagtatgacacatgtgtgatcaaggatcagcaaaattaactacccatgcaaagattaaacctgttacctttacttccctaatgtggtattttaactagctgagctaaccaccaatgggagttgatgggtatgggcctttcctgt

SEQ ID NO: 428107 - DNA, 484 bp, Homo Sapiens
  misc_feature (380)..(380): n is a, c, g, or t
  misc_feature (423)..(423): n is a, c, g, or t
  misc_feature (451)..(451): n is a, c, g, or t
  misc_feature (458)..(458): n is a, c, g, or t
  misc_feature (474)..(474): n is a, c, g, or t
agacctatagagctacatgtagagtaaacatggattaggtcttgttgataatgcacatctaaaaagagagttttgctacaggtaaaatgataaattatattatttatactaaccactcatttaaattttcagggataatgaggctgtcagaggaattttttttgtctttgtcgtggaaaacaaaagccatggttttaccaaggatgctatttagtaccacaacagacacaggacatactaagtcaaaagcctgctggggaactgggtatttcttacgattattgggtatggagtaaggtggaaaattttcaggggtagggttaactttgggtctccctgttaaagtgttgttttggacactaggtaaaatacattttttnttaaggtattattacatcccatttttccattttggccaattanttattaattccaccaggctttgttaccntaaccantttacttttggggggncccagggggt

SEQ ID NO: 428108 - DNA, 457 bp, Homo Sapiens
  misc_feature (76)..(76): n is a, c, g, or t
  misc_feature (113)..(113): n is a, c, g, or t
  misc_feature (297)..(297): n is a, c, g, or t
  misc_feature (360)..(360): n is a, c, g, or t
  misc_feature (422)..(422): n is a, c, g, or t
  misc_feature (435)..(435): n is a, c, g, or t
  misc_feature (447)..(447): n is a, c, g, or t
aggggctaaaattgtacactataaccaattctcagtccctagaccccattctttgttcctcttcttcctgattttnttccctagtccatttctttttgtccagtattcctttngttcataggcagttccactgtgagtcctgtactctttctcattcattcatggctcactgtgtgtcatgttctattctaggtgttggggatatagcagtgaacgaaacagaagacccctgacactgagggagctcatgttctatgggggaaggtgaagtgggaaaaaaactcaaaagaataaatnaggggaatttccaagaagttttgaagggaaatctaactagggtaatgttgattgcggggaccntaggggattaggggaaggggcataagactgcttttaggataaggatggggaaatcttctttnaggggggagtttnaaaatttggacntaaggccctg

SEQ ID NO: 428109 - DNA, 442 bp, Homo Sapiens
aaatatcctaaatgatagatcacaaaatgcttctaaggcagttattaacggtgttcctggtgagtcttcttgggacagctgtgaattacatccttttaaaagagtacctgagaaagcaagcccaggtgatatcaccatttaagcccctcttaggctgtgtttgctgatgtcctcaaaatgcgttctcactagcttaagggtgtcttcttaggatgctgctatggaaaactccatcactgttttccagctttgcccatactcaggtaccaaggagggatttcacttcatgtgattcttcatttatttcactattttagggggctcttcttcatgtgggcagtcactgtgtcagggcgccaggggaaacagcaggacagccaggaacaggacacggagctttacaattttcagggaagctggatatttcccggtaagggcaggg

SEQ ID NO: 428110 - DNA, 320 bp, Homo Sapiens
cgatttaatctttacataaaagctgtacatataaccaagaagttatttttgccagtaaattaatttatttgctttattcatcttatttggttcctaatcgtaaatattttgtagctgctgtaaatttttttctcccaaatgaggagtcttattatcataaaggtaaaggctattcagctttgataaccacctgcaattcttttttggatcattcatccatctaacaaatacataatgagggacagttcatgttaatgaaaatccatgttgtttaataggaatgccatcctttacctacttttgctctgtatgggacgttt

SEQ ID NO: 428111 - DNA, 133 bp, Homo Sapiens
  misc_feature (78)..(78): n is a, c, g, or t
  misc_feature (87)..(87): n is a, c, g, or t
  misc_feature (114)..(114): n is a, c, g, or t
aaacctagataaaagttcttaaattttcaatgtgatgaaatttgtttctaaaaaccctcttaaaaaagtacaccgggntacacgttngaataaagccagctaaggtattttccngttatggcactgtataggc

SEQ ID NO: 428112 - DNA, 449 bp, Homo Sapiens
  misc_feature (382)..(382): n is a, c, g, or t
  misc_feature (411)..(411): n is a, c, g, or t
gaagtttttgtttctaacttttattttaggtttatgggtacatgtgaaggtttgttacctatgtaaacatatcatgcggttttgttgtacatatcatttgatcatctaggtattaagcccagtatcaaataattatcttttctgctccctccatcctctcaccctccctgctcaagtagactccattgtctgtcgtttccttgtgttcctaagtcatcatttagctccaacttgttgagaacatgcagtataagttaatgcttactctctttaacatctttcacattagaaatctatggagaagaaatatgaaagactcatatataaacatgggggcaaaccatgaaggctaaatcttaatgtgtcccaaaccccagagggngtcataagggttaacttttgggttggccnggggtgcttagtggattacattttggagctttctacat

SEQ ID NO: 428113 - DNA, 454 bp, Homo Sapiens
  misc_feature (344)..(344): n is a, c, g, or t
  misc_feature (399)..(399): n is a, c, g, or t
  misc_feature (420)..(420): n is a, c, g, or t
  misc_feature (434)..(434): n is a, c, g, or t
atgggctgcagaatgggtgttgtgttaaaaagtacacaaacaaggagatttataaatcttgtacgtctctataagagttctagggtgatcaagaccagtatcaatgagcactaatattttgttgtatgagcactacatctcaacagtgggcctaaaatatttaataaaccattggtgaaaatagatgtgctgtcatccagggctttgttccatttataggcaaaatagatttagcataattcttaagagctagggattttcaaaatgggtaaatgagctttgacaccaacttaaatttatgtttcccccttaaaaagggaagtgagcctgtcctttgaaggccngggcactgacttctcctctctaggcttggggagtcctaggtgggcgtctttcttnccattataagggctgtttttntctacatttaggantccgttattttaatgtaggc

SEQ ID NO: 428114 - DNA, 539 bp, Homo Sapiens
gttaatgcacattggcaggaaaatgggaacgaataaaattgcttgctgtccttctccctttattctccacttcttgttttttctaaatgtggggtcaaaacttccatgagggtaagaagttcagttttctgcctttccccttcatctccctatcacacatgtatactactccttaacacttagagaagataaaaaaagaataaattgtggagagggagcatatgtgaaagtaaaagattcccagacataatacgggagttaatggagaaagaaaatctctaaggaagactagaaataattgggttagggattctcgagaagtaaattaaattccccaaatatggtattctctgagaagataattttgaaggaggcaatggcgtggatatccagtggaaacagcagtcctctggagcctgggctgttgacttccaagggcccagtttcttctgggaggggccagaaaattacttttgaaggagggggaatggggcctttatttagggttattagtaccctctttatttttaggaattaat

SEQ ID NO: 428115 - DNA, 524 bp, Homo Sapiens
  misc_feature (285)..(294): n is a, c, g, or t
  misc_feature (404)..(404): n is a, c, g, or t
  misc_feature (455)..(455): n is a, c, g, or t
  misc_feature (486)..(486): n is a, c, g, or t
  misc_feature (492)..(492): n is a, c, g, or t
  misc_feature (497)..(497): n is a, c, g, or t
cttcttttctggtgctttacttgttgctcatttctctgacccttcattcctgttacctcagcctggatgattttacccagatccaaccatctatatctgacagctcccaaatttctctctctgtaacgatgacttcctccaactccaaactactaaactgcccaactgatacttctatgtggataggcaacagaattcttagtattctcccttaaactctgccctactcaagtgttgcccatcacagaaaatgtcatttccatgaacctggttttagaagagaannnnnnnnnnaaagtaagtccctagtattcatatttgactcctcccactctcactccatatctaatccatccacatattacttctgtctttaaaatatatctcaaacccacacacttctnttccaactccaaactccaaccccagtctaaggctcccaccaggggtggccngggaacagggccagcccctaaccagttaatntggttnccatnttggtgggtcagggtcaggcccctttt

SEQ ID NO: 428116 - DNA, 168 bp, Homo Sapiens
  misc_feature (136)..(136): n is a, c, g, or t
  misc_feature (158)..(158): n is a, c, g, or t
tgcatgcaagaaccggcgcctgcatgcacttatgggccgtcccagagcaccgcagaggaagatggtgtgcgggcgggagtgtggaagccccgctgccaccgtccaaactgggccctcagcctccacccgcgacggnctttttggcacagatgggagtnggcgatacca

SEQ ID NO: 428117 - DNA, 382 bp, Homo Sapiens
  misc_feature (80)..(80): n is a, c, g, or t
  misc_feature (96)..(96): n is a, c, g, or t
  misc_feature (229)..(229): n is a, c, g, or t
  misc_feature (337)..(337): n is a, c, g, or t
  misc_feature (347)..(347): n is a, c, g, or t
  misc_feature (363)..(363): n is a, c, g, or t
catttaatcgccgttttctgttcttggacatcaaagctggggcttaggcgctgtgctggggtcgcggcggccggtgcctnaggggagaggagtgtngtcttcagcatagagtgagcttctagtgacacgagctggagggaaagaggaagtgcatcatgacggctcgtccaatggacaaggaacgtgtgaacagaggaaacctgtgccctttccctgggcatagctaganagtgtcaagactccagactcatctctattctcaatgtggtgctggagcagaagcaatgctttgatggttgtttcacagcccagagtatcgtgaagcagagggagagtnatttcccttnactcccgtcttgagtntgatagagtttggttagtt

SEQ ID NO: 428118 - DNA, 532 bp, Homo Sapiens
  misc_feature (44)..(53): n is a, c, g, or t
  misc_feature (61)..(73): n is a, c, g, or t
aagagtctatttctttttaattcagtgttttatcttctttgggnnnnnnnnnncctttggnnnnnnnnnnnnnggttttcaaaagagccctatttccagattatcaataaggaataaaagacctcttccgacagtttcaggaagctatgccaggacacagcaagaaaggtattctcagaggtgagattcaggacatttcaccaaagtagaaaaagattgggcccccatagtgcaatatgactggattttctgcttactatgaagggagcaggatcctaccctcacaagcgaacgtctgtccgaccctcaggaaagataacacgacgtcctattgctgggcacaccagaaaatgggaaaggtgtgtgcctcccagagaatactctgaaaaacaagtagagccagactcctgcctggagcctctgagatgcagacctcatgcggcgccccactctgccttgcagacacggtcagtgttctcagtctgaaggacatattattttattgctttgagggctcctcaaggaaatccaa

SEQ ID NO: 428119 - DNA, 210 bp, Homo Sapiens
aaaacatgaatgagaaaactgattcacacagtaaagacagttgccaaagtaatctgcaatgaggaaatcaatgaaggatctggggttagggagtaatataatgaaaaagaagctaaaggaagacctgcacattatggttttgtacgtcatgtcttggtttagactacactttagaggggatatgacggtaggaaaacctggttggatgta

SEQ ID NO: 428120 - DNA, 375 bp, Homo Sapiens
  misc_feature (70)..(70): n is a, c, g, or t
  misc_feature (75)..(75): n is a, c, g, or t
  misc_feature (93)..(175): n is a, c, g, or t
  misc_feature (178)..(178): n is a, c, g, or t
  misc_feature (186)..(186): n is a, c, g, or t
  misc_feature (190)..(190): n is a, c, g, or t
  misc_feature (194)..(228): n is a, c, g, or t
  misc_feature (284)..(284): n is a, c, g, or t
  misc_feature (313)..(313): n is a, c, g, or t
  misc_feature (320)..(320): n is a, c, g, or t
  misc_feature (334)..(334): n is a, c, g, or t
  misc_feature (361)..(361): n is a, c, g, or t
aaataagcaaaatagaatgtgagaactaaatggtgaaaggtagaacctagacatatttgttagagtgttntgatntttgagactgaagcaaannnnnnnnnnnnnnnnnnnnnnnnnnnnnnnnnnnnnnnnnnnnnnnnnnnnnnnnnnnnnnnnnnnnnnnnnnnnnnnnnnnganaaagagangganaatnnnnnnnnnnnnnnnnnnnnnnnnnnnnnnnnnnncataacttacttgaaccttcaaattcaggcatgccatggtctttgcagttattaanaatcaataagtcacccccactcctatctnctacctncaacgctcttaccncccaagggcatcctcctggaaacacanccacagttttcttt

SEQ ID NO: 428121 - DNA, 437 bp, Homo Sapiens
  misc_feature (123)..(123): n is a, c, g, or t
gtaaattcttaacctataaaggctaatcgcacttccaaaaatttgtaagaaataatctgtgaaaaatttagtgacacatgaaagctttataaaatagagtgaatgaggaatatgatttacagngtttcctatgttctttgcaggttaacacaagggaaaacagcaaggggaaaaatatcagacaatataggaattgatgtaccacaaacaaattcatgatgaaaacatcagacgttatgttttcgttatacatacagtataaatgagtgaaatttaagtttggtaagcttttaaccaagaatcttgcattttacccacatatcaattaatagcataaaatgaaaagatggtgtgagcaatagtcgtcacacaactaaaatcttcacagattgtatttttttaaataaattcctttgaaagtttttgtagcaagaaat

SEQ ID NO: 428122 - DNA, 386 bp, Homo Sapiens
  misc_feature (114)..(226): n is a, c, g, or t
  misc_feature (341)..(341): n is a, c, g, or t
tgaagagcagattgctgtatttaaattttcccatggaaaaccctgcttctcaaatcccattctaaagtaggaaaccagaaagactttgctgattgtggggggaagggagaaacnnnnnnnnnnnnnnnnnnnnnnnnnnnnnnnnnnnnnnnnnnnnnnnnnnnnnnnnnnnnnnnnnnnnnnnnnnnnnnnnnnnnnnnnnnnnnnnnnnnnnnnnnnnnnnnnnccagactttcctgatttaaatgagagtactgcatcattccctacttcatgggcccaaaacttaatcctgggggccaaatgcagggagcatcttcttcgacctctggggcagattnggtggggtgcccagggattagttcacagcctttcccagcccagcc

SEQ ID NO: 428123 - DNA, 489 bp, Homo Sapiens
  misc_feature (73)..(73): n is a, c, g, or t
aacgaaaaatgcctgatttcttatgtggtttatcaatattggtaaattaacatgtttgcagcttatttaggtnaaaaaaaagcaaagagaagagagagagaatggacaacatcaacataaagcattctccttcaccgtggcctgcgagatcctgcgaggtgttctgtgattgccatcttgggaaggagtctgacttgctaagagaactcttggtttccttccgccttttgttacagcataaagttgctacaaatggataaaagcagatttaggcaggaggcaagccgaatgccactcccctcggaaggattccatcggtttcagtccaggaagggcaccaggctctgtcactggctaaaggaaggcagtgcagcatggaaggaacctcaggggaggatgtggcaggggcgaaagccaaactcatcgatgactcatcagatgagtttctttccaacaaaaacagaatattcacctttgaaaatctccaat

SEQ ID NO: 428124 - DNA, 111 bp, Homo Sapiens
  misc_feature (42)..(52): n is a, c, g, or t
ctttaatttcacacaatgaataacatatgaataggattaacnnnnnnnnnnnaatagttaagggctctatactgggctaacctgatctggtagcggaaaagactgagcttt

SEQ ID NO: 428125 - DNA, 527 bp, Homo Sapiens
cactaaaactttatttaatatcaaagttcaataaccaatcctatccatctttttttaaaatcaagaacaatttttgttaagaccacaattagcaaaaaaaagttacagcatttttgaaacattccacaatctattatgaggaacaagggctagggaacaaacaccaaagcataacagcatatgctctgctgtgtgttatgttaaaccacttttcatttgtctcattaaatccatcttttctacaatttaagcaaaggttatagagcaaaagatgacatttgtcatatgagtgattcttaaaatgggagcttcaacgtacgtctgaattttgttcacattactttctgggcatattatgtaatacttatatatcctggtttcgcttcttaagaattgatgattcaattttacaagagacacagacatacaaatcttatccttttaactagtcctgtcattaacagaagcatgacttatttataccaagcatctttttaagagctctattttcaataaaaatttttttg

SEQ ID NO: 428126 - DNA, 377 bp, Homo Sapiens
  misc_feature (219)..(219): n is a, c, g, or t
  misc_feature (282)..(282): n is a, c, g, or t
  misc_feature (297)..(297): n is a, c, g, or t
gctcattgttctgcatgctgtacaggaagcatgatgctgacctctgctcagcttctggagatgcctcaggaaacttagaatcatggcggaaggcaaagagggagcagtcatgtcacatggccagagcaggagcaaaagagagagcagggaggtgccacacacacttttaaaccaccagatttcgtgagaattcactctattttgaggacagcaccaagnaagatggtgctaaccacttcaagaggaaaccgcccccatgatccaaataccttccgccagggncccacctccaacatnggggatttacaatttaaacatgagatttgggtgggaggacacagaggccaaaccatattcacggttcctttcccttgagt

SEQ ID NO: 428127 - DNA, 579 bp, Homo Sapiens
gcctgaaatatggatataatgttagagatggagcacctatcttgtaaccataagaaggccacaaagaatagggtaaaaaaaatttgaagaactaaactctgaaatctttgagccagcaaccacctacctctcaaactctagttaagggaggtaaacaaaacttataaaatatctagtttgtgggagggagttctaaacacagacactttgactaacattagcctctacacacttttaatacctaaagaattcaaaacaaaaatatacaaacaagaaaacctttattctatctaaagggataacattttgaaacaattcaatatttgcttaatgtctatgaacagaaattaagatatttctttatttgaaaaactaaaatttactttctttgatgttgaaatatttgttaaacatattataaataaattaactcttatctttggcatttgttatatccattcttcatggtactctaagagggactataataaatagcatttcgttttccagtgaataaaaatatacactaaaatcttacctaaaaacagtcctggactttggaaatgcctttggggtcat

SEQ ID NO: 428128 - DNA, 390 bp, Homo Sapiens
  misc_feature (291)..(291): n is a, c, g, or t
  misc_feature (331)..(331): n is a, c, g, or t
  misc_feature (366)..(366): n is a, c, g, or t
aaattgcattgaatcttcgccacttgacccaaaggccaaaaattggcatgagaacaatttggactacacatcaccaaacccggggttcacacctgtccactagcagttccagtgccttcccctagccctggatttggcaaagcacagaatgttaagagctaaaagttattgtagaggctactcagtcccacccgggaaactgaggatgaatgagggtaaggcggttgcccagagcccgtttaacccctccgtgggctgggggcctggcttaggaacccgaatttccttgantaccctgttccaaggtatttcatgttcacattcacacttnaaacggttaaacctaggagataggggagagggccnttttggggattaaattccctgttt

SEQ ID NO: 428129 - DNA, 373 bp, Homo Sapiens
  misc_feature (330)..(330): n is a, c, g, or t
  misc_feature (342)..(342): n is a, c, g, or t
  misc_feature (355)..(355): n is a, c, g, or t
caggaatggacacctgcctcagactgggccagtcacattctctactgaaaatctgaaattccaacaaaaggcaacgagttagttgctaccaatatttagcaactacaatgaatgattcgtgtctatgtaattaaattttttaagtgagtaaatttaggggctggtaaaacccagggaagtatgcagtacgtctattcttacattggattaaaaagcaacaaagtgcaaaatgggtaaatacttcattacctctctcagcccatccccgggcctctcctcctatgccttcccatggagtcagtcattaggggggttaatgttttggcacangggtgactgtancccttcagcttcntctggcctccggttcttg

SEQ ID NO: 428130 - DNA, 499 bp, Homo Sapiens
  misc_feature (148)..(148): n is a, c, g, or t
  misc_feature (150)..(150): n is a, c, g, or t
  misc_feature (290)..(290): n is a, c, g, or t
  misc_feature (299)..(299): n is a, c, g, or t
  misc_feature (345)..(345): n is a, c, g, or t
  misc_feature (363)..(363): n is a, c, g, or t
  misc_feature (392)..(392): n is a, c, g, or t
  misc_feature (441)..(441): n is a, c, g, or t
  misc_feature (447)..(447): n is a, c, g, or t
  misc_feature (453)..(453): n is a, c, g, or t
  misc_feature (464)..(464): n is a, c, g, or t
  misc_feature (479)..(479): n is a, c, g, or t
  misc_feature (488)..(488): n is a, c, g, or t
atccagcaaggatggggccgctcgactgggaccagagctgtctttgcacaccccatgacacccagaacaggctcaggaaagcaggaagtacctgggggctgcggcggaaatgtcccaaggcctccctgtcgcctgggtgcccacgggntnctgactttcccccgttaccagcctcgtggctgtccccggagatgctgagagtgacagcttgagagtttgattcttacataagcgggaagcagtgagaagtcacccgcccaccacgtccctccgttcctgttgggcacccncccatcctnaccatctgtgggcccccgtgggcccttgactttgttaagggcgctnggcgggcataaggctttngggaagcattgggggtacataacatgggntttttaaggaacgaagggcccatttccaaaggttttttgggcagggttnggattnttaaanaaggaattaanccaggaacagggganttggggggncaacatgttga

SEQ ID NO: 428131 - DNA, 305 bp, Homo Sapiens
aacttacaatacttttattaatgtcatgggaacttataaaaactgcatggagatattttaaagaaaaaattttgaaacccattttggttttctttataattccttcagttcagcccattcctgtaaccacgtgctcatccccacaggactaggcagtgcccacccttggtgccctgcagtgcaccgcaaggacatggccgtggctgggagccgcgtccctgagttcctgggtgggccgcgtgagtctccctgttcctccctgctgccttctcctctccgggcttccccaccccatacttccctga

SEQ ID NO: 428132 - DNA, 527 bp, Homo Sapiens
aaaaacaaaaagcagatgaggtttattcttgagaaatgaaaaagagaagaatatatatttcgccttggtgagccaaacatacagagaagaaaaggctttttaaaatcttactagtatgagaggcccagagtaaaaagaaataagcaaaagaatatagacacaatcctaagatgacattcacagaacaaagctgaatcttcaaataatactgtatgagtgaatcttaggaaacctagtgatgatagtaagaagaaatggcagtgagctgtagcaagaaaccagttgttcaccatttaagggttaggaggcatagctttgggggaaaaatattctagaaattcattgcagtaaaatgcatttttttacttagagcagtttgaacgtttattacttaaaacattcagctcttattctattcacctggttttcccaagtcagtcaagtttggagaaaaaatttagacgtttagtcctgggattctactgaagtcttcacaaataatctccatcctggaagatggtgtcaaa

SEQ ID NO: 428133 - DNA, 428 bp, Homo Sapiens
gtattctgctccacaagctccacgtgtacttattcctcagtacgcccccttagtgagtttgtttattgggtgagtgaaaggaacagatgagtagatgaatgacccaggtgaggcctggggtcagggaggactgtggctcttcttacctgctgttgaagctggcctggtggaggaggctggaggcaaaggtggggacgtagctctgtagcttctgcaagtagagggtctgctgctggggtcagggaggatctgaacctggggcctgcttgactctacagtctgtttgtttctactactgtctgcgaaggtctgctgtttctactgctacatagttcacctgcatctaggtcttcttttttgccattgttgggaattgggcataaagatggaatgagattagatggcatcatggtcagagtgaccctttt

SEQ ID NO: 428134 - DNA, 499 bp, Homo Sapiens
  misc_feature (429)..(429): n is a, c, g, or t
  misc_feature (440)..(440): n is a, c, g, or t
  misc_feature (475)..(475): n is a, c, g, or t
aagaaatgattgaaatgtttcaaggggacatggagctgaaaggtggaatgagagacttccgtttgggctataagcttgtggttttatttgaccttttaaactcagcacttacactactttatttctaaatgttctatgaaggaataagagtttgtagaacaaaagagaagggctaaaagagagaccagttagaaagaggtggagagtcagaactggagtgcaaaagcacaaagattccagggcatacaaggatgataaatcacttccacaaatgagcgcaaagggatattgtgtacaatgcttccatgaaggaaagaggggcactggattaggtacccacctgggtttgaattgaacaactactgtttttcccaagcttttgtgtttgacagtttttaaccctttggcatgttccattttcccgggggngttgaggaccntttaggagcttgggatgccttaagtcccgttaacnttaagttttctttccccccaaagg

SEQ ID NO: 428135 - DNA, 429 bp, Homo Sapiens
  misc_feature (305)..(313): n is a, c, g, or t
tacaaggttgtacaaaccatccccactatctagttttagaatattttcgtcacctcagaataaaccccaaaccctattatgtagtcactcctcctttccccctcttctcaaaccctaccaaccactaatctgctttttgactctatggttttgtcaactctgtacatttcatataaaggaaatcatacaatatatggtcttttgtggctggcttctttcacttagcatgatgtttctaagggtcatcatgatatagcatgtatcagtacttcattcctttttattgccaaataatgcacctctgnnnnnnnnnaaaggacaagagtttcgctcttgtttccttgggctagagtgcagtgggtgccacctcgggcttcactggcaacttctggcctgctggggtttcaaggcaattcttcctggcctcag

SEQ ID NO: 428136 - DNA, 289 bp, Homo Sapiens
aggtatcagttggtcagaattaggtgcacaggggccatttccttttttgcttcctcttgcttgtgggggatgaaatttctctcaacagtatttgattgctcaatatcacaatagtggaagtctttcgtgacccttgtggtgagtgatggggcagtggcgggagttttcccacctccagagtgacattcgagacccctccccagctgactcctgcaaccacggtcaccactgtttacaaagaccctgcccagccttcctggggtgcaggggtcccattgtttcctccttg

SEQ ID NO: 428137 - DNA, 407 bp, Homo Sapiens
  misc_feature (242)..(242): n is a, c, g, or t
  misc_feature (297)..(342): n is a, c, g, or t
  misc_feature (355)..(355): n is a, c, g, or t
  misc_feature (392)..(392): n is a, c, g, or t
gtccaaatggctgatgattcatgccatagacatcccaaaccagctggtaggcagagctcttggcattccaaatggaaacatggaacagacacagatcacctggccacacagacctcagctctaaagacagatgactacttacctgttaaagttccctgtgcactattttttaaaatctagagatagataataaataggttaagttacattttaaattagcccaagagcatttgagaacagantcatttttagaatcttaattctgagattcactgttgggcttaagtcactgcttcnnnnnnnnnnnnnnnnnnnnnnnnnnnnnnnnnnnnnnnnnnnnnnttacctggggaangcattatttactctccatggcttcagttagatactgnggcccttcccttttt

SEQ ID NO: 428138 - DNA, 416 bp, Homo Sapiens
  misc_feature (259)..(259): n is a, c, g, or t
tcctaaaaatgtttagctgcttttcctgcttaaatgctcagatgacccataggacaaaggcacagttcaactccttcaattacagatgagctaactgaagctgagagaagagatgtgactggttcaaggtcgtagagatagttattgagagaatgggattaatacccactcttgcaagcttcagtccaactgttttttctgctaccagataattaataggtgccaccctcagagtctcagacctttcatatgggctctngaaaaagagaatgtgtatctgacttattgaggaggatgccagggagtttgtttgcctgagtcctgctgacagttttctcttggtccactgtgttctagaataactcagttttcacttcagtgaggtagaataaaaaggggattcatcttgaacaggg

SEQ ID NO: 428139 - DNA, 437 bp, Homo Sapiens
  misc_feature (326)..(326): n is a, c, g, or t
  misc_feature (346)..(346): n is a, c, g, or t
  misc_feature (358)..(358): n is a, c, g, or t
  misc_feature (407)..(407): n is a, c, g, or t
  misc_feature (417)..(417): n is a, c, g, or t
  misc_feature (425)..(425): n is a, c, g, or t
aagaaatcctgggaagggcatctcccagctctgagactctctgatgctatgaattcaagttattctgtccatgactgggtctggaggtcactgtgtaaaatctacgcttctaaataaatgttatgatatctcagcatactataccatacttataacatgtatgcttataacagcatactataccatatagtatagttcccaagaaaagggaatgtttcttcccccctaaaaaaaggaaaattcccattatctaatatataaaacaaacttttttgatgatttaaagtgactgtgtgttgtgaactgagtaggacaagggcagggangggagtagtgatgttcctgngttcttgctganttctgacaacgtgccaacactttggtttctctgtccaatggggtggggntttggatatnctaaaagngtttccccttac

SEQ ID NO: 428140 - DNA, 418 bp, Homo Sapiens
  misc_feature (244)..(244): n is a, c, g, or t
  misc_feature (334)..(334): n is a, c, g, or t
  misc_feature (376)..(376): n is a, c, g, or t
  misc_feature (398)..(398): n is a, c, g, or t
  misc_feature (407)..(407): n is a, c, g, or t
tcaccaggggaaaataaaagcatccctaatgttcttcctctagtcagtttgctttgctgaaagtccctggaaattagtacagttctacaggaagccagaagactgtactgtctgtccacaccatggtctcctcagtcccctccacgccagcccctcttccccacacctagtaggtgtgcttacaccttccctttgccagtcatcccgccatgggatggggggagcctacttgggtgccctgggnaaaacctgtttacactaagggagatgcccacagggagcggggaagtccaaaaaacccttcagttcatttttccagcagagacctttgctnttgggcaagggttttaaacgatgtttcaaccttggccaagtnaatgtttttaagttaaagggcnttttgggtngtttttggggg

SEQ ID NO: 428141 - DNA, 463 bp, Homo Sapiens
  misc_feature (47)..(345): n is a, c, g, or t
  misc_feature (379)..(379): n is a, c, g, or t
  misc_feature (433)..(433): n is a, c, g, or t
taaaatcaaaattaactatcatgtcatgaaaagatatggaggaatcnnnnnnnnnnnnnnnnnnnnnnnnnnnnnnnnnnnnnnnnnnnnnnnnnnnnnnnnnnnnnnnnnnnnnnnnnnnnnnnnnnnnnnnnnnnnnnnnnnnnnnnnnnnnnnnnnnnnnnnnnnnnnnnnnnnnnnnnnnnnnnnnnnnnnnnnnnnnnnnnnnnnnnnnnnnnnnnnnnnnnnnnnnnnnnnnnnnnnnnnnnnnnnnnnnnnnnnnnnnnnnnnnnnnnnnnnnnnnnnnnnnnnnnnnnnnnnnnnnnnnnnnnnnnnnnnnnnnnnnnnnnnnnnnnnnnnnnnnnncgtgtccaatgttgggcttatgggttgcgacaantgcaccacttctgggaaggtgtttttatttgacatgccctgtttgccccgggcnggttgggtccgagtctacggggagaagggt

SEQ ID NO: 428142 - DNA, 460 bp, Homo Sapiens
  misc_feature (403)..(403): n is a, c, g, or t
  misc_feature (419)..(419): n is a, c, g, or t
  misc_feature (431)..(431): n is a, c, g, or t
tcagcagctgaagtgctgcccacctgtgtgagttgggtccaggaaaccatgtctgcccttctgataagggaagatgaatctagagctgggtgaagatctaaattttaaccaaacccctgggcccaggaaaataacaattgaaaatgtacaaggcagtgttttcaatattaaacttccccaaggaaagcacaaactagtctttttggaaagggagaaaggattaagccacacagtattagtctttgaagcagtactggtctctaggggctggtgccaaaatgggagtcccatagtagttacacttcgatgggcctcatgtactatattactgtgccaaattgtatttaaacagtgggtggggggagttactggggataaggaacttgttctaaaaagttttacnaaacccaaaacaggtnctgtttaggttnggtgccaaagttaagttttttggccttac

SEQ ID NO: 428143 - DNA, 314 bp, Homo Sapiens
  misc_feature (260)..(260): n is a, c, g, or t
taacagaatgtcataaaaatgacagaatgccatgaaattcagcatgtcaaaactttgataaaacaaacaagaaatttaataaatatgctaattagagtgaatatttaaagggacaaaaataacttgtcacatcatagatgtctccccagtgcagaatttattatctgctggggaaaatttggttttatgtcttcaatcaatatttgctggcattatctaattaaacattaggtatattttttgtgctaatgaggaaaccntggcaaggagtcccaaatatcaagtgtgggtgacagcttggaatcagttgaggt

SEQ ID NO: 428144 - DNA, 358 bp, Homo Sapiens
  misc_feature (336)..(336): n is a, c, g, or t
  misc_feature (341)..(341): n is a, c, g, or t
attcaataaatggagtcttaactaatgagatattattttctagaatggtgtagctgagagtatgtgtgattcaactgaaaggaataatgtttaatcagtgactcttactatatacaggaaaaggtgcagttctgtctttcaaatctgcctccttaccatattggcttacatccctcatgctgttttcttgtgtttgctagaaagttgttgccaagccaaatgtcatgggccatgttgaaggcaaggaaggaaaaaatgggaaatgggcctgtgccagctatatatatcgccttttatggaggggaaaggcaaagctttcttcaggaaatccccaanggggntttccccttgacttaat

SEQ ID NO: 428145 - DNA, 466 bp, Homo Sapiens
  misc_feature (170)..(236): n is a, c, g, or t
  misc_feature (421)..(421): n is a, c, g, or t
  misc_feature (426)..(426): n is a, c, g, or t
  misc_feature (439)..(439): n is a, c, g, or t
actgttaacattgtgaaccacttgaccctagtgttgcatcttcacaaaaaagagcaatgtgccgtcttctgtctttggaaaatgggacaagcttgctcctgatactaggttttagaagcatacagacttggttttagtactggctttgttctttactaactctgaacaannnnnnnnnnnnnnnnnnnnnnnnnnnnnnnnnnnnnnnnnnnnnnnnnnnnnnnnnnnnnnnnnnnggtagcttctgactgttgtgctgggagtcctgttaggaggattcagtaggatgggagccaccttcatgttgcccctcactgaggctgctctgctcacctctaggatggctccccagggctgtttcataggccctctgtacccacatccccatgttacttttttcatatcaacgggtaaggtaccntcaanttaccctatgtantttacttgtttcataagggttggagtc

SEQ ID NO: 428146 - DNA, 343 bp, Homo Sapiens
ttagagctcaatgctttgtcctctgtcatccttctactgcatccctttcttcgtttcctcacttcaactttttagtaaacttgtctgaggcattagctttactcttacgcattttgctcccctgcctttttgttataaatattatcatggcatgaaacaaaaagcctgttatctgcctttccatgatcactttgctgacactgtttcagccacaagtaaacctaggcaactctatggaataggcagggacagacttggaatgtgggtgtgtgtgcaagggaagttattttaactttcttaatcttaaatgccaccaggaaaacattctggctccctgtttact

SEQ ID NO: 428147 - DNA, 103 bp, Homo Sapiens
  misc_feature (88)..(88): n is a, c, g, or t
aaacaaggcactgaggataccaccagagtccatctggataactaaggatgggtaacttacatggacttaacagggctgggtgacgttntacaggctggggata

SEQ ID NO: 428148 - DNA, 436 bp, Homo Sapiens
tttgataaaacagcaccacataacgcacacaaagatactccagaaacatttgctgagtacctagtacgtgtgaggtgctgtgaggatagagcagagaggactgtgccccagctgtgatgctggcagaggtgacactaagagggaaatgagatatttggggcagaatccactgggctctcttggccatccgctgccttgggtctgttgaggtgggtgcccaaaggctgccttcttgaccagaacctgctgtgcgctttcacagaacctcctctttcattgggaaatgctggggcacatttgcagttcagtgagcttgctgccaaaacggcgtttaagtaggaacccccagagggccccgccggtttgggtgatccaccctcaggtccttgccaggggagacacagtgaggaagtttggctaatttgctgtttttcag

SEQ ID NO: 428149 - DNA, 397 bp, Homo Sapiens
  misc_feature (141)..(141): n is a, c, g, or t
  misc_feature (379)..(379): n is a, c, g, or t
acagccctgtgactgacagaaagggtgttttacttgtctattggagccattgagaggttctaaccagttgcaaggtgggtgaggaggaagcacagaagttgtgtggggtagaaaaagcctggggaaaatggtgcctttagncacccatcacgtgcctcaagttccaaagaatgtgaacagcaggaaaagagatttgccctctccccactgtcatacatgtgacagtagaaagctgaagatttgagccagaaactggctatgcaagattgattcaggttgattcccagggttctgttttatttccacccaggaaacaccagcattcttgaatccttttcagcattaggcaaaggagcagatgtgggcattctggcatctncaaggaggtctttgagca

SEQ ID NO: 428150 - DNA, 540 bp, Homo Sapiens
  misc_feature (414)..(414): n is a, c, g, or t
  misc_feature (499)..(499): n is a, c, g, or t
gatcatgggcacacgctccttctgcccgatcgttgggagcacactccttctgcccaatcattgggctcacgctccttctgcccgatcgctgggctcacgctccttctgcccgatcttgggcgcacgctccttctgcccgatcgttgggcgcacgctccttctgcccgatcgttgggcgcatgctccttctgcccgatcgttgggagcacgctcattctgcccgattgttgggagcacgctccttctgcccgatcgttgggcgcacgctccttctgcccgatcgttgggcgcacgcttcttctgcctgatcgttgggcgcacgctccttctgcctgatcgttgggcgcacgttccttctgcctgatcgttgggagcacggtccttctggcctgattgttggaagcacgctccttnttgcctttcagactccttgatttttagtgcagtttccatcaatgaggctgcctcatggggtgagatgggtgttgaagaatgaacncaaatccacaattcaggcaggaagcagaagggaagggcaat

SEQ ID NO: 428151 - DNA, 512 bp, Homo Sapiens
  misc_feature (377)..(377): n is a, c, g, or t
  misc_feature (448)..(448): n is a, c, g, or t
  misc_feature (477)..(477): n is a, c, g, or t
  misc_feature (484)..(484): n is a, c, g, or t
attaatctaagcaagtacagccttgtagctcattggaagaggtgcttccaacaatctcccaggatcactggagcacaagcagtgaccaccttggcctctgagatgtgtttaaatttgtaggtgtcatttgcttgtattttctctaaatgatttgattattctaagatccttattatcactattttccaaaaaaagataaggattgtttctctcttcaaggatgatagatgttttatcattcccaaaggccatgcttttcttcctgtgaggacaagccagccaaggattagatatttcacgcatggggtttctttatgctcctgcaaaaggattgtctttctgtcccacaattcttggtgaatccctgggggagtccntcaggcattggctccagagtgtttcactctagtgattcttggggaagtgccctccaggcagagcttcaggngcattcatggctatttgatttcttggggnagtcccntcagggaccaggttcaggggcattcagt

SEQ ID NO: 428152 - DNA, 416 bp, Homo Sapiens
  misc_feature (27)..(28): n is a, c, g, or t
  misc_feature (57)..(57): n is a, c, g, or t
  misc_feature (67)..(67): n is a, c, g, or t
  misc_feature (206)..(206): n is a, c, g, or t
  misc_feature (279)..(279): n is a, c, g, or t
  misc_feature (307)..(307): n is a, c, g, or t
  misc_feature (326)..(326): n is a, c, g, or t
  misc_feature (383)..(383): n is a, c, g, or t
cgaagtacggtgtggcgctctaccatnncgctgaacgcgacctcaagcgcctctttntccaagtcgnccctcagaatgtggtggctgctcaaattggctatcgctgacgacgaggccagctgagacgtgatccacaatcgcagctggttgctagagagcctctccggttttgcggtcatcagccggtgtccactgttgaccgcagncgtccgcagttctcggtcacaccactttgggaagtcttgtaggccgccctgcatcattgcggcgatccgctcnacggcgcgttcctcgatctcgttggggntgaaaattgaacataattncgcaattgggccatccgtgacctgactactggaccttaagcggcaaggcttggcatngaagttggccgtttctttgaagcttgacggaaa

SEQ ID NO: 428153 - DNA, 261 bp, Homo Sapiens
  misc_feature (235)..(235): n is a, c, g, or t
ggttctttttttagcctgcctgttctcattgcttttttttctgttatagatctttcttaaaaaatggaagtagaagacttctttcctttgtactcagtgaggtttctcagtggtgcagatctaccctgggggaaaagaggcaagtgagaggcttgtgggaccttgataagctgctggatctagcataccccgagtggtacagcctcgggtacttgcctgcttcccagagcctgtnggtccccatctctcaggggggcacat

SEQ ID NO: 428154 - DNA, 297 bp, Homo Sapiens
  misc_feature (171)..(252): n is a, c, g, or t
ttcttctatttgaagcttgttccctttttacaaaagtactagtaaaaatctgagtcatacaaaagagcaggtcaggtgtcactaataacagtttacctcagcttcatctccatgaaggttttacttctaatcccagagtctcatgtttatgtattacaagagtgtatgaannnnnnnnnnnnnnnnnnnnnnnnnnnnnnnnnnnnnnnnnnnnnnnnnnnnnnnnnnnnnnnnnnnnnnnnnnnnnnnnnntttgaatccagcctgggtcaatgtaggcgagatcctattctcttt

SEQ ID NO: 428155 - DNA, 455 bp, Homo Sapiens
  misc_feature (372)..(372): n is a, c, g, or t
  misc_feature (379)..(379): n is a, c, g, or t
  misc_feature (390)..(390): n is a, c, g, or t
  misc_feature (431)..(431): n is a, c, g, or t
gctttatgaagcttagcatgttttcatgaaaaacatacgtagatattggctaatggtagtatagtcttcattgacttaacgaggaaagttatatgctttgaaatgtggacaggaaacattgattagggtaaaactcataaagggaagctttacaaggaggaccaaagtacagcactttcagggaactttctttctgtccccctagggtaagcaaggctaccattaatgaaaaggacatcttctcgttattattttcttcttttactaggagatgccatagcaggaaggcatcttatgtattacattgtttttcttttcctttgtcaaagcatctatgttcactgacctagtccttgttcattacattggaantatttcngggggaggcantttaatggggtgttggacttcccagtgggtgataggggacntaggggttgggggtccagacaccc

SEQ ID NO: 428156 - DNA, 386 bp, Homo Sapiens
  misc_feature (54)..(269): n is a, c, g, or t
  misc_feature (352)..(352): n is a, c, g, or t
aaaacttgggagaaatcagatggcctttaacgggtggctggtgaaacagtggannnnnnnnnnnnnnnnnnnnnnnnnnnnnnnnnnnnnnnnnnnnnnnnnnnnnnnnnnnnnnnnnnnnnnnnnnnnnnnnnnnnnnnnnnnnnnnnnnnnnnnnnnnnnnnnnnnnnnnnnnnnnnnnnnnnnnnnnnnnnnnnnnnnnnnnnnnnnnnnnnnnnnnnnnnnnnnnnnnnnnnnnnnnnnnnnnnnnnnnnnnnnnnnnnnnnnnncaagagagttgggcataactattaaaagggtagcacaagagatcccttgtgggtgatgggacatattccagtatctttgaccnaatcaatgtggaaaatcccggggttggggatatt

SEQ ID NO: 428157 - DNA, 489 bp, Homo Sapiens
  misc_feature (449)..(449): n is a, c, g, or t
  misc_feature (478)..(478): n is a, c, g, or t
ggctccttgattcatgggttgcagaatggatgttgtggtatgggcatatagacaatgttcatctcctttcatatctccctcagagctcttgggtgactaggtacactgtcaatcagcagtaatattttgaaaaaaatatttttttactgagcagtaagtctccacatagggcttcagtaaaccatgccgtaaacagatgtgctgtcatccagggctttattgttccatttatagagcacagataggaatgggatttaggcataattcttgagtaccctagggattttcaggaatgataaatgaggcactgggcttcaacttaaagttacccagctggcattattccctgacggggaaagtaagcctgtctttttgaagctttggaggccaggggattcaacttctttccccctcttctaggccatggaaagtccctaggatgtttatcntttttcccggcaggagggccgtttttccntttaccattgg

SEQ ID NO: 428158 - DNA, 451 bp, Homo Sapiens
  misc_feature (229)..(244): n is a, c, g, or t
  misc_feature (415)..(415): n is a, c, g, or t
  misc_feature (433)..(433): n is a, c, g, or t
gtttttgtatgaacataaactttcaacttatttaagtaaataccaaagagagtgattgctggatcatacataagagtatgagccaccatgtctggccgagtaccacattttctttatccatttatctgttgatggacccttagattgcttccaaattttggctgtcgttcgtgaaccatgctacaacaaacatgggagtgcagatatctctttgatatactcatttccnnnnnnnnnnnnnnnngggaaggaggggcatatacctaggcagtggggattgctgggattatatgggtacctctatttttagttttttgagggaaccttcaaactgatctccatagtgggttgtactaatttacattccccacagtgttacaaggggtcgtcttttctcttttttggattgtttccnttgctgtgcaggaagggntttccaacttggagtgga

SEQ ID NO: 428159 - DNA, 472 bp, Homo Sapiens
  misc_feature (208)..(216): n is a, c, g, or t
  misc_feature (400)..(400): n is a, c, g, or t
  misc_feature (441)..(441): n is a, c, g, or t
  misc_feature (450)..(450): n is a, c, g, or t
  misc_feature (461)..(461): n is a, c, g, or t
tttattcagaatggggactatgttgctcatgttctctaaagacaattttgactattaagttgatgtatgacaaatttgtttttaaaataattctgcaacttaatgtgatttatatagattgacttgaaagatgtaggatttcattctttcattaatttgttcatgcacgtaactaatatttaatgaacatgtatcgcggcctagggannnnnnnnnccatctcctggggatatagtgggtaaaccagacaaggcaaaaaccatgccctcttgggagcctatgttgttgtggattcttttccttttgtctcattaggcagtttgtgtattggaacttgctgcagagctggggggaggctgtgcagggcattactggactcccagccattgcttctttgctnggggacctatggttggtttgcagccccgatccccgttctanggcatttgncccctagggantccccagatgc

SEQ ID NO: 428160 - DNA, 453 bp, Homo Sapiens
  misc_feature (376)..(376): n is a, c, g, or t
  misc_feature (388)..(388): n is a, c, g, or t
  misc_feature (396)..(396): n is a, c, g, or t
ctgcaaccaaaataagctggctgttaagtgctctctccttaactattgtccaagcaatgtacatcactcttgcctagatgagtgaccatacttttttctttgctgcttggtttttctatcactaaaaagcaaatttaggtggaagatggatgggtaagtcctttgtccttgtcaaaagaatttagaaagggtaaaggtggtgggatttgaattcttttaaacggtttattcattgggaaaggcaagtgagtgggcagttgactgtaggaatcttggggaatttttgaagggaatttaaggagctgtacttattttaaataatgagggaaacaatcaggagagacttaaccagggtggccaactatgggaaggagtngggggtaggatncccaagtncttaccagttcttacgggcactgcttttggttttatttttttccattccagccacac

SEQ ID NO: 428161 - DNA, 448 bp, Homo Sapiens
  misc_feature (71)..(365): n is a, c, g, or t
  misc_feature (375)..(375): n is a, c, g, or t
  misc_feature (419)..(419): n is a, c, g, or t
acacttttgagccattcagtcaaaatactgtaaacatgaaagaccaggcaactacaacaagcgtccataannnnnnnnnnnnnnnnnnnnnnnnnnnnnnnnnnnnnnnnnnnnnnnnnnnnnnnnnnnnnnnnnnnnnnnnnnnnnnnnnnnnnnnnnnnnnnnnnnnnnnnnnnnnnnnnnnnnnnnnnnnnnnnnnnnnnnnnnnnnnnnnnnnnnnnnnnnnnnnnnnnnnnnnnnnnnnnnnnnnnnnnnnnnnnnnnnnnnnnnnnnnnnnnnnnnnnnnnnnnnnnnnnnnnnnnnnnnnnnnnnnnnnnnnnnnnnnnnnnnnnnnnnnnnnnnnnnnnnnnnnnnnnnnnnnnnnncaccttttancaaaaatttttaaaatttaggccagaggttgggggttgcacacntgttagttcccagttatttcaggaaggcc

SEQ ID NO: 428162 - DNA, 441 bp, Homo Sapiens
  misc_feature (366)..(366): n is a, c, g, or t
  misc_feature (398)..(398): n is a, c, g, or t
  misc_feature (414)..(414): n is a, c, g, or t
aattcaaggcctgagagttctatggtggaagaagagtccagtttagcctcttcacctggcccacatctccctcttgggcctggcattttctaagtgcctgctctgcctggtaccatgttggttgttcctaaagcatcatcttactcaatattcacaacctcccagaggcccagctcaggaggatactgccagaataggccttttccttctcactcgtcaaggtctcagctagggtgttgtaggcttaaagggaagaactggaggcctaggtagccccgaggagcacacagtcattcccttcaaaacaaacagcctgggaggcttcacgtcattcaccagctctggggcaacagcttgacagaccantgcttttccttccaccaccacttccccatggntgggctgctgggcttntttgacaggtttgatgggttttggttt

SEQ ID NO: 428163 - DNA, 417 bp, Homo Sapiens
  misc_feature (298)..(298): n is a, c, g, or t
  misc_feature (304)..(366): n is a, c, g, or t
  misc_feature (399)..(399): n is a, c, g, or t
agaaggaagtgagaatatgaaataaaggaacattagaataaaatgatgttaggaggagagaagacaacattcagtagtcttgagaactgtatgtttaaatcaacccaaaatatattcgagactgtgcttaaaatatacctaacaatggaagaggaggttttatattttaatattcagcttgcataggacagaggtgtgctatgtttagaagacagtataggcagaactgttaagagcacacttttaggaatcactgaaacaaaaattctgggtactaggcatttatttagtgtggcantaacannnnnnnnnnnnnnnnnnnnnnnnnnnnnnnnnnnnnnnnnnnnnnnnnnnnnnnnnnnnnnnccaactcctcggggtactttccatttggacctnggatatgtttaaccaaaa

SEQ ID NO: 428164 - DNA, 411 bp, Homo Sapiens
  misc_feature (315)..(315): n is a, c, g, or t
  misc_feature (358)..(358): n is a, c, g, or t
gaaataatgtttaatccttttaaacagatggtctttgctgaaaagaataaacccaactgaaaatagcattagaaagtacttaaaagaactatgtttgacagtttttggctcatagcacttttatgttaaattcatgtatactgtttacagacttcataatgaattttatattgtaccagtaagctctgcagaaggcattcaccattactgcatggaatgcccaaacatgcccatgaggaaaattaaaggtaaaacaatttaagtaaaagtctctctaggaattctattactgggctattttatcactacctgggnaaaattaaaattaatctttcagtaaagccaactggatctaagngaggaaatatttacactttatatttttaaaattcactttaaattggggtgtgc

SEQ ID NO: 428165 - DNA, 439 bp, Homo Sapiens
  misc_feature (413)..(413): n is a, c, g, or t
agaaatgttcaatctttttaacgtgtatcggcatgtatagggtgtactcttttaaagaaaaatttcaactattataaaatctaagaaactttaaaactgtgtcatttataatgtaaaattaatgcagctgagattcagtggttgactcatagctcccacattcatcttcagttctctttagctcatatggttttctttaaaaattagtgatatcagctaaatggaactattttccactcctacccacagagaaaagtgcttttgtgaacatgtcagctctgttccatcattacatgccatcatgcagtgcaacaggaaggcagggctgggctgtgcattacttggataacccaattattaggtacaggtttgaggagccaaaatcccaaggaaggttaatactgtatttcccntctatttatttttatggcacataggg

SEQ ID NO: 428166 - DNA, 434 bp, Homo Sapiens
  misc_feature (332)..(332): n is a, c, g, or t
  misc_feature (404)..(404): n is a, c, g, or t
  misc_feature (412)..(412): n is a, c, g, or t
aatatagtcctaatcaaaattttctagctctttattttacttatattttgggggactcatcagttatgattaaatgggtcaactagtaacagaaatctaagtaatacttgtaaactaaatagaattaattttcccttgatgtagaagtcaagaggctggtatggtgatgttgtgatttcatcagcctctcagtttttctcaatccttctattctgcgttcctattctgtaggcttccatcctcaaggtcaagtcatgggtctaaagatgtctgtctgtctattgcagctccaaccatcacatctgagttttaggaaataggggatgtagganaaaaggaaagggcctgtccatggggatggctttctggcttctctggaggtccctctttaaaattgttttaanttttaacnacctttctaccagggtgggccc

SEQ ID NO: 428167 - DNA, 268 bp, Homo Sapiens
ccttaggtaattatccagttgatatttatcttgttccagtcacctttagaaagctgtttggtgagtacaatgttaatatagagacaatcatgaatggtgtgtgcttttgtacaaaacttgtggatccatcaatgaggcatctgcattttttctttcttcccctctatattacaagttctggaatgcctgttctaattctccaaggagaattagaaaataaaaggcagagtctagagccatgtcaatatcctcccacaggaatgtgtat

SEQ ID NO: 428168 - DNA, 210 bp, Homo Sapiens
  misc_feature (79)..(79): n is a, c, g, or t
  misc_feature (109)..(109): n is a, c, g, or t
  misc_feature (124)..(124): n is a, c, g, or t
  misc_feature (152)..(152): n is a, c, g, or t
  misc_feature (164)..(164): n is a, c, g, or t
  misc_feature (176)..(176): n is a, c, g, or t
atgaaagtcccaaccctctaatcctgcctatgtctctcttgatgaccagcccccatcttgaagctacctagggggcttncagctttcagtcaattcattagtacacagnaagagatcatttttnggagagtaaggcttttagggggttcttnttgccagaaatngggggttaaagntaaatatatgtttacttggtattcattaaggggt

SEQ ID NO: 428169 - DNA, 344 bp, Homo Sapiens
  misc_feature (23)..(23): n is a, c, g, or t
  misc_feature (246)..(246): n is a, c, g, or t
  misc_feature (309)..(309): n is a, c, g, or t
  misc_feature (330)..(330): n is a, c, g, or t
ttttttttctaagataccatcanggtttttctataatgtcagccactgttctaatcagtgaatactctcctgacttcagaaatgctttaagactatcaaataagacatgacattcaaccattaatgtattccccaaacatttattaagcatgcattttatgccagatactgcgatacttattggacaaatggagatgactcttgtctgattccgctttcaagacagagcaatttaccccatttggnatccaccttgttgaaactctagcatgggagaagcgtgctttcatctttccttaaggactactntataaggatttcactcaggcnatgtgctaaatttg

SEQ ID NO: 428170 - DNA, 212 bp, Homo Sapiens
  misc_feature (58)..(58): n is a, c, g, or t
  misc_feature (68)..(68): n is a, c, g, or t
  misc_feature (84)..(84): n is a, c, g, or t
  misc_feature (93)..(93): n is a, c, g, or t
  misc_feature (100)..(100): n is a, c, g, or t
  misc_feature (114)..(114): n is a, c, g, or t
  misc_feature (133)..(133): n is a, c, g, or t
  misc_feature (152)..(152): n is a, c, g, or t
  misc_feature (159)..(159): n is a, c, g, or t
  misc_feature (174)..(174): n is a, c, g, or t
  misc_feature (196)..(196): n is a, c, g, or t
gaccaggccagggagacggggagggagaggaactgccccgaagacatggtttctaagntttctcccantgagacaaatcacttntctgggatntcagggngagaagatgcagantctgagccccttctataantagacaaaaggggaaagcnttggcantagatcaaaaaggcnttccaccgtagcaaaaaatttntttttaaatcttgaaa

SEQ ID NO: 428171 - DNA, 328 bp, Homo Sapiens
  misc_feature (50)..(50): n is a, c, g, or t
  misc_feature (118)..(118): n is a, c, g, or t
  misc_feature (126)..(126): n is a, c, g, or t
  misc_feature (130)..(130): n is a, c, g, or t
  misc_feature (135)..(135): n is a, c, g, or t
  misc_feature (184)..(184): n is a, c, g, or t
  misc_feature (200)..(200): n is a, c, g, or t
  misc_feature (296)..(296): n is a, c, g, or t
ccggtttcctttcccttctccgcaagctcgggacctcgaaaccccgagangcgctgggagctcgggcagcggaggtcggggtctttcatccgtcaaggatggtgaagtttgaaaacancctgcggntgangaaantcggaggctgaagcaacaagcttgctttggaggggacttctcgagtttntttttcaaaccttttnggttgtccgaaaatgcgttgggattcccagttcctgtgttgtgaaacacttattagatttatataaggcttttgagtagcttaagcgttttaactnctgctggccccctttgaagcccaagtgcctct

SEQ ID NO: 428172 - DNA, 495 bp, Homo Sapiens
  misc_feature (326)..(326): n is a, c, g, or t
  misc_feature (348)..(348): n is a, c, g, or t
  misc_feature (411)..(411): n is a, c, g, or t
  misc_feature (429)..(429): n is a, c, g, or t
  misc_feature (444)..(444): n is a, c, g, or t
  misc_feature (459)..(459): n is a, c, g, or t
  misc_feature (473)..(473): n is a, c, g, or t
  misc_feature (485)..(485): n is a, c, g, or t
caatatagataccgagagttccattccttaagttctgccccagaacggactggtgagttgtcactgtccctgttgacaaatgtgaataataactaaaaatacttcaggctgcatttgtctgattctggcttggtatgtggctaaaggggaaaaaaacctttctgggaagtgtgatgcttctttaacagcaaatggattgaattgatgcaagtctgatgtgcaacagggggtacttaaccttctatctagaatcaaacgccagaattgggagaagctgaagccaaccacaacttcataaaggtaaggcatttacttgaccttgcatncctgggaggaaggttttggggncctaaggatgtgttttgaaaacttaggttgggtttactttttaatgtcagccaggttttgctncccctggaaatgacaggnttggggagctgcttngggggatagtggccngggtaaccccaaanaccaggcacagntctttaaaaa

SEQ ID NO: 428173 - DNA, 178 bp, Homo Sapiens
  misc_feature (75)..(75): n is a, c, g, or t
  misc_feature (81)..(81): n is a, c, g, or t
  misc_feature (97)..(97): n is a, c, g, or t
  misc_feature (111)..(111): n is a, c, g, or t
  misc_feature (143)..(143): n is a, c, g, or t
tgttcatcaggggatatgtatgctaggtatggacctataatgaggggtgttaaattttatggagggcaaaacctnaccggngccaaaggggataggntcccccaggccttnttgggggattcccccatttatatcccgggtanttgtaggcccttgtggggccagggactttggtggg

SEQ ID NO: 428174 - DNA, 529 bp, Homo Sapiens
  misc_feature (377)..(377): n is a, c, g, or t
  misc_feature (400)..(400): n is a, c, g, or t
  misc_feature (428)..(428): n is a, c, g, or t
  misc_feature (453)..(453): n is a, c, g, or t
  misc_feature (461)..(461): n is a, c, g, or t
  misc_feature (490)..(490): n is a, c, g, or t
  misc_feature (515)..(515): n is a, c, g, or t
accacttcctaacttttcaaggcctggtttaaatgcctctatccatgtgaagccattgttgcctgactatgagctccttgacgcaaggaactgtgtcctgtccatattatttgcctgacatgaagtgggcagtcaaagcttcttattgaaataagacgtctccttgtgagccaagtgtgtgatacagtgatgataccattgcaataaggtagcctaggttttccagacagccctaccatggatttgtatgtattccattcttggggtggggagggaaatccactggggggcactaagggatacccattaggtaaggattttctatgggcccttattctccagggggtaaatgatacccaatttcttaaggcttcccntttcctttacaacccacatggcnttcactttcttaggggcccaatcaaagnatacatcggggcaggggaggcttangcatgctntaggggaaaggggggggccctctttatangggatttatcttggccaccctttcncggcttttcaggta

SEQ ID NO: 428175 - DNA, 428 bp, Homo Sapiens
  misc_feature (370)..(370): n is a, c, g, or t
  misc_feature (381)..(381): n is a, c, g, or t
  misc_feature (399)..(399): n is a, c, g, or t
  misc_feature (411)..(411): n is a, c, g, or t
ctcaagtaagttagttttctgtttaattcacacaatatcagtttatagcagatcctcaaaaatcatttaatacctgtgactacaatcaaggcatatgatcattctcagactgacaaataagtagccatcattagaaatgcagacaactgagtaattatggtgactgctcttccttcagacacacacctcggggcattgcatacctggggtaccagttctggatctggaagttaggtgacaggagtagatttcaggagggcttgggagcacacaactttaagaagacacagttgctgatgtgggtggggtagccatgtcattcccaaggctgccacttcactctcattcctttccccctaaaaggatgcangtaaatttgangttcaggcaaatgaggtnttttattcaggntaaaggcggtgcttccc

SEQ ID NO: 428176 - DNA, 202 bp, Homo Sapiens
  misc_feature (63)..(63): n is a, c, g, or t
  misc_feature (73)..(73): n is a, c, g, or t
  misc_feature (172)..(172): n is a, c, g, or t
catatgactctgccttacccagttacagttaactggactaaatggacatctgacttaagctangcaaattctnctgtgaaatttgaaatttgaatacagggattgaattagttatgctatggtgagccagatgtaaaatgaacatattcagggctggtgttggtgccaaaanatgccaatgagttttgtgggcaaacttacc

SEQ ID NO: 428177 - DNA, 153 bp, Homo Sapiens
  misc_feature (64)..(94): n is a, c, g, or t
ccaatgattcatctttatttgtcgattttgacatttttctaaatcccaaggttttttatgattnnnnnnnnnnnnnnnnnnnnnnnnnnnnnnngcctatttatctttcatattaactccaataattatttctagatttgtgggaaatacagg

SEQ ID NO: 428178 - DNA, 485 bp, Homo Sapiens
  misc_feature (301)..(301): n is a, c, g, or t
  misc_feature (324)..(324): n is a, c, g, or t
  misc_feature (354)..(354): n is a, c, g, or t
  misc_feature (366)..(366): n is a, c, g, or t
aaatatatagctaaccaaatgtcccagaactgttcatgaattgagcagactgctctattggtatgaaaatgtcttatttatcagatgaaatcacattgtatttggattttcttcatgctggaatgtcttttttttactgatctatatatttctgaaatagttcctaagttttaatcatgtgactgtataatgtattttaagaactagtaattcaaagctctagtaattcttccatattaacttttgaaatcttttttcattctttgaaaaatttactacaattatatctacttactacagnattaatcaaattaattctggggnaattcaaaatgtttataatattaacctctnctcatctagggnaaccaacctctccaattttataatggccttcttggtccattatattggccaagggttggccttcttggccaaatctggtagggccatattttaccaatcagggggtgggggagggatag

SEQ ID NO: 428179 - DNA, 134 bp, Homo Sapiens
ctgcaggcaaagttggatttgcggcctatgaataaaaccattactttaaaaagtaatacccccaaaaaagttacacctgaagtttcatcttcatgcctttgtgtaatattactataatggtgaaatgatgattt

SEQ ID NO: 428180 - DNA, 260 bp, Homo Sapiens
  misc_feature (78)..(78): n is a, c, g, or t
  misc_feature (104)..(104): n is a, c, g, or t
  misc_feature (133)..(133): n is a, c, g, or t
  misc_feature (145)..(145): n is a, c, g, or t
  misc_feature (148)..(148): n is a, c, g, or t
  misc_feature (205)..(205): n is a, c, g, or t
  misc_feature (216)..(216): n is a, c, g, or t
  misc_feature (231)..(231): n is a, c, g, or t
cctcatcacggtaagaatccaattcattccaagggcatgaaaactggtgtcagaaaaggaaaccgctggaggatggtncggatcgtggctgggtgggctcaggncgatggaaaacttgcttttcgttcctctnttgcgctggaantantgggacaggaaatgccagggaaaccgggggactcgaaatcgcactgcccttaccggnccgggcaagantctgggcccccaggngcagtcccccgcccccaccgacctccagg

SEQ ID NO: 428181 - DNA, 504 bp, Homo Sapiens
  misc_feature (379)..(379): n is a, c, g, or t
  misc_feature (467)..(467): n is a, c, g, or t
  misc_feature (474)..(474): n is a, c, g, or t
gtgttttaaagttcattctttattctgttaatacactaataattcaaatcaattttaggaaaaaaaggaaactacagataggcataacttaaaaaaaacatcacctgtaatctcaccagagataatcaccatttgaccataaataacaagcaatctgtctcacttatctattactgtttaacaaccctcccccaaaacctcgtggcttaaaacaataatttgttatttctagtgagtctgtggggttgattgggatcgactgagtagttcctctgttttctgtgggtgtagctgagggatacacccacattcagctggggagcttaaggctgggaacatcccaaggataatctctcatccctcaaggagtctctctccnacatgggcctctcatctttcaggtaatccaggctgaggcttctttgcaggctgggtgggctaggcttcccaaaagggggtaaaggggnaggctgnccagtctctttaaggctggggttggggcat

SEQ ID NO: 428182 - DNA, 430 bp, Homo Sapiens
  misc_feature (342)..(342): n is a, c, g, or t
  misc_feature (393)..(393): n is a, c, g, or t
ccagtgcatataaaaattatgtttttactatactattgtttattaagtgtacaatacgcatatgcataaaaaagtaccttcattaaagaatattttattgctaatgaatgctaacaattatctgacccttcagtgagtcataatctttttgctggtagagggtcttatctttgatgttgatggctgctgactcatcagtatggtggttgctgaaggttggggtggctgacgcaaattcttaagatagggcaacaattaagtttgctacactgattctgtttcataaatgaaagatctgtcctttatgcaatgatgtttgatagccttttacacacagtgggnatttctttcaaaattgggggtcaatcctctcaaactcttaccactgctttntcaactaaggttagggaatattctgttttttcccatt

SEQ ID NO: 428183 - DNA, 175 bp, Homo Sapiens
  misc_feature (50)..(50): n is a, c, g, or t
  misc_feature (130)..(130): n is a, c, g, or t
cttttatgtaggcaaaagggaaactatagtactctcactacttaatattnccagttctgcctaaaacaaagacatacattaatttttaacaatctttgtctcaaaattctagggacatttggaagaagtntttaaagctaatgcttactctttgcgtgaaattttatataatctc

SEQ ID NO: 428184 - DNA, 299 bp, Homo Sapiens
  misc_feature (62)..(62): n is a, c, g, or t
  misc_feature (107)..(107): n is a, c, g, or t
  misc_feature (164)..(164): n is a, c, g, or t
gctctcgccacaggtctttctttttcaaaagcgaacagctacaagtatccatcatactccangagcagccctcaaagcctgggctgttgaagagtgcacatcctggnctgcggtgacagccgtcagatggtgaggggccccaggggactgcccaagcagcaggnctgggagctgcacaggggagaactcgataaggagcatcatgagcatagtgggtccattgacaacatgcagtccccacggtggtgcctaatgacaaaatgacatcatgccacctcatgaagcaggcaggacaggtt

SEQ ID NO: 428185 - DNA, 467 bp, Homo Sapiens
  misc_feature (89)..(89): n is a, c, g, or t
  misc_feature (176)..(420): n is a, c, g, or t
  misc_feature (436)..(436): n is a, c, g, or t
gggtctcactatattgccaagggtggtctcgaattcctgggctcaaatgatcttcctgccttggctcccaaagtgctggagtacaggtntgagccactgacctggcaggtattcatcaccttatcacttctcagtgaaggcctccagttaacaagttcctgcccactcacatggannnnnnnnnnnnnnnnnnnnnnnnnnnnnnnnnnnnnnnnnnnnnnnnnnnnnnnnnnnnnnnnnnnnnnnnnnnnnnnnnnnnnnnnnnnnnnnnnnnnnnnnnnnnnnnnnnnnnnnnnnnnnnnnnnnnnnnnnnnnnnnnnnnnnnnnnnnnnnnnnnnnnnnnnnnnnnnnnnnnnnnnnnnnnnnnnnnnnnnnnnnnnnnnnnnnnnnnnnnnnnnnnnnnnnnnnnnnnnnnnnnnngtgggtgatggggttncaccaacagtattggatgtactttaatgccc

SEQ ID NO: 428186 - DNA, 410 bp, Homo Sapiens
  misc_feature (45)..(45): n is a, c, g, or t
  misc_feature (72)..(272): n is a, c, g, or t
ttttttttgaagacagggtcttgttccattgcccaagcaggaatncagtggtgtgatcacagttcactacannnnnnnnnnnnnnnnnnnnnnnnnnnnnnnnnnnnnnnnnnnnnnnnnnnnnnnnnnnnnnnnnnnnnnnnnnnnnnnnnnnnnnnnnnnnnnnnnnnnnnnnnnnnnnnnnnnnnnnnnnnnnnnnnnnnnnnnnnnnnnnnnnnnnnnnnnnnnnnnnnnnnnnnnnnnnnnnnnnnnnnnnnnnnnnnnnnnnnnnngtgtaagccaccatgccctgccgaaaagttttaatatacagaacaatttgggagttttggctccagtaggaactttaataacggtgggtttataacttaggaatcacagagttgattctctccttcagtaattaaagg

SEQ ID NO: 428187 - DNA, 518 bp, Homo Sapiens
  misc_feature (48)..(60): n is a, c, g, or t
  misc_feature (71)..(71): n is a, c, g, or t
  misc_feature (98)..(98): n is a, c, g, or t
  misc_feature (321)..(321): n is a, c, g, or t
  misc_feature (480)..(480): n is a, c, g, or t
  misc_feature (490)..(490): n is a, c, g, or t
  misc_feature (505)..(505): n is a, c, g, or t
tttttttcagttaatgtgagtttatttatgtcaatacataagaaaggnnnnnnnnnnnnngcaacccaggnactacaaagtccagactcattgttcanggagtcaagtatttctccagtaagctaagagcagaatggtgaatcaacaagacctcaaattgtcttgactgcagaagtaactgctgtcactgttctcagagtcaccattacggtgactgtgtctattctggctgtgcttcctattcatcatttactttctggtgttcaaactccctaaaagagggccgtgattggtgggggccagggtaccatcaaacaagantaccactgctagggtacactttcattccttaggccgccctctggcctggaaaatgagtctctttggggtcggatactgaaccttgggtacaatcagctgtggccagtgtaggggagctcacatgggcaggaaacctgggttttgctcctgcagggcttnttgggaggtngggtctttccaaggnaccggggaacctt

SEQ ID NO: 428188 - DNA, 224 bp, Homo Sapiens
  misc_feature (170)..(170): n is a, c, g, or t
  misc_feature (192)..(192): n is a, c, g, or t
cttataactctactttgtgccatttctctccatgctttctacctgcacaacacatcttgttatcacattacaagtgactgcatctcaaataagctgataattatcatatttctaagaggctgttaacatctactttccacagtgatatccttccaaatctccatgtgagncatttatttcacttttttatgnacatcacagggaggggctcagtgggaaataat

SEQ ID NO: 428189 - DNA, 268 bp, Homo Sapiens
  misc_feature (149)..(149): n is a, c, g, or t
  misc_feature (157)..(157): n is a, c, g, or t
  misc_feature (189)..(189): n is a, c, g, or t
  misc_feature (204)..(204): n is a, c, g, or t
  misc_feature (212)..(212): n is a, c, g, or t
  misc_feature (217)..(217): n is a, c, g, or t
  misc_feature (222)..(222): n is a, c, g, or t
  misc_feature (247)..(247): n is a, c, g, or t
tgtatttgggcaatcattgtgggtacttgattgattcagggtgaacatctttcaatgggatgcttaaaactaggtgaggtgaaagttgggatgatcctcttctaccaaggatactttattttaacctaccagggggggccaaaaagggnttaacccnttaaagtggggaggaggccctccgtgattatncccttatccatttgnccccaggnccccnggccnggcacttgggggccaattcaacttntgttggcccccttgttagggt

SEQ ID NO: 428190 - DNA, 172 bp, Homo Sapiens
  misc_feature (138)..(138): n is a, c, g, or t
  misc_feature (148)..(148): n is a, c, g, or t
aaaaaccggcattgaagtctttattacaagtcaaatgaactaaaaccccggcctataaaaagcgtatatttttcaagtctctaaaggcaatctaagggctaaaagtctgcaccagcaagcaaggggctgcaaaagctncggtgtcccncaaaagtttcagacggggccacaa

SEQ ID NO: 428191 - DNA, 108 bp, Homo Sapiens
  misc_feature (69)..(69): n is a, c, g, or t
tctcaagtctttccaaatatcatcatcaaaaagcccaactagaacccacaacattccccctctccccgntaagtgcaaatgcagcctcacgcccagggagggcacgtc

SEQ ID NO: 428192 - DNA, 197 bp, Homo Sapiens
  misc_feature (170)..(170): n is a, c, g, or t
  misc_feature (180)..(180): n is a, c, g, or t
ccgcataagcttttaatacattttttttgcaatctgcttcggaacttttaaattgctttcagtaaggacatgaacatatctatgacttatatatccacttcacccggtcctaacttgcctacaatgttaaaaaaagaggggttattataacaagggaggtgtttacactnggggtttttnatggcatcatatttaag

SEQ ID NO: 428193 - DNA, 276 bp, Homo Sapiens
  misc_feature (163)..(163): n is a, c, g, or t
  misc_feature (246)..(246): n is a, c, g, or t
attcattcaccttttctatgctttaataaatcttttgcataggtaaacacatttaagtcagagctataagacaacatagaaacagacaagaaatacacagacattctgattcttctccaaataactattttgaggaaactcttgactatatgttacctttagnaataccttaacctcttctgctcatacctaaaacaatttgtgtaaccttcaactttcaataaaatcattttatagggataattnatcttgaatatcttatactcccctaaaggg

SEQ ID NO: 428194 - DNA, 111 bp, Homo Sapiens
gggtaaaccaccacgcctgggccccattaggggtatttctttaggcatccacttgcttcactgaggattaatcattaaggggatggattaaggcactggggagggaaaaaa

SEQ ID NO: 428195 - DNA, 149 bp, Homo Sapiens
  misc_feature (67)..(67): n is a, c, g, or t
  misc_feature (128)..(128): n is a, c, g, or t
aatcacaaacctagtcactctactgatgcaaatgatttggaggtgtcttcctagctttacaataagnggagggacctctgactgcaccctctgtctcagtttcagggcaacatctggtctctttggangcagcttccatgcatgacata

SEQ ID NO: 428196 - DNA, 419 bp, Homo Sapiens
  misc_feature (310)..(310): n is a, c, g, or t
  misc_feature (356)..(356): n is a, c, g, or t
  misc_feature (362)..(362): n is a, c, g, or t
  misc_feature (367)..(367): n is a, c, g, or t
  misc_feature (395)..(395): n is a, c, g, or t
  misc_feature (406)..(406): n is a, c, g, or t
ttttttttagagattaaaaaacaaacaatgtagacataagggaacaaattcagagagctcaagtcaccatgtttgctaagagaagatctgtctggcattcttttgtggggctgtttttccaaggcacaagttacaggatctctctcaggcttgtgcaggaacctctacttgttggtctgacagcttctggattctgaactgagggggatactgaatgtgaactgggtaggatatgacttaaggggatgtattattttactataatgctctcacttgggaatcttgaggaataggaattagtttaggaccnaaactgaggattgacaggctgatgagggggtaggtttatatatttnctatcnatctnggtaaaaaattctgttcctgtcccaagnaaatctgtctntcccgaggagagc

SEQ ID NO: 428197 - DNA, 323 bp, Homo Sapiens
  misc_feature (167)..(167): n is a, c, g, or t
  misc_feature (195)..(195): n is a, c, g, or t
  misc_feature (220)..(220): n is a, c, g, or t
  misc_feature (249)..(249): n is a, c, g, or t
  misc_feature (259)..(259): n is a, c, g, or t
  misc_feature (262)..(263): n is a, c, g, or t
gtaaaaccacacttctgattctgccaagatatatccatgcagtttaaaatctatgatcctatagacagaataaatcttaaagggaatatctgctgttagcaatggatcgaaatgtatatatcatttaatattaaacaaaatctaaaacagcatattgtcctgaatanggcatactccagaaactcattaataggnaaaacttgtctgtatagcaaaagantgagtgacaagatggctaaaggtaaactngaaatcctanggnntttccctttattcagggattaactgatatcctcaggaagttttaaaacaatacttaaaaa

SEQ ID NO: 428198 - DNA, 113 bp, Homo Sapiens
aaaagatccctttcctgatgtctgcccaggagactttgtgaagattagatgggtttttgcataaagatttaccattcaaacagcgggatgtatgactgtctgttctaagtggt

SEQ ID NO: 428199 - DNA, 300 bp, Homo Sapiens
  misc_feature (97)..(97): n is a, c, g, or t
  misc_feature (103)..(103): n is a, c, g, or t
  misc_feature (111)..(111): n is a, c, g, or t
  misc_feature (156)..(156): n is a, c, g, or t
  misc_feature (192)..(192): n is a, c, g, or t
  misc_feature (213)..(213): n is a, c, g, or t
  misc_feature (232)..(232): n is a, c, g, or t
  misc_feature (281)..(281): n is a, c, g, or t
ccaatgggggttctcctcacttcccgagatggtcaaatggcacattgtttgtgaggttgggatccggagacctttgccgcccagtgaggtttgaggnggaganttggcggngcaccctgtgcagcctcatactcaccttcctctcccgtcgacccngagatcgtttgggagagtattgccagccgtggatgngggagctggcgtggaagccanggttcggcggcatgcggancggttggcagtggccccctgggtgggcagggggcagggctcgggttcgnggacccctagctgcccatc

SEQ ID NO: 428200 - DNA, 489 bp, Homo Sapiens
  misc_feature (403)..(403): n is a, c, g, or t
  misc_feature (429)..(429): n is a, c, g, or t
  misc_feature (456)..(456): n is a, c, g, or t
atattattgctattattatttaaataattatttgtaaaccacagcttgatttggagttaagtgttgtctgtgtcttcactgtagctggtaatttactatggtattaatttaaagaaataaattcaatacagcatcacgtctgtttgggaacacacattttgctctatgtatattgtaactaaatggttagtaaactttaaggcatgtggtgactaacgtagcccttagataggaggtttgtcatttttaatgtgttgaaaatagtacagacatgggtgacagaaagcaggggtaaagttgaacgtctatgaggcattgtctgtctgttttcttaactctttacatgatctgtgaggcacctgcttcttctccaaggaactcccttaggtaatcctttgtgccntaatggcatcccacactgtgggagtntggactggggaccccattggaaggttncctaaccaccggctgcgggtaattaccccggtt

SEQ ID NO: 428201 - DNA, 421 bp, Homo Sapiens
  misc_feature (323)..(323): n is a, c, g, or t
  misc_feature (395)..(395): n is a, c, g, or t
  misc_feature (408)..(408): n is a, c, g, or t
atttttagtagtttgagaaatatttaactggaatcaagaaagggatgagaaaattttttgttgttgcaaaatacctaattggaaggatgttttaaaatatgggtacttcacatttttattaatagaaactaaaattgaaaatttcaaggcatcttcattggggaaaagtgaacccaattacaatgaagaggacacattttaattaaaaattaaaaggtacataagacgcatttatctttatgtactcaacacgcttattgggagctcctttgaaatacgtagtctataaaatacatcagatcatgtattcatatataataacnttgggggtagcctttcccagggtttttttccccaaattgggctttctaccttatggtaaaataggggttgtngctttgccaagcnggaggagtgtatt

SEQ ID NO: 428202 - DNA, 398 bp, Homo Sapiens
  misc_feature (292)..(292): n is a, c, g, or t
  misc_feature (345)..(345): n is a, c, g, or t
  misc_feature (366)..(366): n is a, c, g, or t
taaataatttctttctggttgtattttcaagtcacaaattggaaaaggcttacatctagggacccactgttgattcctaagttgtgggtgggtgatatcagtggcctcagtgcctgcataaccctcacctgtttatgactgatctactgtaaccttcctcaggttgagagtgagctgctgtgagccagtgacaactactgctacaacttgctgttacttgaaattcgtgtgctatgttggtagcacaggagtaggcgggcgggggttttggtgtggggcactagggtaagtnggtgggcaaccgggcttctttggggaccattgggtgctgaccttttgccgggncacctgcctgttgcctagggncaagttgaatgtttacattttgggaacctgag

SEQ ID NO: 428203 - DNA, 461 bp, Homo Sapiens
  misc_feature (436)..(436): n is a, c, g, or t
  misc_feature (451)..(451): n is a, c, g, or t
tgagaagtaaatgtaacgtcctgagtatctgtcagaaaaaatactaatgaatacgatcaatcttatgagctgccccaaaattgtttcagtatgttaacaattggattacagtaaagaacaagttgttaaagtatacttatattggctggaaacattgcatcatcagaccttgatgaattttccacttgtttcaatctattttggttttcattttatcacctattgctaaaagtttcactgtgttaagtttcagacaacatgaatgttaacacaggttttaggcgaatattggcatgccaggagccgttatcatgcaggcaagtgctaagctcccttactcatgggagtgtttcagcggttagcttttggacaaaatttagtttctccaaaaccaggaaagacacttttgtggataggcagtttggacttgaatggntttgtttttacatcngttttaacgg

SEQ ID NO: 428204 - DNA, 275 bp, Homo Sapiens
  misc_feature (139)..(147): n is a, c, g, or t
  misc_feature (196)..(196): n is a, c, g, or t
  misc_feature (204)..(204): n is a, c, g, or t
gaaaacacattaggacctgttggagggagtctcccgtattccttttctgccacttttcgtccccatttcatttcattaatgataggatatgatttacctgtgacttactacttcaaatggatggcagtgcacttgggannnnnnnnnaatatccagaagattgaacagagggttgctattgttgaatgtatttggnctgatagnttaaatcaaagttcaatttttaaggggccaaaaaggtaaatcctgttttcattttatctccccttttaaac

SEQ ID NO: 428205 - DNA, 401 bp, Homo Sapiens
gtaaatctgacaatatgtatattccccaccttcgagtctttgaaactatagctgtgaagatgtactttgagaacgtgaaatgtatttgcttgttaaattggggttcagattttaaaggagaaacttcccttggtttaggagctgtgtcataatgactgaaataattcagtttgagaaagtaccgacaataaaaaattgttgagaatagtgagtgagccctgatacgagtagttatatattttcagtttcattctgagcctgcctaattctgtgcagtccttgcaggcatctcctgctagtagggtaattatcactttttctctggggagggcagtgctggcttttgggactataatgtgggaaactattactaggggagtctaggaagtttggggtggggt

SEQ ID NO: 428206 - DNA, 139 bp, Homo Sapiens
  misc_feature (53)..(53): n is a, c, g, or t
ctttgactccaaaggggtcgcaccccaggataattttgggacggactgagggnaggaaactgttctgtgcctttattgtgggtgggtaggtaacatggattctgcttgtggaaattcttaggattgttttgtccaaagg

SEQ ID NO: 428207 - DNA, 319 bp, Homo Sapiens
  misc_feature (141)..(180): n is a, c, g, or t
  misc_feature (216)..(216): n is a, c, g, or t
  misc_feature (281)..(281): n is a, c, g, or t
taggaaaggctaaataacagctaaataacatctaaagccccctccttccttgtaagaggcagagtccggagctgacaatgtgcttaaccactatgtgcctcaaccttggacctagtcagtcttttctaaaactccacatannnnnnnnnnnnnnnnnnnnnnnnnnnnnnnnnnnnnnnnaaaaatggttgtatatttataaaatatgattgtggnaatctcttatttaaatatcattgcttaatttatagggcaaatatcacttatgattcagagatccnaatacaatggaaggatgccttaattccacagatgccaa

SEQ ID NO: 428208 - DNA, 477 bp, Homo Sapiens
  misc_feature (265)..(265): n is a, c, g, or t
  misc_feature (372)..(372): n is a, c, g, or t
  misc_feature (421)..(421): n is a, c, g, or t
  misc_feature (426)..(426): n is a, c, g, or t
  misc_feature (435)..(435): n is a, c, g, or t
aagaaacatgtaactgcctcccacccccagccatgaaaccagaatgcttaattgtaggagtggattttggtaacaaatcgttttgaaccatatgatcacagaattttctgagcatttctatcagagagaattctgatagaattggaccctaagtcttacctaattggctatatcaacggctattctatggtagaagggtcataacctaagtgatgaaaattatgcttttcatttgatagtctgaagatttgagattctatgaagngggagggggagaaagtggaataggggtgtgagacacataagataatgaaggggctgctgctgaaactggggaaagcatctaaaagcatgagttttcagaatcttccnttcagttttttctataggcatgtaattcctgtattgtaatacatgtccntcagncaaggtccntcttattacaggtcccttgtaatacaggtccctccggcaggc

SEQ ID NO: 428209 - DNA, 558 bp, Homo Sapiens
  misc_feature (239)..(323): n is a, c, g, or t
  misc_feature (446)..(446): n is a, c, g, or t
  misc_feature (458)..(458): n is a, c, g, or t
  misc_feature (475)..(475): n is a, c, g, or t
  misc_feature (498)..(498): n is a, c, g, or t
  misc_feature (529)..(529): n is a, c, g, or t
cagagtcagatttacctacagtttcctggagacaccacctgttccagaaaacctctcctaacactccatgtagacacacatacatgctctcttgcttccaggttgggctaaggtacctgtcatcgcactcatgacaccctttgcatatttttcttgctggattttcactttgttttataattttttgtttaagtatttgtctttccctctagcctacgggcttcattggggacaagacnnnnnnnnnnnnnnnnnnnnnnnnnnnnnnnnnnnnnnnnnnnnnnnnnnnnnnnnnnnnnnnnnnnnnnnnnnnnnnnnnnnnntccgctagtttcatgggaataccatttacagagaaaatgggcaaagtcatccagatccctcattctgatccaggaaacaagaactgcttttcaggaactggaaaatcccggggggaccccctnaaaagctgttcntaacccatttaggctgnggattctggcctttcggtttccntctaaatgtgggcttcacactaggggttgtnccaggtggtctcggtatgggttttgggtt

SEQ ID NO: 428210 - DNA, 270 bp, Homo Sapiens
agtgagaacaggctacttatccttgatttttctaggcaacccaacctacggcctttcatctcatctcatccttcaccccatcagtgagaaaaggaaatttttgtttgtagaagaaatgtgctgttttattctgtagcacatcagtacctgtgctaatttgagaatcataactagcgtagatccaacccagaaacaaaccccaagttcacaaaacttaaaaaggaatagggcaaattctagttggaaactgtttcagacctcagcttcact

SEQ ID NO: 428211 - DNA, 394 bp, Homo Sapiens
  misc_feature (27)..(27): n is a, c, g, or t
  misc_feature (299)..(299): n is a, c, g, or t
  misc_feature (313)..(313): n is a, c, g, or t
  misc_feature (367)..(367): n is a, c, g, or t
ttttttttcatttgactttctcagtgnatcttagatggtaagcaagatctagtgttattactttcttctgttttaaagatcagcaaactaaggattagagaagtaaaataaatgacccaaggccatcttctggtcagttactgagtccagacacaaatcaaagtcgttggattccagcaagtattctctacattataccagagctaagcttcccattgattttagactttctgaaagaaacttcctgaatcccatatgcccaaatatgaatcaaaaataggaaaaagagaaaacaggantaaaggcagaggantactgtgaggctgtactgggtatgggtgatggtctgggcctttattgttaactnttgtcatttctactacaagtttttcaa

SEQ ID NO: 428212 - DNA, 468 bp, Homo Sapiens
  misc_feature (296)..(296): n is a, c, g, or t
  misc_feature (308)..(308): n is a, c, g, or t
  misc_feature (367)..(367): n is a, c, g, or t
  misc_feature (385)..(385): n is a, c, g, or t
  misc_feature (448)..(448): n is a, c, g, or t
aaaagcagactgccacacgtcacacctcatttggatgtgtctgaggtcttggaagctcgactaccctacgttctcctacaaatgaagcttgagaccgtgtctgaagaatctatcacgggagcacagctactcctatatccttgaccaaagaccggtcctcctcggggatggtcattttcttccacgagggcgtgcagcttcgggagggatgcccgtgggagtgggtgagggaggaaggggacacccgcttagccagacagatcagccaaatcaacactgggcaatcagtgggggtnacagggcgtcanagcctgattcgcccttcatatcctttccattatctttttggaatctctgtaggaagttntaggcaatgttttccttnctttcattttctggatattggatggacttggccttcttatttttcccttggcaagggttttantcaattttatttcaattttt

SEQ ID NO: 428213 - DNA, 300 bp, Homo Sapiens
  misc_feature (132)..(132): n is a, c, g, or t
  misc_feature (146)..(192): n is a, c, g, or t
  misc_feature (228)..(228): n is a, c, g, or t
  misc_feature (284)..(284): n is a, c, g, or t
gctcaggtgatcctcccacctcagccttccaagtaactgggactacagccacatgccaccatacctgggctaatttttgtagtatttttgtagagacaggattttgccatgttgcccagggctggttctcgnaactcctgggactnnnnnnnnnnnnnnnnnnnnnnnnnnnnnnnnnnnnnnnnnnnnnnnggcgtaagacaccgtgcccggactcttttcttattntcatctaaaccctttactgctctgcattttccttttcctaggtcttattattcctnccttcccaaaaacctt

SEQ ID NO: 428214 - DNA, 431 bp, Homo Sapiens
  misc_feature (67)..(67): n is a, c, g, or t
  misc_feature (148)..(162): n is a, c, g, or t
  misc_feature (199)..(265): n is a, c, g, or t
  misc_feature (269)..(269): n is a, c, g, or t
aagagattgggtctcactctgtcacccaaggctgcagtggcacagtcatagctcactgcagccttgnactcctgcactccagcgatcctcccaccttggcctccacagcagctgggaccacaggtgcctgctatcacgtccggccaannnnnnnnnnnnnnngtagcggggggcagtctttctatgttgcccaggcagnnnnnnnnnnnnnnnnnnnnnnnnnnnnnnnnnnnnnnnnnnnnnnnnnnnnnnnnnnnnnnnnnnntganaccaggtatccatcgatatcacacttttgaaaaaaccagtattcatctgtctcctccattgggaaaggaaaattgtggcatgtgtgtgcttttgaaatactacacagttccattggacattttaaagtggcaagttactgtggcaggacggtaccaactggc

SEQ ID NO: 428215 - DNA, 347 bp, Homo Sapiens
  misc_feature (323)..(323): n is a, c, g, or t
ccactccatgactaagaagctaaaatagggtctgctttctagaacattaagaaagcaccctatgtgcttccctctatactaaagttaggaaattctttctaatcagttataattacagctttactcttaagatcatcttgagactagataaaagatgaatgtgagagtatgaaaaaacaacaagaatgcacaccattccttttccttcagttacctagaattaaattagcagcagtatcaacagggaaagcacattctgtttatgagctctcaatatatcaattgcatttaaattaggaatttttcaaagtcataaaaatcanctggttaatactttttgagggtcc

SEQ ID NO: 428216 - DNA, 276 bp, Homo Sapiens
  misc_feature (76)..(87): n is a, c, g, or t
  misc_feature (262)..(262): n is a, c, g, or t
tgggctcaaagcaatcctcccggctcagcctcctgagtaattggggctacaggcatgtgacactacaccctgctannnnnnnnnnnnaaagtagaggtgaggtcttgccatactgaccagggctggtcttgaactcctggggcaacacagtgagggcactgtctctacaaaaaataatttaaaaattaggctggggcatgggtgggcatgttcctgtagtcccaggctacagggtagggaggctgaggatagggagggactncttgaggcccaggg

SEQ ID NO: 428217 - DNA, 257 bp, Homo Sapiens
  misc_feature (151)..(151): n is a, c, g, or t
  misc_feature (230)..(230): n is a, c, g, or t
  misc_feature (241)..(241): n is a, c, g, or t
ataatctatgcatctttaatacatgcccaataacgtcactaaaaaatttcatcagctcataaaacgctattctcaaaaagagagaagcaaatacactatgactacaattttaacactatccaaatattttcagagaaaagcccaattaggnttagtttaggaacttcctgggcatacttaaccatttctactgttagagttagatttgtaacagtaatctcaaacacaantataatgaagngcctttgcttagttcc

SEQ ID NO: 428218 - DNA, 481 bp, Homo Sapiens
  misc_feature (390)..(390): n is a, c, g, or t
  misc_feature (404)..(404): n is a, c, g, or t
  misc_feature (409)..(409): n is a, c, g, or t
  misc_feature (436)..(436): n is a, c, g, or t
  misc_feature (442)..(442): n is a, c, g, or t
  misc_feature (447)..(447): n is a, c, g, or t
  misc_feature (467)..(467): n is a, c, g, or t
attaacattgatattgggattggagtaacaaaggtttgactagtaagaagtaaagagaactctagacaatataagaatggcaactatcaggagcaactacaacccctaggtctgagatagagccctcaggaagaggcccctctttttacggatgagatccagaccctgttggagagggtgtaaccatggtttactggatggcagagaagttgatgtggtgttttgctctctaaacttgctcaaaatctcctttcttgagggttggggaaagctgcttacagagaggtatctcactggaagcattctgctacaaaaccacccagtggatccaggtgtaaggggaagctgctggctatagggaggctgccaggggtagtacacttggaaccnggggagggaaactnctttncttcttgttactgttatcttccattgnccttcntattnggataaaagttttaataccntttggccagctggc

SEQ ID NO: 428219 - DNA, 358 bp, Homo Sapiens
  misc_feature (114)..(114): n is a, c, g, or t
  misc_feature (122)..(122): n is a, c, g, or t
  misc_feature (130)..(130): n is a, c, g, or t
  misc_feature (135)..(135): n is a, c, g, or t
  misc_feature (165)..(165): n is a, c, g, or t
  misc_feature (174)..(174): n is a, c, g, or t
  misc_feature (197)..(197): n is a, c, g, or t
  misc_feature (231)..(231): n is a, c, g, or t
  misc_feature (235)..(235): n is a, c, g, or t
  misc_feature (246)..(246): n is a, c, g, or t
  misc_feature (265)..(265): n is a, c, g, or t
  misc_feature (286)..(286): n is a, c, g, or t
  misc_feature (293)..(293): n is a, c, g, or t
attattgaaatacctaagaatttgacaaggagatatgaaaacagacaagtaacagaagaaagacaatttcatgaaataatatattttgaacaactttctaatggttatttcttnctcttccngataaggntctcnttttccccgtcactctttatgtcctggctntggagtganaagtgcattgaaaacagcaattnccaaaagctttggtgagggtgttatgacaaaganaaanatatgcaaatnttctgactctacctcaatnctgatttcaaatcagcctgangcattantgtaattgcctttaatggacaatggtctacaccttttaaacttcaatcaacccacatcactttca

SEQ ID NO: 428220 - DNA, 197 bp, Homo Sapiens
  misc_feature (85)..(85): n is a, c, g, or t
  misc_feature (91)..(91): n is a, c, g, or t
  misc_feature (117)..(117): n is a, c, g, or t
  misc_feature (131)..(131): n is a, c, g, or t
  misc_feature (136)..(136): n is a, c, g, or t
  misc_feature (186)..(186): n is a, c, g, or t
tggaggcagggaaggggatgcttgccagcagggggggcattttgggatgggggattagccattcctcccccgcatttttccagcnttcccntcctaccttgttcagatttggggatntaaccaaggctttnttaantcacgtggagtcaatttccttaaggaagttaagccaaagggaaggttttncagggaagagc

SEQ ID NO: 428221 - DNA, 466 bp, Homo Sapiens
  misc_feature (199)..(199): n is a, c, g, or t
  misc_feature (231)..(231): n is a, c, g, or t
cctgatagctgcatcaaacccactattatccagccacatggaaccattacattctctgaaaacacctcttgctttttcccctattttgctcatactattacacgacctgaagtgtcctttattcctctttaaggacctccacatgggtgccccctccaagagttgcctgccccgcatgaccatcccacattcagctcgntctaccctctctgcttggggactctcttccantctccttgcattagctccaccattaggctgatggttccgaaatctttttctagcctatgtttctatcacggaactttgattcagattcccagtttcttgtggggactgcttcatctaggatgtctcactgggagcttccaacttcaacatggaccaaaggtggaactcattcacctaaacccccaaacctgggttttcttccttatttgggtgggaaacaacattccatctaatt

SEQ ID NO: 428222 - DNA, 346 bp, Homo Sapiens
  misc_feature (38)..(38): n is a, c, g, or t
  misc_feature (89)..(89): n is a, c, g, or t
  misc_feature (280)..(280): n is a, c, g, or t
  misc_feature (310)..(310): n is a, c, g, or t
ctccagtatccaggatcccccaaaggaaatgaaagtanaaaatctttaggttgaaaagtaattccagcttttagccttatctaccaggntgtctaacagtgagctgtctgagcacgcttgtgtgtgtagtgtcttctttctgcagcctagtgccacctcttgtcagaaaagtgatgttgaaaatagccaaccttttcaaacattgtggacaatatgaaagcacaatgcactctgattggaaggcactaactgtgattaggggcagacctcacagttcccnatgaaccttaggcaattgcatcacgtgganatttaccatgttaaatcctgattttgaattaagatt

SEQ ID NO: 428223 - DNA, 379 bp, Homo Sapiens
  misc_feature (346)..(346): n is a, c, g, or t
caaccttcttgtggcagtgagtaacatatttctttcctcctgataggcttggaatcctcatccccatctggcaattttctttccatctttcctacactcacaatggagcccacacgcctcacaacccccttgactaaaccagatgacagcaagaatgcctagttccaagtgagcaagggtgaagccttaggcccttgtctcctccagacctcctctctgctctaagagtatactgggcatggggtgtggtcggggggttgggggcggaggagtacttaacctcaaactgagaaaaagggtgtcctgagcaagtttcatagcgtagaggcttccattttgaaatgtnaagctttgaaggcctgttgcttacagtaaccag

SEQ ID NO: 428224 - DNA, 240 bp, Homo Sapiens
  misc_feature (72)..(72): n is a, c, g, or t
  misc_feature (129)..(129): n is a, c, g, or t
tatttgtagccatcataattgtcaaaattggaatccattcagtgctaaaaaaatcctgtttcatgtctattnagaacacaaacgcaagggggcatactgtaattattttaattaataagcatatgtggntatttattgagcataaaatttgggtgtgatacaactataagccctccatctatgtaatataatgtgccctgaggatgtgatatagtgatattaataactgggaactcattt

SEQ ID NO: 428225 - DNA, 437 bp, Homo Sapiens
  misc_feature (326)..(326): n is a, c, g, or t
  misc_feature (410)..(410): n is a, c, g, or t
taccttgaactatagtatatgttgataattagccataataatttcttagttaatttcttataattaaatttgtcaaagaggaaacttacagtttatatctgatgaaatctctaaaaagatgggtaaaacattgggaaatgtatgcatgtacttcactctggtttcatagggttagcaagtgtcttaaaaacatatataaagaagcacagagattgttaggagatatttatgctcccagttttaataattgggatactttgtataccacagaaagaaaaattactaaactcctctttttttagtcaaaattgggaaaaaaagtcttnaattgacagttactatggcctgtggctacccataggcaagtatttcagtgggaaaatactttactaagtaagtaatttggaacncagctttaaattccctaggtatgttac

SEQ ID NO: 428226 - DNA, 329 bp, Homo Sapiens
  misc_feature (296)..(296): n is a, c, g, or t
gagacagtgtcttgctctgtctcctaagatggagtgcagtggcagattctggctcactccagcctcaccctccggggtttcaagcgatcctcccacctcagcctcctgagtagcttggactacaggtgcataccaccatgcctggttgcttatttttatttttgaagagatggggtctcactatgttgcccagggtggtctcaaactcctggggcttcaaggcagtcctcccaccttgggcctccaaaatttctggggatttacagggcagggagccaccacacccaggcctgtanttgatttatttcaggggatgttttccccacctt

SEQ ID NO: 428227 - DNA, 244 bp, Homo Sapiens
  misc_feature (186)..(186): n is a, c, g, or t
gaaatcaaagttcttaggcatttaaaaccattagttggaaaaaggcttactggcttcatgtgatcatcaaagaaatccattgcacaaaaaatctatgacaaacaatgtttggtagcaataaaaaagaagtaggcacatttttttaaaagacaatgttcaataaccaagaaagaagggccacaaganttcagatattaaagatatcagacacaaaacttaaaatgacaatgaatagtaagttcaa

SEQ ID NO: 428228 - DNA, 427 bp, Homo Sapiens
cattcctgtcttcttttgactctcttttctctcttggaccctcaggtacccacttgggtctctttcaagtgaattttcctttcgttcctgttctaaagccttttaaaatgaacttccattcctgttctgaaacttgccttagtctgtttttctgcttcatgcccctcagtcgaattctttcttctgaggcggcaaggactgaagttgctgtggacctgtaggggttcgacgccggtaactcagggtaactcctatctcttccaccggtaacagaggggttacattatggggtccaggttgagagaggagcagaggagcctaaggaaaggtagagtacaaggacaggaaaggggtgaaagcttagatggcagtgaggagtaaacaacaagggctgaagtgagaaaacttcaaccggaaggagatgggc

SEQ ID NO: 428229 - DNA, 216 bp, Homo Sapiens
  misc_feature (133)..(133): n is a, c, g, or t
  misc_feature (163)..(163): n is a, c, g, or t
  misc_feature (180)..(180): n is a, c, g, or t
  misc_feature (195)..(195): n is a, c, g, or t
tgagacaccacacatgggccaatttttcaacttttatgtgtatcagaatcaactagagaactttataataatttcacatcgtgggctcacatcaaattcacagtattatcaggaatctcttggggcagagcancaaaccatctattaggttataacaaatttntcagggtaggagggtcnctttttctacttagnccctttgtttgtggggccttt

SEQ ID NO: 428230 - DNA, 391 bp, Homo Sapiens
caatgttaattcaattaatgactgtactgaaagtttgtcttagtgtgcagtgaaaacaggagagcagcctctaataatctatggatttaatgactgcaactttgaagagtgttaagctaaagtgaagttcagaatggcttgttaactgggtttattagctgttgaccttccctttcagcataatagtggcagtcagaccgaagagagcactaacgtcctgattagcatttatctaaagataggctgctgcctgttacacagtaaattagttcaatcagccataaagagcttgagaaacattttctgctttataaaaagattaggatgttaggaacagttcatctgggcatagcttcagtgaaggtgggttgagcccctggaacgtggcttc

SEQ ID NO: 428231 - DNA, 135 bp, Homo Sapiens
  misc_feature (48)..(48): n is a, c, g, or t
cattactacatattcttaaccaaccgagataagaaataataaaagttntacataagggaggcagacaatttgttttggggtattctgatgagtggtatagctatgtcacagcagattggggtgacatttgaggat

SEQ ID NO: 428232 - DNA, 453 bp, Homo Sapiens
  misc_feature (399)..(399): n is a, c, g, or t
  misc_feature (409)..(409): n is a, c, g, or t
  misc_feature (421)..(421): n is a, c, g, or t
  misc_feature (426)..(426): n is a, c, g, or t
  misc_feature (432)..(432): n is a, c, g, or t
ttttaagattgctggtatttagaacctccatccttccctctacaaatgaaaatttgacaggtgaactttaatgtacattttgttctcctctgtctaccaagtgctcaaaattagttaaaacaacgtaacacctaaataatttaaaaagccaccttcttctaccttgccccaccactgaaacaaaaacaaagaaagccatctctctcctacattatttttggagttcaactgggtaaaagcagcttaaagcttactttcctaaaaactccactttatcacgatgagcatagagccttcttctccttcttctatttaaaatgcctttgaaaaagaggtattttaggcatttaaaaaggtactgaaaagggtatcttcccaaggtacttaccctaatcatgnactatttctntggtgttaaaanatgtntagcanctactttttaaaccttttccc

SEQ ID NO: 428233 - DNA, 377 bp, Homo Sapiens
  misc_feature (17)..(17): n is a, c, g, or t
  misc_feature (359)..(359): n is a, c, g, or t
aaaacatcaccactggncctatgcaaggcccgcctgattatacatttatgtgtatgtgtgaatatgtaatatgtacataaagatatatacattcaaatacattcctgtaagcagtatttctgttgtctgtttacatacattttaggattgcatagtttattgtgctctaatgctttctcattctattgtacttttgctcagcatttttttaaaaacttgtctctgttaataggtgcaccttttctctatcttttagtttctcagtattgttctccagagattgactttgagattgcatccaggggccttgtcatcacagggataacaccaggaatgaatatccttggcatactttcccntgtgtgaggaatatcttt

SEQ ID NO: 428234 - DNA, 225 bp, Homo Sapiens
ttgtgagagtagggtagcaatgccggacaggataacatacaggacagcagaataaaaaatctccctctccctgcagaaaattaactacaggctagggttttgctcaccataaccaaaggcattgggggtcaaacacgttactgtgattgctgaattgaatcctttggtcctgtgcatggggtgcactggctcacactcacccatgtgcacatctgttctgtgtag

SEQ ID NO: 428235 - DNA, 412 bp, Homo Sapiens
  misc_feature (378)..(378): n is a, c, g, or t
gaaatgtgaaaacaaagcaataaaacatcccctgttcccatttcaggagtcatgtctgggctgcctgggaggacaacaggaatactgatcgctagagcaaataaaagactcttggcagtgggcaacttggtcctcctaaggctttagaaattgtcttgctccatgaaaatgacatgttctgaggccccagtctggggtatactgactttcattagctaacgtcaccatccgtggtgctccctcacttgccaacactgcactgtagatttgactcccaagagcctaaggatagtctctgccaatcctccagtaggccaccatcatagtagtttttacccccatcagtcaggcagtccagtgttttacttaacccctccnttaatttcacaggcagttttttaaccaccccttt

SEQ ID NO: 428236 - DNA, 383 bp, Homo Sapiens
  misc_feature (102)..(160): n is a, c, g, or t
  misc_feature (282)..(291): n is a, c, g, or t
  misc_feature (361)..(361): n is a, c, g, or t
tattttacacaggcttggtatcatatatacaatccacagtcaacccatgtataaactcacacttgaatcaccagttgatgaaaaatattatctattcttggnnnnnnnnnnnnnnnnnnnnnnnnnnnnnnnnnnnnnnnnnnnnnnnnnnnnnnnnnnngaatacctgtagcagaactgatctctacaagtctcatacattattagtcatattacaagaatttcctgtacattttagcattttattgtcctttatactttctatttcacattaaggaaggnnnnnnnnnnccgtcactttcctctataggccatcactccaatcttaaattgacaaggcaaatcctccagtgggcatcantggcacacctgtgtttggccaa

SEQ ID NO: 428237 - DNA, 200 bp, Homo Sapiens
  misc_feature (49)..(50): n is a, c, g, or t
  misc_feature (78)..(78): n is a, c, g, or t
  misc_feature (105)..(105): n is a, c, g, or t
  misc_feature (183)..(183): n is a, c, g, or t
cacatcttatgtgccctttattccagcatcactttcaaacactttagannctcagttgaatcaaatttctcttttgtnctttatgccaacagtgagacgataatntccctaacattcctcaattagcaattaatgattagcctattgataactaggaggtagacagggccaaaaataaccccntctctgccgttaaaggc

SEQ ID NO: 428238 - DNA, 348 bp, Homo Sapiens
  misc_feature (243)..(243): n is a, c, g, or t
  misc_feature (296)..(296): n is a, c, g, or t
atgggcttatacacaacagaaatttatgtctcatagctctggagtctgggaagtctgcaatcaatgcaccagcagattcgatggctggtgagaacccactttcttgcttataggcacctgctggctgtgttctcatgtggtggaaggggcaaggcagctctccaggggcctcttttataagggcactaatcctattcatgggggctccaccctcatgatctcaccacctcccaaaggccccanctcccagtaatattcactttgggtaattagggtttcaaaaggatggaattttngggggagacacaaacatttcaggacaataggcagggatgcaaactttacttt

SEQ ID NO: 428239 - DNA, 358 bp, Homo Sapiens
  misc_feature (25)..(25): n is a, c, g, or t
  misc_feature (53)..(53): n is a, c, g, or t
  misc_feature (252)..(252): n is a, c, g, or t
  misc_feature (314)..(314): n is a, c, g, or t
  misc_feature (336)..(336): n is a, c, g, or t
acgatcgacggcgagccggacccgncgcaagtttgcgtctcgggccggcgctntgctctacaatgcgtgacctccggcgcgctgccgcccagccccgaccgatgcttcgcccgatgatcgtcaaccgtcttatctccgagatcctgttcggcttcaccggcctgatcggcatcatcaatccgatcggcatcgcattcctgtttctcgaacgcaccgagggcgctgtccgaacaggagcgcgacctgctcggnagggaaggttgcgttcaactcgttcgtcgtgctgctgggtgggcgttcttcggcgggtaagncggtgtctggcatttctttggngatcttggatgggaagtcgtgt

SEQ ID NO: 428240 - DNA, 227 bp, Homo Sapiens
  misc_feature (211)..(211): n is a, c, g, or t
attgttcacatcaggcaggtaatgtgccaatgacaaggctcaagggaggcacatctcacatgtggacgcgaaaactcaatcatcaagcttatgaaccacaaaaggatctagaaaagttttaaacatatgacacaattctgtgtccatgcttgtgtgcaaataggtcacactgttgtataactttttgacttaaaatcatctaacagtgganatgctttccaacattc

SEQ ID NO: 428241 - DNA, 369 bp, Homo Sapiens
  misc_feature (283)..(283): n is a, c, g, or t
atcaaaattaatgtaaaaatctacaatgaacaagagatcaaaattttaaatattattacttatttttctttttgcctcaagttccaatatggcaaagtacttttagtgattctgtctttatttaaagttttgacattttattcattgtgcattttgtgtgaggcaaatgccttgcgcatctcaccttagtcctgaccctgccaacaagtaccagggtaaaacatactagatgaaaaatgtgaccttgatagtaatactcatgagggaacaaaaactgggcttnggaaaattttctgtaattgggaatgtaaaatttggaaataaattacttgggtatggaaataaaacctgtggaaagtttgacagctt

SEQ ID NO: 428242 - DNA, 362 bp, Homo Sapiens
  misc_feature (227)..(227): n is a, c, g, or t
  misc_feature (294)..(294): n is a, c, g, or t
  misc_feature (319)..(319): n is a, c, g, or t
  misc_feature (335)..(335): n is a, c, g, or t
ttttttttccataatgtgcaagtattatatggccacagagtgtaatacaaattagtggcaaagtgctgagtgaagggaatccatgacagattcagatgcacaaggttgaatattacccgtaaactacctgactctgctaaggtcttaacagcacaaaacgctatgtcatgcccagcttttaaaagtctctgaaatacttgggacacaatgaagcttgttaaaggganttttaccataggccacaggtaacaagaggaggattgggcatgagcgataaatgacattggggggagncaatatgggaaggatcatctggggncaagtcttttctcaanatgtggcccttcttcccctggaaaaca

SEQ ID NO: 428243 - DNA, 296 bp, Homo Sapiens
  misc_feature (155)..(155): n is a, c, g, or t
  misc_feature (178)..(178): n is a, c, g, or t
  misc_feature (196)..(196): n is a, c, g, or t
  misc_feature (206)..(206): n is a, c, g, or t
  misc_feature (232)..(232): n is a, c, g, or t
  misc_feature (238)..(238): n is a, c, g, or t
  misc_feature (256)..(256): n is a, c, g, or t
  misc_feature (262)..(262): n is a, c, g, or t
  misc_feature (275)..(275): n is a, c, g, or t
ccagcatttactgtttttatttgccatttgttataaaaattggatctttattttacacaaaaggtactttaaaaacagtgaagtttaccaaaagctactgaatctgtggcaaagggatttaccaccaaaaatgcagatttacacagtaaacctgngggccaaaaacattggaacaaantcttccattttctaatanttcattaccngagggcaaaaacatttgtacacaggntaattntggtggagggttaacaantggctnggctttcactctnggcactaacccctttaaatgt

SEQ ID NO: 428244 - DNA, 420 bp, Homo Sapiens
  misc_feature (372)..(372): n is a, c, g, or t
  misc_feature (399)..(399): n is a, c, g, or t
  misc_feature (410)..(410): n is a, c, g, or t
ttttttttaagaatgagccttttctggttcatagaagttggtaaatattgtgtggaagtttgcattaacgcaaaggaagcttttgggggatgcctcggctatactgatttcccccaaagttagccttctaagttgacattctttctttttgccactacccctttcttaatgttgcaaacctgagaagagaaagaagatcaaagtaggaaagacagggaaattgccagggtgcattaagaaggactaataggcaggaatcatttgcttgggcattgagggtgtttttgggaggaacctcaggatctgttcactaaaatccttatggctaaatggactgggggaatttataaattacctctgacaggcaattantatggaatattaggttcaggggatccntaaatggaaancctccaaagg

SEQ ID NO: 428245 - DNA, 410 bp, Homo Sapiens
  misc_feature (296)..(296): n is a, c, g, or t
  misc_feature (350)..(350): n is a, c, g, or t
  misc_feature (369)..(369): n is a, c, g, or t
  misc_feature (374)..(374): n is a, c, g, or t
  misc_feature (385)..(385): n is a, c, g, or t
cctgatagtatcagtttttaaaatccatttagttagcctggagatatgttttacaaagaaaatcacaatgctcaaacatagttgttatataaaacaggtaacacagagaatcactgaccctctctgtgtctccaatttagtgttattacacaggtttttgagagtcagtattcaatcaaagcccaaagtcatactctaattcaatgcctcagtaatgaaaacaatagatttgttaaaaagtgattcttagggtttaggaaaagtatatttatagaatgaaggagtaggagtaaggntaaagctaatgtgatcaatgatcaatctaacaacattttttttctgttttcaanggatgggcaaacattgacnggggnttgattttcgnctttaatttccccttttccaaccgc

SEQ ID NO: 428246 - DNA, 450 bp, Homo Sapiens
  misc_feature (364)..(364): n is a, c, g, or t
agcggtgccaggcaacaactgggcaggaagctctggtgctggacagttgtccctcccatgggttctgtggtcaagtttttcaatcttctgggaaagagaagaatgttcccctccagttctgggcatattgaaggagcacggagctgttgggaaaagttgcaatgtaaggaatcctgctttgcaagtagtcatttccccatctgtccagaatgagcctgaaatcaagtgagggtcctgagaaacagagggaggaggttttactgtttgtgtgtggcttggtcaggagactgcagtgggctgaatgagaaactaagctcggacttttaagaagtggtgaggcttggcctgccagcagttctgtgtnttgtctctgtgggcatttacttctcggattcgtaccttcaaagcttcactttactttcgcactctgttccccgggcatggacgtcc

SEQ ID NO: 428247 - DNA, 239 bp, Homo Sapiens
  misc_feature (77)..(77): n is a, c, g, or t
  misc_feature (206)..(206): n is a, c, g, or t
agtagagacagagtttcactgtgtttcccagggctgaccttgaactcctgagctcaggcaatccatccgccctgggnctcccaaagtgctaggattacaggtgtgagccactgtgcctgggcctagtgcaattttagtatgggatatattcatgtgttcattcaacatgttttctgaggccccagcttaggcctctgggacttcancgtagggaaagacatgggcacctgttacttcac

SEQ ID NO: 428248 - DNA, 303 bp, Homo Sapiens
  misc_feature (152)..(152): n is a, c, g, or t
  misc_feature (157)..(157): n is a, c, g, or t
  misc_feature (256)..(256): n is a, c, g, or t
agtatcgcgaaataagaggtggtatcagttttttaaaagtttcagtgtaactttctctaaacccaagcctgcgcgtttaacaagagatacagcgctcacaaagccctcgggatgttgccctcttgtgggcacggagggcattaccgcctagntacgncatctgaaccttcaaagccgacacgcatttgctttcacagaacgaggagggatgactacacacgcagccacaaaagcttcctctatcacacacttgagncgaaacttcaatgaaatacctacctcgaaacttcacggaggacttac

SEQ ID NO: 428249 - DNA, 426 bp, Homo Sapiens
  misc_feature (384)..(384): n is a, c, g, or t
  misc_feature (412)..(412): n is a, c, g, or t
ctttatgttttattgctatttatattctctttacaaagcaatggccagtacaattccaatctattttccctttgtatagtggaagatagagaaaatatggaagataataactcctccagtctgggaagataacatgcttagctaaaaagtataatttttgcttacattgatattaccggtaaaaagaataaactacatttgttgtaatctctaatgacaaaatggtgattcttcatccagatacctgtgattctaggaaataatacagaggccaacctgccgaaattatggaaactacaaggtaaaatctgctatgtttacattggcaaatgggtttaccaaaccacgtgttatggggttgaggaacaactctgggttaggtgnaggacaggaaggttaatatttcataggnttttctaaccgggg

SEQ ID NO: 428250 - DNA, 486 bp, Homo Sapiens
  misc_feature (373)..(373): n is a, c, g, or t
  misc_feature (397)..(397): n is a, c, g, or t
  misc_feature (408)..(408): n is a, c, g, or t
  misc_feature (418)..(418): n is a, c, g, or t
  misc_feature (428)..(428): n is a, c, g, or t
ggtctggactaaggctgccccttactggaccaatgcaatctagagactggggactggaatctaactgcgcagagaaatcaaagaccgatggtgtgaaatctggggcagcttcaaaatttctgcctcctaaaaacatttcacccaatttttcattattgcccatgtcacatttaactgaaacaggttcaccaaaaaatctctctctcagccagtctgggaaggatttccatttagagactgctccgtaggagggagtaagtgtgtgctgacgtgtcatgtccatttgtcttcacagtgaaatgagtcttctgggctccatccaccataactgacccatgactcagccttatcattagggtgtctttcctgaagncaggggcccccagtggaaaacaantcatagggtgncgaggaacantgttgaggtngggtggggcaaagggagaaggggaaatggggggacattcatgttttaccttttaccaa

SEQ ID NO: 428251 - DNA, 471 bp, Homo Sapiens
  misc_feature (54)..(361): n is a, c, g, or t
  misc_feature (382)..(382): n is a, c, g, or t
  misc_feature (387)..(387): n is a, c, g, or t
  misc_feature (393)..(393): n is a, c, g, or t
  misc_feature (406)..(406): n is a, c, g, or t
  misc_feature (413)..(413): n is a, c, g, or t
  misc_feature (417)..(425): n is a, c, g, or t
  misc_feature (431)..(431): n is a, c, g, or t
  misc_feature (444)..(444): n is a, c, g, or t
  misc_feature (454)..(454): n is a, c, g, or t
acacagctctacaaattattttatttatatccttgtatccttataatctataannnnnnnnnnnnnnnnnnnnnnnnnnnnnnnnnnnnnnnnnnnnnnnnnnnnnnnnnnnnnnnnnnnnnnnnnnnnnnnnnnnnnnnnnnnnnnnnnnnnnnnnnnnnnnnnnnnnnnnnnnnnnnnnnnnnnnnnnnnnnnnnnnnnnnnnnnnnnnnnnnnnnnnnnnnnnnnnnnnnnnnnnnnnnnnnnnnnnnnnnnnnnnnnnnnnnnnnnnnnnnnnnnnnnnnnnnnnnnnnnnnnnnnnnnnnnnnnnnnnnnnnnnnnnnnnnnnnnnnnnnnnnnnnnnnnnnnnnnnnnnnnnnnnggattttaaaaatacggggcntaatnaatacnttggcccgggtanctggggnccannnnnnnnncccttntcccatttttggnaccggtaccnatgttggggggggttta

SEQ ID NO: 428252 - DNA, 439 bp, Homo Sapiens
  misc_feature (413)..(413): n is a, c, g, or t
  misc_feature (428)..(428): n is a, c, g, or t
ttttttttcagttggagaaggcttcttatcgtccttcttggtaagtgggtactttattttcccatctgtgcttgcgtttatttggcctttgcaaattcagtgcttatatttaattggtttttgtgtatttgggattaaaccagagcacccacaataaaatgggctctcaaaattcaaaggcatgccaaggatattttctgggattccagccggttaacatgttcaaacatcgtaagggatcattcaaacagtctgttgttccttaaactaaaaggaccacagttaggaaaataatatactccaaataggatatggcggtatctcattggatattttgagggctaaaaaaaggggtttcggggactccaaaggatggactcactaccaaaacactggccctccaaggctaggcncggaatcactttccncctctgggggg

SEQ ID NO: 428253 - DNA, 155 bp, Homo Sapiens
  misc_feature (86)..(86): n is a, c, g, or t
ctgtaaaacccttagaagaaagcatagggaaaaagcttcctgactttggtcttgacaatgatttcctgggacatgacaccaaaagncacaggttaacaaaaggcaaaaataggacacttgaggactacgtcaaacttaaaaggcttctggcacag

SEQ ID NO: 428254 - DNA, 161 bp, Homo Sapiens
accatatattccaggggttatgtgtgtggaggggttgtttttacatttatacagtttacattgcttgacccataagtaacacttgtaagattaatagggccatagttttaaagagtacttacatagccccaccatgcatacagagccttttttaatattgg

SEQ ID NO: 428255 - DNA, 402 bp, Homo Sapiens
  misc_feature (358)..(358): n is a, c, g, or t
gttatgtcctttctgagttttggtatcagggtaataccggcttcaaagaatgattcagagagaattccctctttctcaatcttttgcaatagttgcagtaagattgataccagttcatctttgaatatctggtagaattcagctgtgaatctatctagccctgggctttttctttgttgggcaattttttttattactggatttaatcttgctgcttgttattgggtctgctcagggtttctatttcttccggatttaatctagggagggttgtatgtttccgggaatttatccatttcctcgagggttttctagttgatatgcataggggggtgttaataggtagtctcaaatgganctattggcgttctgtgggccattgggttgtaatgtctccagttt

SEQ ID NO: 428256 - DNA, 447 bp, Homo Sapiens
  misc_feature (379)..(379): n is a, c, g, or t
agagacagggtttttccatgtttcctaaacttgtctcccactcctgagctcgagcaatctgcctgccccaacctcctaaagtgtagagctgtgtttttagtctttttttgagctgttttacaatccagtgttgaattgataagtttggattcactctgatatttgcagatttaacatcctacttcacaagatgttcatagccttgaaccattacagccgctgcctcatccatctctgctcatatccttgatccaatacaacaggccacctcttccatctatggctcatagcctaaactaataggaaggccaggaggggaaggaaatggggaggccaacggtgagttccaggaaccacacggtttttattaagggggccntaagggaaattttaaaaaataggccaaggttttaaaattggaggttttgttaatagggttgtggccta

SEQ ID NO: 428257 - DNA, 457 bp, Homo Sapiens
  misc_feature (140)..(176): n is a, c, g, or t
  misc_feature (204)..(204): n is a, c, g, or t
  misc_feature (223)..(223): n is a, c, g, or t
  misc_feature (232)..(232): n is a, c, g, or t
  misc_feature (413)..(413): n is a, c, g, or t
  misc_feature (431)..(431): n is a, c, g, or t
gcgtaaaccagtttaattaacatttttcaggcatgtcacatttatacattcactaaataattttctaaaattatgctgcattacaagttgccacatatcaacttggattatttttactcatggccctaatcatgtctgannnnnnnnnnnnnnnnnnnnnnnnnnnnnnnnnnnnngctataatttgggtacttccattgaagnatgattcatacttacaggnctagccagnatgctttgttcaatttatttgccaagtgttgcatttaattgccactggacttaatggaaaggctgggcatttttttcagggcagggtataggcattattaaatggtcctttccattcactttataataaaggaaatcttgggaaaggcattcaccaggcatctctctggacttaggtcggnaatatccccaccatggantccaaagggaaggggttccaggtttt

SEQ ID NO: 428258 - DNA, 332 bp, Homo Sapiens
  misc_feature (69)..(206): n is a, c, g, or t
  misc_feature (236)..(236): n is a, c, g, or t
  misc_feature (280)..(280): n is a, c, g, or t
  misc_feature (301)..(301): n is a, c, g, or t
gttcaagtgattcttctgtctcagcctccccatgagctggggttacaggcccgtgccaccacgcccagnnnnnnnnnnnnnnnnnnnnnnnnnnnnnnnnnnnnnnnnnnnnnnnnnnnnnnnnnnnnnnnnnnnnnnnnnnnnnnnnnnnnnnnnnnnnnnnnnnnnnnnnnnnnnnnnnnnnnnnnnnnnnnnnnnnnnnnnnnagcatttatcatttctatgtgttgggaatntttcaagtcatctcctctagctattctgaaatacacaatacatngttgttaactatagtcacccnactatacactatatatagtatatagtcaccc

SEQ ID NO: 428259 - DNA, 396 bp, Homo Sapiens
  misc_feature (338)..(338): n is a, c, g, or t
  misc_feature (367)..(367): n is a, c, g, or t
aatttataaaggaaagaggtttaattgactcgcagttctgcatggttggggaggcctcaggaaatttacaattatgatggaagggaaagcaggcacctcttacatggtggcaggagagagagacagtgaaagaaggaggaacttccaaatacttaaaacaccatcagatctcgtgagaactcactcactatcacaaggacagcatgggggaaccacccccatgatcagatccaatcacttcccaccaggtctgtccctcaacacctggggattacaattcaagatgagatttaggtgggcacccaaagcctaaccatatcacattgatacagacaagntacaaaacactccataccacaagtttccnttgtgttggcccttttcagtagccacgtc

SEQ ID NO: 428260 - DNA, 274 bp, Homo Sapiens
  misc_feature (92)..(92): n is a, c, g, or t
  misc_feature (130)..(130): n is a, c, g, or t
  misc_feature (202)..(202): n is a, c, g, or t
  misc_feature (245)..(245): n is a, c, g, or t
  misc_feature (264)..(264): n is a, c, g, or t
cctatggatgtttagttctaaaaagcaccatttctcaaaaaaactatccttcctccattgaactgcttttgcacctctgtcaaaaatcaatngggcatagttgtgtgagtctatttctgggttctttatnctgttccattgatctacgtgtctatccctctgtcaataccacagtcttgattactgtcactaaaaagaaagncttaaaataggggtggacagactacttccaattcattcttctntttctaaaatggttttaanctatttgggg

SEQ ID NO: 428261 - DNA, 360 bp, Homo Sapiens
  misc_feature (83)..(277): n is a, c, g, or t
  misc_feature (327)..(327): n is a, c, g, or t
  misc_feature (334)..(334): n is a, c, g, or t
gccaatctggaaaacttaaatataaattcagtattacatgttaaacttaaacttaagtttgttatatataataatagtgttgnnnnnnnnnnnnnnnnnnnnnnnnnnnnnnnnnnnnnnnnnnnnnnnnnnnnnnnnnnnnnnnnnnnnnnnnnnnnnnnnnnnnnnnnnnnnnnnnnnnnnnnnnnnnnnnnnnnnnnnnnnnnnnnnnnnnnnnnnnnnnnnnnnnnnnnnnnnnnnnnnnnnnnnnnnnnnnnnnnnnnnnnnnnnnnnnnnngcagaaggaatagctttgaacccccgggagggcaggagggtttgcagttnaggcccnagattccatgcccacttgcactttcc

SEQ ID NO: 428262 - DNA, 161 bp, Homo Sapiens
  misc_feature (91)..(91): n is a, c, g, or t
  misc_feature (113)..(113): n is a, c, g, or t
tttctagtttttatttcagtctagtaaagaacattctttgagactctcaaagcttcagtttgctcatccgtgaaagggagcacataacatntttgcaagagatgcacccagantggggagcccccaaatcccagaacagcaccgtggctacgttccccccg

SEQ ID NO: 428263 - DNA, 299 bp, Homo Sapiens
  misc_feature (266)..(266): n is a, c, g, or t
caaaactcttatgcggccattttctcttccgttcactcagctggtgcaagactggagaatttgggaaggctgaaatactaggacagccaccagggtatgtcgcacctgaagttcatgagggcacaatagcgaacactaccttcagctcagcctaaactaatcaggaacagacgcgaagagtagcttactttctccttaccttcttcaggatgagggtcattaattagggacaagggagcagtttggggaaattttagggtaaagtntttacccacccctttcacctaggaacttaaata

SEQ ID NO: 428264 - DNA, 195 bp, Homo Sapiens
  misc_feature (76)..(76): n is a, c, g, or t
  misc_feature (105)..(105): n is a, c, g, or t
  misc_feature (167)..(167): n is a, c, g, or t
tgacaaccgtgcccagcaacagagattctagtgggggcccattttaacagaaggggcactgggaaatgaatgtgtncagaaggaagggtaactgggaaaggcaantttgcagggaatttaggaggaagggaactgctttagttctggggaaagcctaagttattttncaggatttgatttgaaaagttttcccgg

SEQ ID NO: 428265 - DNA, 481 bp, Homo Sapiens
  misc_feature (323)..(386): n is a, c, g, or t
  misc_feature (419)..(419): n is a, c, g, or t
  misc_feature (434)..(434): n is a, c, g, or t
ccttcagacagaactttatgcttatgaatggtgcacacaaagtggttgttaactggccacaagctagatacatcagttgatactttcataattattttgcgactttaagttatttgaaggccactgttgcttctaaacaaaatagcactcctaatgattaaaacaatcacactgaaagccacataatacagcaagggtatgggacacagggcagaggcaggaaaggggctggtcttcactgtcactgactcatggggactcctgataaggggctttgcattccagggtttgtccctctctataaaggcgaacaggttgtcctnnnnnnnnnnnnnnnnnnnnnnnnnnnnnnnnnnnnnnnnnnnnnnnnnnnnnnnnnnnnnnnngtatgggtgggcgtgcgcctattaattcccagnctacttggggagggntgagggcagggggattcacttgggacccggggaggccggaggtttgc

SEQ ID NO: 428266 - DNA, 347 bp, Homo Sapiens
aacctgggctgtttcaatactacttaaactggcttatcttcacggtaatctattctgtatttcccagtgaagttcatcttcctcacactctcttcaaactcgaatatctttttcagagatgtctagctagtacccactgcaacatctctcaagtagcaggcacacatgtatatgttgaataaatgtctccctgttgtccaaactccgcagctgcaggggaacctgcaattgtctcctacgtacctcttcaaccttatcttctcttccttctgtaaatggaatcctgtgttccaaaccaattactttactcattactttgcttactctcaaacactatgggatccatc

SEQ ID NO: 428267 - DNA, 107 bp, Homo Sapiens
ggaggaacgaatttctaaaaaccaccacgatggcagccatgcaggcttcgcgttctttcagctttcagcacattcacacagccgcacagagctggggccagcggctt

SEQ ID NO: 428268 - DNA, 397 bp, Homo Sapiens
  misc_feature (100)..(100): n is a, c, g, or t
  misc_feature (109)..(109): n is a, c, g, or t
  misc_feature (118)..(118): n is a, c, g, or t
  misc_feature (169)..(169): n is a, c, g, or t
  misc_feature (211)..(211): n is a, c, g, or t
  misc_feature (223)..(223): n is a, c, g, or t
  misc_feature (307)..(307): n is a, c, g, or t
  misc_feature (342)..(342): n is a, c, g, or t
  misc_feature (356)..(356): n is a, c, g, or t
  misc_feature (363)..(363): n is a, c, g, or t
  misc_feature (377)..(377): n is a, c, g, or t
tcatcctctctgttcctgaagagcatggccttaatgagaagttagtgtccctcctgacaaagacaggccattctgtagctgagccagagagtgaccccanttttccagnaaaagggtntcaagccagggatccacagacactgttctgaggtacgttcccctgacaagncaatgcctccttgttattctaccgtgaatgtgtgccccagantttcccaggaanttcaaatgttatattaataggacagtttctagggggcctggaaatttgtacttcttctcacgtaatttcataccttttcaggtnaggaaactgttcttgagtggggttttaacgttttncacattgggtaggnccccaantcgggggggaattngttacttccgggttcttgcg

SEQ ID NO: 428269 - DNA, 383 bp, Homo Sapiens
  misc_feature (344)..(344): n is a, c, g, or t
gtgggtacatggacagatgtatatgtttatgggttatatgagatattttgatacagatacacaatgtgtaataattacttcagagtaaatgcgatctccttcacctcaagcatttatccatagtgttacaaagaatccaagtatactcttgattatttaaaaatgtacaattaaatttattattgaatttagttaccccattgtgctatcaaatattcaatcttattcattctttgtaactatttatttgtacccattaggtcattccttgtcccatcccctaaatcccccactacctttcctggcctctgggtaacccatcattggtactctccatggggttnccattacttccggttttaaggttgggcggttgccctacc

SEQ ID NO: 428270 - DNA, 190 bp, Homo Sapiens
  misc_feature (65)..(65): n is a, c, g, or t
  misc_feature (90)..(90): n is a, c, g, or t
  misc_feature (173)..(173): n is a, c, g, or t
gaaacacaaaaagacttaaaatacagcatcattgtcacatctcatgaaaacattcccataaaaanttaacaatttccacttgaacatgtntttcagccctctttgaacttattctgaaatcttgatgctctactgacgtttataggactaggccattttctcactccatgganctcacaaggttatcggg

SEQ ID NO: 428271 - DNA, 423 bp, Homo Sapiens
  misc_feature (319)..(319): n is a, c, g, or t
  misc_feature (371)..(371): n is a, c, g, or t
  misc_feature (391)..(391): n is a, c, g, or t
  misc_feature (399)..(399): n is a, c, g, or t
tgaagggaagtcactttggaaaagggctgtgtttaaggctgtggaagctcttctcatcttgtcctgagccactcttcctggctctgaaagtgccacatccatctattacatccataaacatataaacttggaaggttttcttccattctccttttttttctcacagcacactaacggggaccgttgtaaaatttgggtaattatgtcttaactgttacttgaaaaagcctcactttgatgagtgtttcaaatcataacaagtttcattctggaaactcctcaccagtttaggggtgttttgagggcccggaactgtcancttctcttggtgggcgtgggctccacagggttgccattgtactctccttttntaggggcaattttaagtttntgcccttntggaaggcaggggttcccgggggt

SEQ ID NO: 428272 - DNA, 450 bp, Homo Sapiens
  misc_feature (45)..(328): n is a, c, g, or t
  misc_feature (340)..(340): n is a, c, g, or t
  misc_feature (357)..(357): n is a, c, g, or t
  misc_feature (376)..(376): n is a, c, g, or t
  misc_feature (404)..(404): n is a, c, g, or t
  misc_feature (414)..(414): n is a, c, g, or t
acttctcaccaacaccataactcactgtactttaaagctagctannnnnnnnnnnnnnnnnnnnnnnnnnnnnnnnnnnnnnnnnnnnnnnnnnnnnnnnnnnnnnnnnnnnnnnnnnnnnnnnnnnnnnnnnnnnnnnnnnnnnnnnnnnnnnnnnnnnnnnnnnnnnnnnnnnnnnnnnnnnnnnnnnnnnnnnnnnnnnnnnnnnnnnnnnnnnnnnnnnnnnnnnnnnnnnnnnnnnnnnnnnnnnnnnnnnnnnnnnnnnnnnnnnnnnnnnnnnnnnnnnnnnnnnnnnnnnnnnnnnnnnnnnnnnnnnnnnnnnnnnnnntgttcaattcantcaatcaattcaatcantcaaggttaggttagcttnaagggcaaagatttgaagtttgggggcntggggtgcanacagcagcttttccttgagttttaggaggagttcca

SEQ ID NO: 428273 - DNA, 222 bp, Homo Sapiens
  misc_feature (179)..(179): n is a, c, g, or t
  misc_feature (186)..(186): n is a, c, g, or t
  misc_feature (200)..(200): n is a, c, g, or t
ggcgtgacaacttgcggcccgggccctgaattttttttacttacaaaccatactcaccagtattttctttgtggccatgtattggggatcaactcctctggatacacaacagtacttaatccttacagtaggtcattttaattctacaaagggtatttgtaattggatatggcaaaggncaccggntttttcgaaagggnagggcatggggcccagggtttt

SEQ ID NO: 428274 - DNA, 178 bp, Homo Sapiens
gttcaagcaatcgtattctaaaaacccagaagttttatttacagaagttacttagtattacttcaagaaactaaacttcaaaactaaatttgtgaaattatttagtacagttgtacacattttatatttgtggcacacactcaaaggacacaggactttcacagatcccaaaattctt

SEQ ID NO: 428275 - DNA, 436 bp, Homo Sapiens
  misc_feature (239)..(239): n is a, c, g, or t
  misc_feature (344)..(354): n is a, c, g, or t
  misc_feature (416)..(416): n is a, c, g, or t
gaagttttattataagttcaggggtacatgtgcaggtttgttttataggtaaacttgcatcatgggggtttgttgtacagattatttcattaccgagatattaagcctagtactcattagttatttttccttatcctcttcctcctcccaccctccatcctcaggtaggcctcagtgtgtgtcgtttccctctatatgtccatgtgttctcatcatttagctcctacttataattgagnaacatgtgggtatttgggttttctgttttggcattaggtttgctggaaggataatgggcctccaggctccattcatggtctctggcaaagggacatggaactcannnnnnnnnnnaatgggctgcatagtgttccattaacatcctcattccaactgatcattaggggaaattcaanttcaaaaccaaatgaggtca

SEQ ID NO: 428276 - DNA, 375 bp, Homo Sapiens
  misc_feature (236)..(236): n is a, c, g, or t
  misc_feature (348)..(348): n is a, c, g, or t
  misc_feature (362)..(362): n is a, c, g, or t
acatgtgcacacttttgttggctttattcatgtatgtacatatgcctgcctgaatacagaaattggcctttaaatgggatacgacaagttattttttttacacataaaaatagaaaactgatcactcagactgtacacactcacagaatgtattgacataccacggaccagactacagtattatggcacggacatattgttcacacattaggtacagcagaggatacacacatttnggaaaattaggtaattggctaggtattatatttttcttattttcagggctgtgttggacctttttcaaccttaattaaagggtatctccgggggggccctttaaaacagggnttaggtcttttccnctcccctgggggg

SEQ ID NO: 428277 - DNA, 435 bp, Homo Sapiens
  misc_feature (235)..(243): n is a, c, g, or t
  misc_feature (295)..(295): n is a, c, g, or t
  misc_feature (300)..(300): n is a, c, g, or t
  misc_feature (335)..(335): n is a, c, g, or t
  misc_feature (397)..(397): n is a, c, g, or t
caaaaatacatgtttttatattttaccatatgttcacatttacaagaagtctttataactctatatggctgtaagttactatttcctttcattcaacctgaattcctcccttcagcatttctttgagagaaaaaataggaaaattagtgattggaggtccctataaaattttcttacatctcaagtgttcctggaaatcagggtgtttgggctttatggaaattctggaataacnnnnnnnnnaacaataggagttttataaaatgggagggtgagggactggggaaaaagtccntagcnggatggtactttttttaccaaatgactggaccccncatgggtttttttcaccatcttggaaaaggggggttacacttggcctaaggggggttttggnaatttgggagggtttggccttagggggggtttaccaca

SEQ ID NO: 428278 - DNA, 444 bp, Homo Sapiens
  misc_feature (55)..(55): n is a, c, g, or t
  misc_feature (63)..(134): n is a, c, g, or t
  misc_feature (218)..(218): n is a, c, g, or t
  misc_feature (368)..(376): n is a, c, g, or t
  misc_feature (401)..(401): n is a, c, g, or t
  misc_feature (407)..(407): n is a, c, g, or t
  misc_feature (422)..(422): n is a, c, g, or t
  misc_feature (432)..(432): n is a, c, g, or t
ccaggctggagtagtgcaggggcgcgatctcgactcactacatcctccgcctccngggtttannnnnnnnnnnnnnnnnnnnnnnnnnnnnnnnnnnnnnnnnnnnnnnnnnnnnnnnnnnnnnnnnnnnnnnnttgtgtacttttagtagagatgaggtttcaccattttgggccgggccgatcttgacgcctgacctcgtgatccacccacccgtnttgggcctcccaaagtgctgggaatttacagttgtgaggcttaccgtgcccggccagtatttacatgtttttacacatttatggccgtatctttctcttaaatttttttgatatttctaggggtatggggtaggtttcatctgtgagggnnnnnnnnnaaattgtttccaaatgtttcaaaangttttncaaaatattttattngaaaggaaanccggggggttaa

SEQ ID NO: 428279 - DNA, 235 bp, Homo Sapiens
  misc_feature (176)..(176): n is a, c, g, or t
ggagcaaagagttaaatatatattaaggtggtaggaaaaagtttttgaacactataaagaaaattctaaaatttcacacaggttggcttttctgtgtgtaaaatgttttacgcatgtaacactcatgtgcaaaggccaaggtaattataggtgtgcacagttgttacacacacagntaggcaaatttggactagggaacactatgtttctatcactaaaatacttcatggaacag

SEQ ID NO: 428280 - DNA, 457 bp, Homo Sapiens
  misc_feature (69)..(69): n is a, c, g, or t
  misc_feature (95)..(95): n is a, c, g, or t
  misc_feature (130)..(130): n is a, c, g, or t
  misc_feature (147)..(147): n is a, c, g, or t
  misc_feature (206)..(206): n is a, c, g, or t
  misc_feature (230)..(230): n is a, c, g, or t
  misc_feature (270)..(270): n is a, c, g, or t
  misc_feature (286)..(286): n is a, c, g, or t
  misc_feature (303)..(303): n is a, c, g, or t
  misc_feature (376)..(376): n is a, c, g, or t
  misc_feature (403)..(403): n is a, c, g, or t
  misc_feature (422)..(422): n is a, c, g, or t
  misc_feature (442)..(442): n is a, c, g, or t
gatgtgcaaagatgtttataagaagaaaaaactaaaagcaagtcaaatgtcccagtaacatggcaggtntgagtcgcagcacggcgccggcaggnagaccaaacccacccacggcatgagcgtgagtcgntgcaaagggcaaaggtntgcgccacaaagcaccagaaacccccaggcccctgcggctggcctgggcacagccttgntttgcagccccggagaggcagggnctgggaccttcaccctgggcctccacctgccaccacgttnttcccgccaccctgantgccccttttccagggnattccctgaccagcacagctttcaccccagggggagccccgaacacctttccgccattttgtttgcctggggnacacgatgtttaggccacgggcatttnaggtttaaccacagggttnccacagtttccagagttttnccaggaggccaaccc

SEQ ID NO: 428281 - DNA, 322 bp, Homo Sapiens
  misc_feature (222)..(222): n is a, c, g, or t
  misc_feature (239)..(239): n is a, c, g, or t
  misc_feature (298)..(298): n is a, c, g, or t
ctgtgcaaaaataaatttattcttttctggttggaaacacttttaattgccttcacaaatgaaagaactcatgctctaacttgactgttattctgcttttattaccatataactagcttttaaattcaatatatgactcaagttcatgcaaattatagaaaatgttcattttcagaaaactaaagtctaggagtttaaatttttttatactccaataactanggcagtttaaattatgnggcattacagggaatcctgacattttgattaggactacccatggtttaatcttaaaggngccatattaattctcaaggacatt

SEQ ID NO: 428282 - DNA, 444 bp, Homo Sapiens
  misc_feature (329)..(329): n is a, c, g, or t
  misc_feature (418)..(418): n is a, c, g, or t
ttttttttctcggagcaataggctttattgtatagtctaggtgagtggtatgctataccacctaggtttgtgtaagtacacccaatatggttctcacaatgacaaaatcacctgatgcattccacagaacatgtacccatcattaagtgacacacaactgtatttagaacatcccaattactgtcatccttctttagtcatcaagaactctatgtatgggaggtacaggtaaataagtggtgggttttatctttttggttttatgttagacaatatttctactctaattaaagtcattttcaccgcaaaacatgatgaaaaccaaggantgattaacaagcacctttcttaggaagttcttaaggttttgcttccaatatttttcagtgtgtgggaaaaaggcaaaattgtaattctntgtaccctaggggcccttttggaccg

SEQ ID NO: 428283 - DNA, 455 bp, Homo Sapiens
  misc_feature (190)..(190): n is a, c, g, or t
  misc_feature (201)..(201): n is a, c, g, or t
  misc_feature (215)..(215): n is a, c, g, or t
  misc_feature (226)..(226): n is a, c, g, or t
  misc_feature (235)..(235): n is a, c, g, or t
  misc_feature (240)..(240): n is a, c, g, or t
  misc_feature (264)..(264): n is a, c, g, or t
  misc_feature (267)..(267): n is a, c, g, or t
  misc_feature (386)..(386): n is a, c, g, or t
  misc_feature (399)..(399): n is a, c, g, or t
  misc_feature (409)..(409): n is a, c, g, or t
  misc_feature (430)..(430): n is a, c, g, or t
ttttttttggctggtcttcatagggccattgtaaaaccacaagtggaaacagctcaactgctcaaagagggtttcatctgaagggcttgaccttctccaggcccgccttcctccccgctaacaatgcagagaagcacttggttaaccccctcagttccagagccaggggacactcctcagcctccgaganctgagcaacancgccagaccaccanggtggcttcanggggcacangtganttggtcaaacttaaaaagagcagnttncacgtgcaatttaagtgttttttgcaggaagtgggtcattttcttggggaagtgtttatagtgacagttgcatacctactccaaacttgggacctaggactaggtctgtcttcaaacanccttttttgaagncttttggggncttccaaggataaggaaaaancagggttgaaaaaaggccagagttt

SEQ ID NO: 428284 - DNA, 374 bp, Homo Sapiens
  misc_feature (99)..(99): n is a, c, g, or t
  misc_feature (133)..(133): n is a, c, g, or t
  misc_feature (189)..(189): n is a, c, g, or t
  misc_feature (284)..(284): n is a, c, g, or t
  misc_feature (363)..(363): n is a, c, g, or t
ggcaggagacttcgtttattggaggggaaatagtacgcttcattttgaacatgtcatgaacatctgagaggaaataagacagtggaaataagatgagtnttaggaaaaggggttttacctgaaatttaaagantaagcaagttgttttcgaagtacattactcttaagtttggaaataagtcagtaganccacaaacaagtatgaggaagtacaagtttatcagtaacataccaagagggagccttctctaccaatgctcattctgttctgcctgggtggcaantaaaacattgtcttttcaagaaacactctctctagtttattgcttctatttaaatacatataggtgatatttaaaaagnctaaaggaaat

SEQ ID NO: 428285 - DNA, 305 bp, Homo Sapiens
  misc_feature (68)..(68): n is a, c, g, or t
  misc_feature (94)..(94): n is a, c, g, or t
  misc_feature (151)..(151): n is a, c, g, or t
  misc_feature (157)..(157): n is a, c, g, or t
  misc_feature (166)..(166): n is a, c, g, or t
  misc_feature (191)..(191): n is a, c, g, or t
  misc_feature (220)..(220): n is a, c, g, or t
  misc_feature (227)..(227): n is a, c, g, or t
  misc_feature (238)..(238): n is a, c, g, or t
  misc_feature (247)..(247): n is a, c, g, or t
  misc_feature (252)..(252): n is a, c, g, or t
  misc_feature (273)..(273): n is a, c, g, or t
  misc_feature (284)..(284): n is a, c, g, or t
tatgggtaacttttattttgtactttatgtactttcttcaagttgtcaataataagtatacactacanttacatagacaaagttatttacagantgataccatgggcattttcataactgtctcaaatccatgctgttagtcataaacaantcacanttaaaaaangacagtcttttcattccaccggggncctcaggcagagcaagtttgggcataggncattaancatcaagggtnttatctttncggantttggtattttaaatatgccntgccttaaggnggaaaatcccttctggttttc

SEQ ID NO: 428286 - DNA, 409 bp, Homo Sapiens
  misc_feature (234)..(234): n is a, c, g, or t
  misc_feature (339)..(339): n is a, c, g, or t
ttttttttgtcaacatttttggaataaatagtgatctttatttaaagaaaagtttattctcctattttgacattataaaactacaccttccccactcacatttttgcacaattcatacacaatgaatcagttaaaacaagttggaatcttaattcatttgagatgccaattttccatcaaaacaaaacaaactcagttgcctcccacacacatgtgtggcacatacataaaggntacacacacaccctggacttccatcaggtcccttgggttctccactaggtctttaccatggtcttcatggggtcccttttttaacggcctggcatggcttaaacntggatttccttgggggtggacatggggccccttctgggaaacccggtggatgaggggtggtgagggggga

SEQ ID NO: 428287 - DNA, 329 bp, Homo Sapiens
actcaagtgatcatcccacctcaatctctcaagttacctgggactatatgtgcctgccaccaagcgtggctaatttttaaatttttaatagagatcgggtttccctaagtttcccagggctggtctcaaactcctgggctcaagtgtgatcctcctacctcagcctctcaaagtgctggaattatatgtgtgagccaccgtgcctagctggtacttccaatttgaattctccttttacaaatcgcattaggaacagttcctcccaatcatcaggtatcaatgtgtctcaattaggctatggaagcaaaaataaaaatactgggcagtga

SEQ ID NO: 428288 - DNA, 164 bp, Homo Sapiens
ttttttttaacctaacttagatgccacgattcatcactataagcaatcccttgcaaacatcatcaactcaaacttggtttttctccaacatgttaaaaccctacttggtaaaactcggctgttttcttattccactactatatgtgagcagcctaagtaggtgg

SEQ ID NO: 428289 - DNA, 197 bp, Homo Sapiens
caaaacaaaaagacttaatttattaggactgcagtggtgatgtgttgtcacttcaggacaccccactacctgaattgcagcagtgttgcgaatcatcactctgcagtgaatgggaatttttggtttagagtttaacagattttcctggtctttctcctagcgactgacacagaaatacgaaagaataaaatgattcc

SEQ ID NO: 428290 - DNA, 196 bp, Homo Sapiens
ctcatttaagtgcactttgaaccatgtgtagactgcaggcactttagaaagaagctgagactgaaaagtctgtcttgacttccaaggaagggtaagtccctgtttgcagccccggggcctgctcattgttaagtttgtgtttcaaacaacatactttgtgagcagttaaatatgatggataatataattttaggat

SEQ ID NO: 428291 - DNA, 315 bp, Homo Sapiens
  misc_feature (215)..(215): n is a, c, g, or t
  misc_feature (266)..(266): n is a, c, g, or t
  misc_feature (283)..(283): n is a, c, g, or t
  misc_feature (297)..(297): n is a, c, g, or t
aatttataaagaaaagaattttaattgactcacagttcagcatggcgtgggaggcctcaggaaacttacaatcatggcagaaagggaagcaaacacgtccttcttcacatggctggagcaaggagaagtatgagaactgagctaagggggaagccccttataaaaccatcagaccttgtgagaacttactcactgtcaccagaacagcacagggntaaccacccccatgattcagttacctcccactgggtccctcccacaacatntggggggattatggggnactacaattaaagntgagatttggggtaaggg

SEQ ID NO: 428292 - DNA, 273 bp, Homo Sapiens
ttttttttctgcagaagtaggactcaatagtgggcttaaaatattcagtaagccatgctgtaaacagatgtgctatcatccagcctttggtgatccatttaaagagcacagagtagatttggcataatccctaagggccctaggatttccagaatggtaaatgagcactggcttcaacttaaagtcaccagctgcactggcccctaacaagagagtcagggctgtcctttgaaactagggcactgacttctctctatttatgaaagtcctaga

SEQ ID NO: 428293 - DNA, 459 bp, Homo Sapiens
  misc_feature (26)..(26): n is a, c, g, or t
  misc_feature (388)..(388): n is a, c, g, or t
  misc_feature (433)..(433): n is a, c, g, or t
ttttttttattctttggaaactagtntttacagaaatctcttctccctagagactttaaaacgtgctattaagacagaaggatatggtaagaatttttattctgtaagaatcttcaaagctcagcatgaagatacacatctttcccatgggaatccaggctagagaaatgcaagaaggcggttccctctagagtctcctttcctgggagatgcagctccagatgggtgggtttctgggcaggaggggagaggagggtggtgtttattcaactgtttatttgggatcatgttatgcgtcttcaaaaagcgatataagagaaaatattgggaaagatatttcaaaataaggaattaccttgaagtaattcccataattaatggggtaacntttttgtgtatgtattttgggcttttattgttaaaaaataatgtnttttcctttgtaggaaagtttttttt

SEQ ID NO: 428294 - DNA, 181 bp, Homo Sapiens
  misc_feature (143)..(143): n is a, c, g, or t
  misc_feature (148)..(148): n is a, c, g, or t
  misc_feature (164)..(164): n is a, c, g, or t
tcatgttccaccatgctgagaatttttaacagggctgtgggagtaacagaacttgatgggaaaattgggcatctgtgtaggaatgattctaaagctttcagacaaatgggcaggaatcctaggggtaaaaatatcacctttanttttntttccatgaactcttntcagtgggattattttt

SEQ ID NO: 428295 - DNA, 192 bp, Homo Sapiens
  misc_feature (65)..(65): n is a, c, g, or t
  misc_feature (101)..(101): n is a, c, g, or t
  misc_feature (121)..(121): n is a, c, g, or t
gtctcccccatttatttggaaaacagcaattacattaaaaggaaaaagtaacagcatgttgaaanttcacttaagtcgataccctttgatacaaactgggntattatgcatttataaaagntgccccttgttggccatggaaaagatacattttatgatctacagcggcagtatattcactttaagtaggga

SEQ ID NO: 428296 - DNA, 401 bp, Homo Sapiens
  misc_feature (251)..(251): n is a, c, g, or t
  misc_feature (311)..(311): n is a, c, g, or t
  misc_feature (340)..(340): n is a, c, g, or t
  misc_feature (347)..(347): n is a, c, g, or t
ttttttttcagttcaactacagaaatatattttattcattcatattagatcactctcacagggcaagagagttcttcaaaaattatgcttttccaagaccaattgcttatagataatcttcaatgacctgtacacatacatttctgagaaagtatcacttaaaaacttgatctatactgattgttttcactgattccgatgttaatacttacaatgcttgtcctctaggacaatactttgttcacaagganatcatggaaatatggatggacaaaggaaaggacaaagggaaggaacggaggaaaggtggnaaggacaaccccaacccacagggaatggnaaggggnaaacatttggttaaatatactggataggggggtctggggggtttccggggtttt

SEQ ID NO: 428297 - DNA, 425 bp, Homo Sapiens
  misc_feature (266)..(266): n is a, c, g, or t
  misc_feature (380)..(380): n is a, c, g, or t
  misc_feature (394)..(394): n is a, c, g, or t
  misc_feature (411)..(411): n is a, c, g, or t
aaaaagatcccaagccacatccaagaaaaagccacctttcatgttcttaaattcttggcatcacagtagacgttagttgttcaactgaaaagctcaggaagcctactcagctcccttcccacatgagctttggaggagtcttgccatggctgcagccctgccatgacccagctgggcctttaggatctgactgggctgggcaatcccaggcactttccattgccaaccgatcactgggcttattaaagggtttctaaacccggggnttaacataccaggattggggggtgaaggcagttttcaattatggtggccatggtttggaatctaaaggctaaggatggatgggggtggattttcatttgttttagggggagggnggataacacagggnttaatggaaaaggaccngagtttttgagggg

SEQ ID NO: 428298 - DNA, 372 bp, Homo Sapiens
  misc_feature (332)..(332): n is a, c, g, or t
  misc_feature (349)..(349): n is a, c, g, or t
ttttttttccctacattctatttcttaagtttgagagtaggtaaatgtaaattttaccaaaaataaaacaagattataatgcaacacgtgaatcagccttttgaagggcacaggaagggaagtcacaactcccaacctcctcctcccaatccccactccccaggaccatatcagctgggcctgacagccatcagggagcagttcctcgactgggaattgctggactgagggagcctatctgacactaggaggaggcaaatgtcctggacaggggattctggcatcaagggccttaaacccaaaggtcaaagccggggggaaatctggggaangaacagagggcccaaantataacgggggggaggtctttgg

SEQ ID NO: 428299 - DNA, 414 bp, Homo Sapiens
  misc_feature (214)..(222): n is a, c, g, or t
ttctttttctcaaaacagaacatttgaaataatgcacatcccccaacagcaaggcattattaagtctgttaatacatattgcaaagtgtgtttggctaatgaaaacacaatagcaagaggaccagcaggcacatggaaagtagcctggtttgttcacttttactcatatatacccgtgactcccaaatctctttccccagccgtccaaactgannnnnnnnnctttgcttttgcttaacatctccacccactgtcagagtacgtgcacatatgttgttggggcctcgtgctgggctaggggaggtgggagacgtgggagagtgtgttgggagaacatgggcttatgccgggattcaaggcagaggaacaaggaggaaaaaatttaaacaatttggcctattttttgccaatacc

SEQ ID NO: 428300 - DNA, 137 bp, Homo Sapiens
gaagatattaaaatgatgtgtatttttgatatatatttgcaaatgtagacaaaatgttgacttttccatacaaattaccaaagttgagctaagaaaagtaaaatacctgactaaagaattaactataagagaaacag

SEQ ID NO: 428301 - DNA, 393 bp, Homo Sapiens
  misc_feature (277)..(277): n is a, c, g, or t
  misc_feature (335)..(335): n is a, c, g, or t
  misc_feature (348)..(348): n is a, c, g, or t
  misc_feature (360)..(360): n is a, c, g, or t
caactggaaaacaatttatagaattctatttacatgtaacttctccagagcgaatatcttatacaaagcaaggatgtgggttatttcaatcaaataacatgaagtcgcaattaaatgaccaagctaactctccttgaagtctctaaccatctgctaatttatttaatacaaaatgcttatttggtcttttaaatgacaggcaactttgaaagtgtatttcacctattcttgaggaattctactagggctttagctacaaggattataggcaccaaantccattttaataggtatttaatatttggccactaatattgagtttttaatacatacantttcagtgggggntacggggaaaanttcgggcaatttggggttaacctttttataaat

SEQ ID NO: 428302 - DNA, 437 bp, Homo Sapiens
  misc_feature (314)..(314): n is a, c, g, or t
  misc_feature (408)..(408): n is a, c, g, or t
ttttttttcagatatataaaagttagcttttatttagattcaaactgttgatcaaactcacgaagtaaggcagaggcgaggttggagccatgtcgcctgcccctagactccactgtttgattgtgttgaatgatttgctaaaccttcatagggtaaagttccacccaggggagaaggccacaactagggtatttcctacatggtttaccgcatgagtttactctcaccatagtcctattaagatagggtgtgggttattcttcaacttacaagggagggaaactgagggctgcagaggaggtggaaatatcttncttctagtttaccaggctaggaaccatcctggggttacttcaaggggaaatctggccatttttctccttattcacggcaagatccccgttaatntggacatggcttaaaattttaggacaccg

SEQ ID NO: 428303 - DNA, 320 bp, Homo Sapiens
  misc_feature (297)..(297): n is a, c, g, or t
gacttcaaaacatcaaactaaagacatcccttggtctccagctggcactttctaacatcgtcttccccaccagccagagtaacctaattaaagcacaaaatgagctatgttaatttcctgcttaaaacccttcactggcttcctatcagttgatagaaagtttcaggatggaggccaggctcctttgtctccagatctcgtctccctggcttcctctctgtccttaccacttggcttctccttatattctactttcttggaacacaccatggcttttttatggccttatgttgaagntggtgcccatttcccagcatggg

SEQ ID NO: 428304 - DNA, 345 bp, Homo Sapiens
ttttttttaaccagttagaattgccctattggctatttttgattcaaatagaagtggaagtgattctttttaagaatgatttcacacacaatgagatagagaaaatgggagtttttctatattttccattactttatcacattcagcagttgtttctgttttagtataaggatttggttaggaacattaaaaatgactgcttaaagggatgagaccccattggcagttcttgtggaattaaagcctatattactgttttatggaggaataatactgtttaaaatttcacattgttatggatttcatatgggttgggggtttcagttccaaggttggaaaaccccc

SEQ ID NO: 428305 - DNA, 465 bp, Homo Sapiens
  misc_feature (327)..(327): n is a, c, g, or t
  misc_feature (351)..(360): n is a, c, g, or t
  misc_feature (368)..(368): n is a, c, g, or t
  misc_feature (380)..(380): n is a, c, g, or t
  misc_feature (414)..(414): n is a, c, g, or t
  misc_feature (436)..(436): n is a, c, g, or t
  misc_feature (452)..(452): n is a, c, g, or t
gcatgtactttcaggatttctatcacgaatagtttgggtaattgtgttcttatcgttccttgagaagaaaacagaaatgtgtcagagcatggtctattttcacaacacagaaaaatatttgatgcagtttattataggattacaattttttttaatctaggaaatataattttaatttctttcagatttaggatgtctaatcttttgaggacacaaaaaaataaactattggaataggccggggtcatggcataggcctttatattgctgctcagatctattaaatgggcatcttatttaacctttaaaaccaaaatcccggtaacnacctatgggccataagcatcttcnnnnnnnnnncctggtcnggtcccctgganggtattttggccttttttaaatttcccccaccgntggaggggattttttccttacntccccaaccacctttnccagggccccgtg

SEQ ID NO: 428306 - DNA, 372 bp, Homo Sapiens
  misc_feature (131)..(131): n is a, c, g, or t
  misc_feature (199)..(199): n is a, c, g, or t
  misc_feature (360)..(360): n is a, c, g, or t
cttttacagtgtctttaatgttaccatatccagtgattaaggtcagtggaaaactacaacaacccagttcagaaagtttgggtaaccccaccaagtaaaccagctgaggtgcttgctgaaggtaaaaggantacagaatgggtgatggaagatggtagtcataaataccagctatggctatgtgggtcaatttcagganttgtaattgccatgagtatttgctccttattttgttatgtatacattgtatgtatgtatataaaaatctttgttttcttttctctcatttctttatcatggcaacaggatatattttgactttaggttgtaggtatttaggccctattaattttggtatcngggatttttagg

SEQ ID NO: 428307 - DNA, 344 bp, Homo Sapiens
  misc_feature (284)..(284): n is a, c, g, or t
  misc_feature (307)..(307): n is a, c, g, or t
attcgaacatattttagtgtactctgctaattcacaacctctcacaagatatatgagtttccatatggtttattaaaaaagaaccctattgtgttttaaccacaggctcttgttcttgtatataaataagattgcatatacttaaatgttaaatctcaccctgaaactgccgaatttttccctatggcacacagtaattactgtatcttttatccaaggaaatgggaatattttctgttgcttacacatcatttccaataaggaaatgtgttaatgggtagganaatatttaaggggacaattaacntggaaatccatttaactctaacccacttacctaccaa

SEQ ID NO: 428308 - DNA, 298 bp, Homo Sapiens
ttttttttactcctatgtttattacattttaatccaacagcatataatctaagctgctccctcatggagagccgcggctgtgcacctgcctgctttcgccatggagaccggagtcaggcctgcagggaagtcggtgcgcctttcccaagtcctctgcccgctggttcctctcgggcctcccgggctctgcgtgccggggatctgggacccgggactgcagacaccgccccacgactggggcccccggcaggactgttaccccacagggagggagggttccctttggggtgtgacttta

SEQ ID NO: 428309 - DNA, 184 bp, Homo Sapiens
  misc_feature (146)..(146): n is a, c, g, or t
  misc_feature (155)..(155): n is a, c, g, or t
ccatggcccggcctgcatctcagttttctaatctattaaaatggggcctagtaggtacaggttgggctggggagcatttaaatggatggaaattacatggaagattacacttgaaccacaaaggcattgcaagggtttcctttttntaaattagntttattttatgtttggatatggggttagg

SEQ ID NO: 428310 - DNA, 373 bp, Homo Sapiens
  misc_feature (60)..(61): n is a, c, g, or t
  misc_feature (81)..(81): n is a, c, g, or t
  misc_feature (86)..(87): n is a, c, g, or t
  misc_feature (90)..(90): n is a, c, g, or t
  misc_feature (97)..(97): n is a, c, g, or t
  misc_feature (170)..(170): n is a, c, g, or t
  misc_feature (180)..(180): n is a, c, g, or t
  misc_feature (207)..(207): n is a, c, g, or t
  misc_feature (215)..(215): n is a, c, g, or t
  misc_feature (224)..(224): n is a, c, g, or t
  misc_feature (266)..(266): n is a, c, g, or t
  misc_feature (279)..(279): n is a, c, g, or t
  misc_feature (313)..(313): n is a, c, g, or t
  misc_feature (333)..(333): n is a, c, g, or t
  misc_feature (357)..(357): n is a, c, g, or t
cttttgtgaaactatgagtttgtattaaaaatgggaggggggtaagagtctattatccanntaaatcacactctgaatggntcaannatngtaagantctcaaattccaaataaaatcatttgatcaaagtaacagaccctacagtcatatacaattatttaactcctcntatgggcctncagtatttcttcagggctaacttagtnttattttnatacttttncctaaagtacacttatcaattccctagggttttgggtacagntcctatgggacancttacaaggtttaatgtgtggattttctttttanaacagatttcacggtcacanacaagccttacccttcccggattnctgtatacggcacggc

SEQ ID NO: 428311 - DNA, 329 bp, Homo Sapiens
  misc_feature (180)..(180): n is a, c, g, or t
  misc_feature (198)..(198): n is a, c, g, or t
  misc_feature (245)..(245): n is a, c, g, or t
  misc_feature (266)..(266): n is a, c, g, or t
  misc_feature (279)..(279): n is a, c, g, or t
  misc_feature (299)..(299): n is a, c, g, or t
agctttttaaatagacttttactgtgaaatataataaaagatttggaaatgatttttaaaatttcaattacagtgttaacaattcaattatctttatgagagaaagcaccacattacaaaaatacaaagaaggactctaaaatgcacatgctaaaatgacttaatagtaattacattagncaaatcatgaaattcagnaacctttttctaattacagaatctaaatcaggggtctcaaacttagnggtcttcagggctgagcaggnactacaaagtagnggaagttgtctgatataagngggaagtcccgtaggctgtggccaaactgg

SEQ ID NO: 428312 - DNA, 349 bp, Homo Sapiens
  misc_feature (267)..(267): n is a, c, g, or t
  misc_feature (309)..(309): n is a, c, g, or t
tgagccactgtgctcggtaccttctttcagttgtgccatatcttgactttgggccaacacccccacacagcctgggaaacatttatgatttggtgcttggagatcagagatgtcactaggagcagagcctgcctcagtctagctctggccttggtcctgggggaagctgtatcctccaaccttactttgtcttccttccctgatctgatcccactgaccagcaccttattcgacgaggttgctttaaagtaaatcaccatcccgttnagagagggaagtgaattcaaagttaggaggggatttaacaantttaggtaaacgggggaagcattcccaaatccaccaacct

SEQ ID NO: 428313 - DNA, 407 bp, Homo Sapiens
  misc_feature (108)..(116): n is a, c, g, or t
  misc_feature (320)..(320): n is a, c, g, or t
catttattagccatttgtttatcttcctttgtgaaatgtcttttcaagttctttatccattttaaaaattggattttgtttttattgagttgtaggagttcttttagnnnnnnnnnggtatatatatattctgcttttaagtcttttctcagtagttttgctaggttgtgaagatgtttttaatgcatttttctagagggtttaccaatttatcatttaacctttgttaaggtctatgatttattttgagctactatatggagggaagtagggatcaagtttcttcttccttttttttgtgtatgggatatcctgttgtnctaggaacctactttgggaaaacactttttcccattgagttgctttgtcacctttattgagtaggttgacctaagtgggcctacttc

SEQ ID NO: 428314 - DNA, 222 bp, Homo Sapiens
aactttattttgggaaaagaaaacatttttttgttggtcaaactatcagctcctatgaaatactcttagagatgtttatcctgagctagttttttttgtggggaggtgctgtttacatgctatgttaaaaataacacgcaaaaattcacgagacattgatgatgatgatggttatacaaataacgaggaataatgatattgggcatacatcatgtgagtggg

SEQ ID NO: 428315 - DNA, 443 bp, Homo Sapiens
  misc_feature (186)..(186): n is a, c, g, or t
  misc_feature (193)..(193): n is a, c, g, or t
  misc_feature (376)..(376): n is a, c, g, or t
  misc_feature (415)..(415): n is a, c, g, or t
aagctgtggatgcgcacccaggtcaaggatcgcgagacccgtgagaagctcacgccgaagtatcaactcggctgcaagggccgtcgatgcacaacgaatacttcaagacctataacctgccgcacgtaaacctggtgaccgagggcatcaccaagatcacaccggcggcggtggttcaccaccgangtggcgnagtacgagatcgatgtactcgtgtgcgccaccgggttcaaagtgatggccaagggggcgacccgccttttccccatggtcggacgcgacggcattcgacattcaacgaattctggggaagcaaattcgctaccagggcctattcagggcgttttggttaccgggctttcccgaacggatttcntcatcattcggggccttacgcttacggaacccgggttantattttgaaccttgattcgatttccacc

SEQ ID NO: 428316 - DNA, 330 bp, Homo Sapiens
  misc_feature (242)..(279): n is a, c, g, or t
  misc_feature (299)..(299): n is a, c, g, or t
  misc_feature (309)..(309): n is a, c, g, or t
actacaaattctggttctagagttgtttaaaagtcatgggttttatagatgctcatatgtaaattaatctgttgtttgcttactttcttttcttttccatagaatggacttcctcataaatacagaacaggtcatcacatgaaaaatataagatcttggcatttttttccttgttctctcttaaaaatctatttctaatattgcattccccattgggattacttcatatggggtatgagggnnnnnnnnnnnnnnnnnnnnnnnnnnnnnnnnnnnnnntagactgggtctcaccactnggattcaccntaaaaatctccaaggtgttac

SEQ ID NO: 428317 - DNA, 489 bp, Homo Sapiens
  misc_feature (466)..(466): n is a, c, g, or t
atccttgcattctagaaagcttatttcattctcccatgtcataagtttgtcagctctgcactcagttgcctggggggatatggcaagtgctgtaacagaggctgtctttcatattttattttgaaccttttccactgttcaccatctctctctcgttttttaaggatcaagctagtttagtttacctaagaacataggcctatgggcatgactacaaacctctttctgttcctcttatgaaggccagtatgtcattttagagtgccctgttcaaatttaaatggggtgacaatacctcagacttgactgcctaggttgaattttttctcctgggttttctatggcagtgggtattttcaggtagaggctagaaagctttagcctttttcccaaggcttgctgaaattgtaggagttttgtcttaggaacgctttttctaggacactttaagaacttttaggaaggnttcaaacttattacccaaatttt

SEQ ID NO: 428318 - DNA, 409 bp, Homo Sapiens
  misc_feature (368)..(368): n is a, c, g, or t
tgtccagctatacaatatatcgcaaaatcctgacaagttcattgtattaaggtattaactattacatggaaagcaattctgttcatcttttgatgtttgtgttgaaaatgcttatctttgtgttttgatcttccaacagctgagagcttgaactgatttaaacatttgtcaatatacttaagaatgctttaagtaaagaaggggaaaattttaagtaagttttttcccttctaggaagaaaaactatgatgatgttaagaaaatgtcattatagagcttgctcaataatatgttctttaaatccacctccatttgtacattataggtatccattctgtttttgcttaaaataatctggcaaccatttncagatagttttacagcaaattgattctaaaagccactaata

SEQ ID NO: 428319 - DNA, 497 bp, Homo Sapiens
  misc_feature (420)..(420): n is a, c, g, or t
taactacaaatacaagatgattttctggactactattcacccagttgctatctcatttagattcctgtatctaatccagtagcaaattctgtaggttctgctttcaatatatgtactaaatcagacactttcccccctgtctttcaaacctctgttcacttccatcatttactgcctggcctcctgtattagcctactttggagcagcagctagtgttatcttcttaaaatatagaccatgttactcccctgctaaaaactgtagaggttctccatcacacttacattagaatcttgccttcccccccaccccttagctataaggccctgcattcatttggggatgcctacttctgaggcgcatctgcacttctctctctggggtcactccactgtaggccacactgttgctttgctgtnacccggaacaataagtgggttggaggttattccagtcacaggactttttcctccagtttgttggcatggttggtttg

SEQ ID NO: 428320 - DNA, 501 bp, Homo Sapiens
  misc_feature (37)..(37): n is a, c, g, or t
  misc_feature (279)..(279): n is a, c, g, or t
  misc_feature (404)..(404): n is a, c, g, or t
  misc_feature (467)..(467): n is a, c, g, or t
acttgagatatccgtttgacatggtcggccgcttggnagcaacccgaagttgggtgtcagccttgcccgcgtcgcaggatcctcgacgacgcggtccaggtaacgccgatacccggcattgcaccacgcgtcgaacctgtccatgagtggatgcacgatgctgcgcgggcccttgatgattccccgcaacaccaagtcgatgacgactagtgcgctgccgtgaagggccggttgcacgcccggcacgccagtatcgtcttgagccaagggggcacccgnaagtccggcttgggaatcgaccacaccggcgtgcgctgaaaagacggtcagcgtgccgacctcgggtgcgatggacggaatgatctgcaccgcactggctcccgttgccgattgattgccaactntttgggcccttcatgttcgttagttcgtggttcccagtcggtttggggcggtgttatttttgncctttgaacgaattttggggccagaaattccctt

SEQ ID NO: 428321 - DNA, 395 bp, Homo Sapiens
  misc_feature (170)..(170): n is a, c, g, or t
attgtttcagactgagtcatgcatactaaaattattacatattttcaccactttgacttagaaaatgcactagaaaaataaactttggtcaaaacaaacactgaagtacatgaatccaccatgtatccctatactcaaagccaaactgaatttcagtttgaagcaaggantgtgaccagtggctgaaacagtgccctaagctgggtcagagatttagctcacctcccactccatcagaggctcttgggtcagagaggtttcaagtattttcacttgtaacaggttcctacctggatatggccaggaagccgagggcatagcttacaaggtttccacagcagcagcatcttcactggcctcacttaaacctggctggccccggtgggggttggaaa

SEQ ID NO: 428322 - DNA, 416 bp, Homo Sapiens
  misc_feature (355)..(355): n is a, c, g, or t
  misc_feature (372)..(372): n is a, c, g, or t
  misc_feature (402)..(402): n is a, c, g, or t
ctgaaggctacagaagagaccacggagatgtgtgagctgccaaggtgccaatgatcaaatagagaagtctagcttggaaataaatcaaaaccatcagaggaattacattccacccctaggctcagtgggaaagagtttaagttcatgtggatcttgctgttccggagcaagctctgggctctaaaattgagcttatcttctctgtctttcatagggatagctaagcacccatgccccctaaggggatactttgaaatagggaaggatatctttatgttgtgtatactcggtttagtgggctttcagtctttgtggcaggatataggatttttctttggtaaggactttccctccnttgggccccctatgggntacagcttcaggaaaagctggaactttttncattttccattttt

SEQ ID NO: 428323 - DNA, 119 bp, Homo Sapiens
  misc_feature (66)..(66): n is a, c, g, or t
  misc_feature (84)..(84): n is a, c, g, or t
tcagccaccgcatttgggcctaacttaaatttttaaaacatttccgggagggggacaaacaggganccatttgttgggtttgantttggggtttcctgtttcaaagttttctgttttag

SEQ ID NO: 428324 - DNA, 470 bp, Homo Sapiens
  misc_feature (335)..(384): n is a, c, g, or t
  misc_feature (390)..(390): n is a, c, g, or t
  misc_feature (419)..(419): n is a, c, g, or t
  misc_feature (440)..(440): n is a, c, g, or t
  misc_feature (459)..(459): n is a, c, g, or t
ttttttttaacctcattattgggatacttaaataacagatttatgctgttgttgtttctactggtcggtgctcgctcactaatatccaatcctagtatgattttcttttacttgtgtctattaacagggttatgtcacaccctgtcaacctcaaaacagatgatactcatcacttgtcttccatcttgctgttctattatcttcctacaaaaataggctaatttgtcagatttcaaagccttgttatttactgatgaggcttaccaactgggaccttttgtatcttcagtgtgtaattctggaaggatggcattctggatacactaggtggaacnnnnnnnnnnnnnnnnnnnnnnnnnnnnnnnnnnnnnnnnnnnnnnnnnnggcggncgaacatagggcaatatggccattttccntcaccatccccatggcttgtncaagtggaggacaacaggnaggggttaagg

SEQ ID NO: 428325 - DNA, 446 bp, Homo Sapiens
  misc_feature (185)..(185): n is a, c, g, or t
  misc_feature (237)..(237): n is a, c, g, or t
  misc_feature (284)..(284): n is a, c, g, or t
  misc_feature (313)..(313): n is a, c, g, or t
  misc_feature (349)..(349): n is a, c, g, or t
  misc_feature (363)..(363): n is a, c, g, or t
  misc_feature (373)..(373): n is a, c, g, or t
atcaggtagtcatttattgaagcaaagggtgcacaaaggaagagagtaggaaagaaaggtgaaagtaaagactaggattataccccaaaggaccctttgaaattcatagttggataaatctacaatgaaaattgttaagcagaatttagatatttagggtatattcaaaagttttaaggcaggtntcttggaagacggttatcccatttcatttaatgttagaagcaggatgctggngtagatgggaccacagccctgctgcccaggggacttaacgggcaagncttcaggagttcaatgccatttaggcctnttgccctattaagtattaaagtctgggcctggggtnagcagggaacagtncttctcccgnttccatccggggtttacaggaaatttttcaggagggagctttttgacaggcttttttccctgttattgaaagg

SEQ ID NO: 428326 - DNA, 235 bp, Homo Sapiens
tttttttggtaaaatttgatagtgtaagagacatgcaaatgaccctaccttacttcaaaccttactaaaaagacagtatagtactgatgtaaggattaaaaaattgatcaatgcaacaaaagagggcacagaaatagacctgcacttaaaacagtcatttgatttttgactaaaacaccaaagtgatccaacgaggtaaagggaaaatctttttcacaaatgggtactgctggga

SEQ ID NO: 428327 - DNA, 256 bp, Homo Sapiens
  misc_feature (161)..(161): n is a, c, g, or t
ggagcactgggagctcgaacccggcaccatccgcaccgatgtcggccccggcaccatcgagatgttccggcagctgggcacgggcgacatcaaggccgtgtggatcatctgcaccaatcccgttgccaccgtggccaatcggcagaccgtcatcgaggctnagagacggccgaactggtgatcacccaggacacctaccagggacaccgcgaccaacggtaacgccgaacatcgtgctgccggccaccttgtgggc

SEQ ID NO: 428328 - DNA, 428 bp, Homo Sapiens
  misc_feature (334)..(334): n is a, c, g, or t
  misc_feature (357)..(357): n is a, c, g, or t
cattatttgcacaggtattgatttaattggcgttctgaatacaacttggatgagttcatggggtctaagggtctggccaccttggaagaactgggcacacatggcatgagcttcgtgttgggtaccttcagggatgtgttggcagactcagcaggtttcccttttcctggcttctcttgcataacaataacatacatttggaggatgaacaatgtataatagtgataagtgtaagctttttttctaaaatatttggtcattagtgtgaatgcagcatcttggtgggtgggtggagggattgttgttggttcagagcaaatgtccatgaatatgnagagaattgaaaataatacaatnaaaggatttttgtacatcccttatccagtgggagaagcctgggaagattttagctagccctggaatgtggc

SEQ ID NO: 428329 - DNA, 375 bp, Homo Sapiens
  misc_feature (202)..(203): n is a, c, g, or t
  misc_feature (213)..(213): n is a, c, g, or t
  misc_feature (221)..(221): n is a, c, g, or t
  misc_feature (245)..(245): n is a, c, g, or t
  misc_feature (248)..(248): n is a, c, g, or t
  misc_feature (339)..(339): n is a, c, g, or t
  misc_feature (346)..(346): n is a, c, g, or t
gggaaaatggtaaactccaagtttaataatgtgaccctcactaaatgcgtaggtataatgataaaagtagaactatctttcataacagaaagtgggggagtgaggggagtagggacagacagagaaagttccctgacttcatattatcatatatacggataatctgtattaccaagagtagcctagccttaaaagaagagannatcaccacantgggacancatgttgctgagagggtttgcggnggnagggtggtttccagatatccttcgtgaatgcaggtcacatgcaaagaggtatctcagggcccttttttcttcctttttggacaacaaattntacagtntaattagggctctgggacttgctcagggg

SEQ ID NO: 428330 - DNA, 119 bp, Homo Sapiens
  misc_feature (69)..(69): n is a, c, g, or t
  misc_feature (82)..(82): n is a, c, g, or t
aaaacatgaatgaggaaaactgattcacacagtaaaggacagttgccaaagtaatctggcaatgagggnaatcaatgaaggntctgggggttaggggaggtaatataatggaaaaagaa

SEQ ID NO: 428331 - DNA, 161 bp, Homo Sapiens
  misc_feature (104)..(104): n is a, c, g, or t
  misc_feature (128)..(128): n is a, c, g, or t
  misc_feature (137)..(137): n is a, c, g, or t
  misc_feature (149)..(149): n is a, c, g, or t
caccgggctcagccattatttaaggccagttttcaaataaggctgggagactttaagtttattagaccctattaattgacaactttgtttccaccttttgaggnttaaagacaatacttaaacccttnttcagtggntttttttccccntgcataaggggt

SEQ ID NO: 428332 - DNA, 519 bp, Homo Sapiens
  misc_feature (319)..(319): n is a, c, g, or t
  misc_feature (373)..(373): n is a, c, g, or t
  misc_feature (413)..(413): n is a, c, g, or t
  misc_feature (434)..(434): n is a, c, g, or t
  misc_feature (441)..(441): n is a, c, g, or t
  misc_feature (479)..(479): n is a, c, g, or t
  misc_feature (501)..(501): n is a, c, g, or t
ttttttttccatgttgttgaataagacttatgatttcacatactagactgcttataagttcttctagtatttggtattaaaagaggtgaaacaaaaactaaacaaggtgtatacagtctcaatacaattctaggttagaagcctagatgtgtgactggagatgcctcctgtccattcaatctgactccaatgtggttctgcagcactgggacaaagatgggagattgaaacaggagcccctgcgatgggggaacagagccaggggagcaggggttgggacaggtaagcctccatataccaagcccttcaactcctgggngttacagttatccctcctttgttcattaatgattcaccatgtacccactgccangggtgggcttttttaaacacttgcactctacatgaggggntaggaaaggttgacaaagacnttttccnttcccttcaaggaacccagggtttttaggaaaacaacnttttggaaccttttttttgggngcaggcattaaagttttt

SEQ ID NO: 428333 - DNA, 481 bp, Homo Sapiens
  misc_feature (449)..(449): n is a, c, g, or t
  misc_feature (465)..(465): n is a, c, g, or t
cagactagttcaaaaaaaataattcattgacctattaattaactttaatgtatagatcagctttcactggattttgcttcagtaacaacactctgtccccaaaatctcagtatcttacatgtataaaggtttatttcttacccacaatacatgccattcacagagtaggaagcctgcagttctcctctatatcagtttacatttctgaaccagggttgatgggaatcacctctttctagtagaagagggtaaaagggcagctctgaaaggcacacactcattcttccagttcctgctcagtgggcaggcatgtatcacttcaggctgacaatgggcccaaatgtttacatcagtttccattggggccaaaccagttcatagggggcaaatccagttttaactgtgggtgacggggtttaggcatggggggccagttttcagtttcccgntgtgggggaagtttgngggggtaaacccgtct

SEQ ID NO: 428334 - DNA, 374 bp, Homo Sapiens
  misc_feature (13)..(13): n is a, c, g, or t
  misc_feature (44)..(44): n is a, c, g, or t
  misc_feature (140)..(140): n is a, c, g, or t
atacatgcctggnagtttcactgaaatccacataggttacatcnaattgctatgtcttacgttatttcattacatagaaagcttatgaagatcaatacttagaattaagtttgtggatatctgaatcataactaaaaaanttcctaaaatgtaagaatgagtgatacatttcccataacctcacaaatatagcgtaatattttaagtcttcaattaattttcttttgttatcacatacaattactagtgtttgtgaaaccctaatttcctattcatgttctgtttccatttccctttcgggtttaatagcctctttcttccctgtttctaaggggcacatttatccttaaaggaaatctaaacttttgggccgg

SEQ ID NO: 428335 - DNA, 118 bp, Homo Sapiens
  misc_feature (87)..(87): n is a, c, g, or t
  misc_feature (103)..(103): n is a, c, g, or t
cattttagggaagttgaggaagcgcctttttccccgggccaccattcccattttagggaagttgagggagcgcttttttgcccgggncaacattcccttttanggaagttgaaggaag

SEQ ID NO: 428336 - DNA, 273 bp, Homo Sapiens
  misc_feature (192)..(192): n is a, c, g, or t
  misc_feature (212)..(212): n is a, c, g, or t
  misc_feature (233)..(233): n is a, c, g, or t
tgaactaccgcgcctggccccatgtattgtatttttttcaggttatattgaaatctactaccaggaatgtcggaatgggttttggtatgtataatggaaatagatagagtggttaagtctagaaacacatacattaattgtattgaaatgttatatcaatacatcatttatgatgttgtgtgtggtcccagncctcatgggccaccagtttnttttaagcatttgtgaatggntttttaatagcattcattaggctttaattggaggggggtt

SEQ ID NO: 428337 - DNA, 447 bp, Homo Sapiens
  misc_feature (94)..(154): n is a, c, g, or t
  misc_feature (400)..(400): n is a, c, g, or t
gaggaaaccgcataggcaattggtgtctttatatgatagcgctagatcgcatgaaatcttacccttgaactcctaagttctaataaacaataannnnnnnnnnnnnnnnnnnnnnnnnnnnnnnnnnnnnnnnnnnnnnnnnnnnnnnnnnnnnaagttgtgtttatgcttgggaatggatagaacaagacaatgcaaggaaatgagcattgtaaactatttaacatgaagcgaactacattttagtagtatggcacaaaagcctaagaagttctgatcctatttccttctgtcatcatcatgctgtggtcccattaagcagtatcagttgccaacactgtgattgtgtgtgaagccaaggcagagacaggaacaactgggagctagtggatttatcttncaccaacttcgcccagcaacatcctgccttttcgtagggggactttc

SEQ ID NO: 428338 - DNA, 356 bp, Homo Sapiens
  misc_feature (156)..(156): n is a, c, g, or t
  misc_feature (281)..(281): n is a, c, g, or t
atttgtgaaacgatacaaattttattaatatacaacgggaaatttgacagtttagggaatcaggtactcaatcttttgattctcttctgcacttatggtatatgagaagccagattataatcacatagttatttgataacacaaatatacaaagancaaggagtgctgattttgtaatgcagtgttcagggacatgaagacttgactgtgtactcattgggccatgtttcttaaaatgaagttcaagagtccctcaaaccagaggtacataaagcccgggntaaatatgacacatctgcctagggtaccaaagatttgggggaataaaaaggctaaataactgatttgggtaattt

SEQ ID NO: 428339 - DNA, 420 bp, Homo Sapiens
  misc_feature (171)..(171): n is a, c, g, or t
  misc_feature (398)..(398): n is a, c, g, or t
actatagcagaaatagacctgattatctacaagatgataaatagattgtctacaggataaatagtatgaaataaaatcaaggattatctttcagatgtgtttacttttgcctggagaacttttagctatagaaacacttgtgtgatgatagtcctccttatatcacctggnaatgaacacagcttctactgccttgctcagaaggtcttttaaatagaccatcctagaaaccactgagtttgcttatttctgtgatttaaacatagatcttgatccaaggctacatgacttttgtctttaaataacttatctaccacctcatttgtactcttgattacttacaaattctttcagtaaacacctaattttcttctggtaaaagtttgggtgatttaagntttattgggcgttttattaaaa

SEQ ID NO: 428340 - DNA, 515 bp, Homo Sapiens
  misc_feature (459)..(459): n is a, c, g, or t
  misc_feature (473)..(473): n is a, c, g, or t
cagttcagataaagattagagggttgattcaggtatcttattcctgaaatagtgatgtagcatgtggtacccaagaaaatatgcaacacttgtggaaaagggcatattgtgagctacgcttttaactttttattagacagatggaatgctctccaatattgattagctagatgaaaatgagaacagtttactacatggcacatttctaagttcagcattttgaatctgaatagtaacatgactgaattgaaagtgatggagccctgcagttagggacacgatgtctaatcttaggcattttatcttcaacattgtcccagttctcttgtgtagggaaaaggaaaaggcacagcatgacctcttccaagggacctcaaacctgggccagttttagttgggttattaacatgggtgacggtggaaaacagcctgggtaaatttcagggcctcccggggggnccttgaacccgttntacaagtctgtttctctgtgtttgatccagtgggctgacatt

SEQ ID NO: 428341 - DNA, 307 bp, Homo Sapiens
  misc_feature (217)..(217): n is a, c, g, or t
  misc_feature (221)..(221): n is a, c, g, or t
ttccaaaagtgtttatagctaatataaaatggatataacaaaaatatttccctcttttgccttaactaaagaatattttatttggttgtgagatatttttacagtgctcttagaggccctggataattatataaaactccaaattacacaaactgtacacttagattataaattatgttcatattgtgaattttctaagcaaataatgggaaacttnaaanattaatcaccatattcctgagaccttgattttatttttaatgtaaaggatatcctgctcacacttttatattcttttatatatata

SEQ ID NO: 428342 - DNA, 413 bp, Homo Sapiens
  misc_feature (18)..(18): n is a, c, g, or t
  misc_feature (43)..(43): n is a, c, g, or t
  misc_feature (51)..(51): n is a, c, g, or t
  misc_feature (73)..(73): n is a, c, g, or t
  misc_feature (91)..(91): n is a, c, g, or t
  misc_feature (112)..(112): n is a, c, g, or t
  misc_feature (140)..(140): n is a, c, g, or t
  misc_feature (176)..(176): n is a, c, g, or t
  misc_feature (189)..(190): n is a, c, g, or t
  misc_feature (262)..(262): n is a, c, g, or t
  misc_feature (276)..(276): n is a, c, g, or t
  misc_feature (297)..(297): n is a, c, g, or t
attttttttccctgaggntggagattaataaagagagaaacantagtttgntgtgtgagattattccaaaganaagagcccattttttgantggaattccagccagagggtngaggggctaatcctaggaactaggtttnagaagaaggtaaaaggccccgacctagccctttttntccctttttcttnntttatggtatctacattgaaaaacacaaaatgggaaagccatttatctctcaggccactgggcatggctctntgatcctccgaganatagcccttggagcctgagantgctccctgattgactctttactgaaaaactcaaaaataaatgaaactcctagagcctgggattaatcttattttttgtttgcagagtcacatgtgggaagaagtatgtcattttc

SEQ ID NO: 428343 - DNA, 227 bp, Homo Sapiens
  misc_feature (44)..(44): n is a, c, g, or t
  misc_feature (55)..(55): n is a, c, g, or t
  misc_feature (88)..(88): n is a, c, g, or t
  misc_feature (146)..(146): n is a, c, g, or t
  misc_feature (194)..(194): n is a, c, g, or t
ccttgccttttcttccattgcctacttgcattcctttccaactntgcagaactgnttccattatctcaactgcaccatgctgttatanatttccttggctctaatacctgactattttttggggatgcccttaactaacctctgtnttttgattgccggggggaaaactaacccccatttttgcaggatcccgntaaaggttttaaccttttatggggagggttttt

SEQ ID NO: 428344 - DNA, 464 bp, Homo Sapiens
  misc_feature (47)..(47): n is a, c, g, or t
  misc_feature (100)..(101): n is a, c, g, or t
  misc_feature (394)..(394): n is a, c, g, or t
  misc_feature (405)..(405): n is a, c, g, or t
  misc_feature (425)..(425): n is a, c, g, or t
  misc_feature (436)..(436): n is a, c, g, or t
  misc_feature (453)..(453): n is a, c, g, or t
gttaacagagcacagaccacctttagttagatgtggctttcagcttnttagggaaagactcgaacaaattttcatctattcaagagcatgctgcttgcanncttctttatggtctcctaggagcataacttggaatgtacaggaatatttgtgtcctaaaaaaatcagctgcccttccaatatcatttttataacgttatggtttaattcaagttatacaaaggtgtgactcaaggatgtgcaggtattgactgatggaggccaacaaggaaaatattttttttcagtgagcccagagaaattagaaatcttcaccaatgtcagtgactgcatggtttccaaaaattcacatagtattacctcacagtagggaaggcttctttccctttagggntcagagaacanttttacaggaatcaaacccntttacagggtnggcaccccttttctgtngggctttgatc

SEQ ID NO: 428345 - DNA, 352 bp, Homo Sapiens
  misc_feature (251)..(251): n is a, c, g, or t
  misc_feature (338)..(338): n is a, c, g, or t
agagttacacgttgttcatttatttgaaactgaaacgtatttcctccaaacaccgtagaaacttaaaggccgcaaaagactcacacccaccacctagcggcgaaaaaaggaagtttcaggtgatacaagatgtcctgccatcacacctgaaggatggttgtccacagccattttttaaaatctcgtattagtcctcttccttcaacactcagggacagtattatgtacccagaaactcaatacttcctggngtcttcatttgacaatactcttaagccaatggaaatcctgtgggacgtttgcgaattttataaaggtcaatgttttaaggattgggngggtgggctgggag

SEQ ID NO: 428346 - DNA, 377 bp, Homo Sapiens
  misc_feature (92)..(92): n is a, c, g, or t
  misc_feature (201)..(201): n is a, c, g, or t
  misc_feature (320)..(320): n is a, c, g, or t
  misc_feature (361)..(361): n is a, c, g, or t
gtctgattttctgcttgattatcagctggatctattgcttggagggcactgtcatgatctcccccaccccatctcatctcagattgtgtggnaaagaaacatcttttattaatctattcatgaacataaccctagtcttactttgtcagcgagacaaaggggaaaaggactgggctttcagtagagccaaattttcctggngtttgcttcaactgtctatttttctctttagtagttgcaatataaaaacaaccctttatttttcatataaacatcaagagtcttaggcaaatgcttaggctccccctggacatattttngcattcatcttaaattatttcctaaacttgttggaaatttntggggggattccaatc

SEQ ID NO: 428347 - DNA, 425 bp, Homo Sapiens
  misc_feature (309)..(309): n is a, c, g, or t
  misc_feature (324)..(324): n is a, c, g, or t
  misc_feature (330)..(330): n is a, c, g, or t
  misc_feature (360)..(360): n is a, c, g, or t
  misc_feature (387)..(387): n is a, c, g, or t
tttgagtagctgtagcaatttctgaaaataagataacaacgaagtttgccacatcgattgacttttctttcacaaaagtttactcagtagcatatgatgctatttgatagcattttatctacagaacttctttcaacattggaatcaatcctcttaaatgctactcctgctttatcaactaagtttatgtaatattttaaatcttttgtgggcatttcaacagtgctcacagcatcttcaccagggagtagattccatctcaagaaaccactgtctgctcatccataagatgcaactcctcatccattncaagtctgatcatgnagattnccagtcaatttcagtccccatcttgcaggnctgccacttgttaatggcttagttgcnctttgctgattttgcggcacaccttgcagttacttggc

SEQ ID NO: 428348 - DNA, 192 bp, Homo Sapiens
  misc_feature (125)..(125): n is a, c, g, or t
  misc_feature (143)..(143): n is a, c, g, or t
actgcacccgggcctgatgatgttacctggggtcattcgggtgtatccagaggcaaagggaaagatgaatgggttgctgcctttagggagcacagtgagttggggaagggaaggaataacatccngggtttgattgacaaaanttaggacattcctaaacaggtttgttaaaacactgggggtttttttggg

SEQ ID NO: 428349 - DNA, 365 bp, Homo Sapiens
  misc_feature (194)..(194): n is a, c, g, or t
  misc_feature (235)..(235): n is a, c, g, or t
  misc_feature (320)..(320): n is a, c, g, or t
  misc_feature (332)..(332): n is a, c, g, or t
attttaaggtatctttaaatataaattgaaccccagaggcagaaaagtcatctacccaacaccggcacattttaaacatgattaggatttgtaggtcaaaatcccgtaacaaaaaagggaagtttttggttgtttccaaaacaaggaaagcatgttaaacagaatcttgtgacttaaacttcactcaagtgagncttaaaactgggcataattttgataccaaaagtaagctgantaaccaatacaaaaaacaggaactaactgggagtttttctcccccaaaacataggtcccaaatccaaaacaacttatataagggntggcaagtaacngggaaaaggtcaaataaaacaacagtgggttcc

SEQ ID NO: 428350 - DNA, 452 bp, Homo Sapiens
  misc_feature (332)..(332): n is a, c, g, or t
  misc_feature (359)..(359): n is a, c, g, or t
  misc_feature (425)..(425): n is a, c, g, or t
  misc_feature (433)..(433): n is a, c, g, or t
ttttttttcctcctgatgcacaaaacagatagatactcacatttttaaaataagtgagaaactgtctgaatgaagctagcaaattgcatcttattcatctataacattgctcagtaataaaaatatggtataactagacatttcagcagaaataaaactatcataaattataatcattcacatggaaaaaattcttattaactcagttttggggatgcagaaaccagatatctggccccaggattggccacttacttgctacatatgattgagcaagtcacataacactctaagcctggaatgttctcaactgtaaacatggcaaggaaaantaatactctcttttaggctcacagcantactgtgaggggttgattaggaaaatgttctaaagtgggtcatacctttaaaaccttaggtcggantaggggantttaaatgttaccaaactt

SEQ ID NO: 428351 - DNA, 410 bp, Homo Sapiens
  misc_feature (369)..(369): n is a, c, g, or t
ttacttaccttgtttaattgggtttcagagtttaatttcgaatgctttgagtgtattttccaccactggagacttagtgtccagagagtccttgattttctttaccacaattgggaaatccattagacactacaaatgtaggtacttgagtgcttcgagtatagctagtatttgtgatactcttcagggataacaagttctatgagttgtgtggaagaaaatagtatttagagcagtgcctgtgaggagatggttattcacagcaaaaatttatatatgtttgtgttgatagtttcagtaggcaactgccttcttggtagtatggaatagggaagtactcctagtgttaatagtaggtaactagtggcnccttatgtatatggtttaatttgtaaggtaggaaccaaagc

SEQ ID NO: 428352 - DNA, 572 bp, Homo Sapiens
  misc_feature (429)..(429): n is a, c, g, or t
  misc_feature (472)..(472): n is a, c, g, or t
  misc_feature (494)..(494): n is a, c, g, or t
  misc_feature (528)..(528): n is a, c, g, or t
  misc_feature (538)..(538): n is a, c, g, or t
cccaactcagaaccgcacagatgccctgcagttccacctctgcatggtagccaaagagagtcctctaaatgaagcaatctctttgagcctctcagcatcctcgcacttccagcatcactcaacccagaaacaatagaatctacaaggggactccctacatgtttcttatgaggtcagaattgccatcctggaaaggtgagttacagtgctgcccaggtgattcttgtgtgttactctatgttatatctattgtataatctcacatttaaatagcaccattccttttattgcaatgcttatgaaaactttccttgtttttaggtttccttcgtcagtccagggcaggactgtgcggttgggaaaagggacggatgctggtcctggaagggcgtcgttatctaggaagctcccaacctaagtggggtggantcataggggaggggcaaggagagaagggacacaggcaagcaanttacatgttaaaacaagacttntgggttttttatgggaggaatttcacaaccaaanttggggtttngcccttttgtttttcccaggaccctttgttgggc

SEQ ID NO: 428353 - DNA, 572 bp, Homo Sapiens
  misc_feature (312)..(313): n is a, c, g, or t
  misc_feature (430)..(430): n is a, c, g, or t
  misc_feature (452)..(452): n is a, c, g, or t
  misc_feature (467)..(468): n is a, c, g, or t
  misc_feature (482)..(482): n is a, c, g, or t
  misc_feature (499)..(499): n is a, c, g, or t
  misc_feature (508)..(508): n is a, c, g, or t
  misc_feature (558)..(558): n is a, c, g, or t
agctctggcagcagctactggaggatccggtttcccccacagtctattctgcttagtttttctgcttttaaataatagaatactgagactctttgaaaatacttaaagacattgtttcctgatttgaaaactctgctgtcctaataataatgatagtgatggtaatagtaatggtgttttctgtgattatatattaatatgttattacatcatatgatattatgcaattatgtattcatttaaccataacaaccatcaatattacatcttttctcaattgaggctctttgggataggtgtgcttatgcactnntacaaatgaggctaagcagcgtgtccaaggtccctgtccagttattgcatttgggatccaggatgagccctgctccaaagcctcgtggctctctggccagcatgtggatggctaccncttttgtttgttttaacagatnattaacacatttgtnntaataacctgtttncaagggcaacccactgngggacggtntcgtgaaggtggcttgcgtctcgggggaatgggacgggaccgtttaatcnggtttggggggccc

SEQ ID NO: 428354 - DNA, 342 bp, Homo Sapiens
  misc_feature (306)..(306): n is a, c, g, or t
tgcatttgggcattactccagaattcccctcacccctatcagactttcaaaaatgtctaaaacataatggctaagagttctataaaaaggtctctggacagcaatgtgaccagccaaactccaggagttctattatagaagggaaaggggtcattcatgtttttgtgagcaactagtagtttctgccattgtttctgatgcacatttttctttttcattgtcttaggaggcttacattgttctctgtgggaataagggataaccaggattaattaattacatttttcccatctggcactggataantattggcatttttgcctcttaaaaggaaactgagga

SEQ ID NO: 428355 - DNA, 450 bp, Homo Sapiens
  misc_feature (418)..(418): n is a, c, g, or t
agctttccatttttatttgcctgttccaaggctgatgtcgcttgggtcctaagtgctctcatagcagtcttctgcctgcagaacggggagaagtaatgaggtcaatcccagagtttgtaaatacaggcagcctgaagacaatatacagaggagtgtttcaaaggtccactctggtcaggcatccaagctttgattctcggctccactctttctggttttacgacttgggcaagttgctggatctacttgaaactcagtttctggcacctgtgaaaacaggggtaatactacatccaagttgctgtgagggattaaggaaaaatctcccacctactaaaatttgcaatcccatgtttaggctctttaggcaggagagtttttggcacagcagtttaaggattgatggcccccgggagtncaggttaacccccgttttaaaatcccagcatt

SEQ ID NO: 428356 - DNA, 414 bp, Homo Sapiens
aactattgggaaaagtggatttcacattccacagttgtcaggtcaggttcatccatcagccccacaaactcacatgtcggcactatctgggcaactaaaataaaagaggggaaagagatcatttctccccagatatcattctcatggcagacttgaatatagatacgctgagttatccagctctctcactctgcctccttttggcatgcccaggctgtgcccgtaaagtgttgaatcactgttatcctaattttcttagtgttttctaccgtgggccactgtgatgaggggctggcaaagagcagcctcgtgccttccgagaaggctgccaggagcctctggaagctttgaaggcgaggcacacattggccttccttgtgccaaagcccttgggccaggcctccccacattcct

SEQ ID NO: 428357 - DNA, 352 bp, Homo Sapiens
  misc_feature (328)..(328): n is a, c, g, or t
  misc_feature (338)..(338): n is a, c, g, or t
catggaaaacatttttacttgaaagtactgtaaacagtttactgtaaataaagacaaactattatccagaagtgggtatctgcagatattttcttgaaaatgaaaaaaatgagactgtcacttcaagtaaaacgacagtatttatcgccaacaataaaattttgtctttcaagtgataattaggaattttgggaaaacttgtatcttccaacttcaacttgatcgatacccaaaacttaaaaacttttctgagattagtggtgatttttaaaatactgcataataaaatgaggacatctaggaggatctgcaggactcgggggaaccngtattttccnaactaccattggct

SEQ ID NO: 428358 - DNA, 430 bp, Homo Sapiens
  misc_feature (396)..(396): n is a, c, g, or t
  misc_feature (412)..(412): n is a, c, g, or t
agaactcacagttctgaaataccaaattgaaaccttttagttgtttgcagatcattttgccatgttttctcagttcagcatgcacacaagctaatctttggaatttttacttggaaattttccggcctgttgggttctggtatgctttcctgaaaatgtgtttttgtgcttatgcttattgcagtaaactagaactattcatttcaagcatttgtaccattctttggtgggacttctatagacaaccccgtgttgactgaaattatttttagttctaagtataaaaaccttaaaagtaggataatccatcacttttcatcttataaaactggaacagtacacccatttaaaccctattctcccctccccccagcccctaggcaaccacaattctantttctgcctctctggntttggactactctgggta

SEQ ID NO: 428359 - DNA, 417 bp, Homo Sapiens
  misc_feature (55)..(55): n is a, c, g, or t
  misc_feature (67)..(67): n is a, c, g, or t
  misc_feature (128)..(128): n is a, c, g, or t
  misc_feature (131)..(131): n is a, c, g, or t
  misc_feature (275)..(275): n is a, c, g, or t
  misc_feature (311)..(311): n is a, c, g, or t
  misc_feature (402)..(402): n is a, c, g, or t
atagtggcaacttgattaatgaagctctcatatacaacctcacaaacaaaaaganactttattacgngaaatagtagcatatgtcattgggtttaaaagcaacatgcctgcaaaacatatgataaaanatncctctgtaagggtttttatttgtccaccttcgatggaaggtaaacatggctgatcccagccaagatgagacaatagccctttgtctcctcagagcaacctatctccaactctttgtccactgttcttaccccaattgaaaacangagagcatgtgctaatccttttttaatttttatcancctgccttggccttcctttcactgtactccattattccttctgtggatgttctaccttcttcaccgttgagaccggggtgagttggggagncgtttgcctaacttc

SEQ ID NO: 428360 - DNA, 122 bp, Homo Sapiens
  misc_feature (52)..(52): n is a, c, g, or t
  misc_feature (105)..(105): n is a, c, g, or t
gaatgctggtctacaaagtacagttcaataaatctaaaatcttacctgttantagttaaaaatgagggggtatccctatggcaggaggattgaaactaggacccngttttgggtcagggttt

SEQ ID NO: 428361 - DNA, 548 bp, Homo Sapiens
  misc_feature (187)..(223): n is a, c, g, or t
  misc_feature (225)..(225): n is a, c, g, or t
  misc_feature (383)..(383): n is a, c, g, or t
  misc_feature (443)..(443): n is a, c, g, or t
  misc_feature (452)..(452): n is a, c, g, or t
  misc_feature (496)..(496): n is a, c, g, or t
  misc_feature (501)..(501): n is a, c, g, or t
  misc_feature (506)..(506): n is a, c, g, or t
  misc_feature (516)..(516): n is a, c, g, or t
  misc_feature (538)..(538): n is a, c, g, or t
cttttttaaaagaatcaattattgaccttgagaaacttgcctgcttcatcagtatagtaacctatctttaagatattttaaaacgtgtatacctttattaacattatcttgattccagcggtggatcagtatgataatgcagatttatgacatccatataagctatctggtaatatagatttaggannnnnnnnnnnnnnnnnnnnnnnnnnnnnnnnnnnnntnctagatagattaaggagaaaaagctcccataaacttagtttgtcaaataaataccatatatttaaaaaatgcacagacatttatcattcagagtcaggaatgaggattcaaggtaattgccaaaggggaagttgtctcttgggggtaaacaatacacnttttataggcttcttgtggaaactaattttttcccttcctatattgtgggtatgggggcnggtaaaggntttaaaatttatacggccttattttaaattacctttaaccgtgnggcgnggggnccccgggggnttttaatttttgggccctttcntgtgggtgtc

SEQ ID NO: 428362 - DNA, 415 bp, Homo Sapiens
  misc_feature (258)..(258): n is a, c, g, or t
  misc_feature (377)..(377): n is a, c, g, or t
  misc_feature (383)..(383): n is a, c, g, or t
  misc_feature (403)..(403): n is a, c, g, or t
ggcagtttgacaattcctttttaatagagttaagcctaaagacagatttagcatgaatacacatttcacataaatgttcgcattcctttatttcacactgtacttgctcctctgcatagatagtattagcactaacatgcttactagtcacatgcctgaagtaatttctaaattgcacaaaatgcatagtggtgttggtgggacttaaagatactaatttatatatcagggaacaaaaaacaatgggaagtaaaagantaaggaaataggttacattaaactaaaagtggcagctcatccttcatggtggggccacaggaaggcacccattggcaatgaaaaatgtggctggatatttaacactgttatcactgggnttatcnttgttcgggagggtgggganatacagttaaaa

SEQ ID NO: 428363 - DNA, 514 bp, Homo Sapiens
  misc_feature (66)..(197): n is a, c, g, or t
  misc_feature (290)..(309): n is a, c, g, or t
  misc_feature (406)..(406): n is a, c, g, or t
  misc_feature (419)..(419): n is a, c, g, or t
  misc_feature (440)..(440): n is a, c, g, or t
  misc_feature (471)..(471): n is a, c, g, or t
  misc_feature (494)..(494): n is a, c, g, or t
tgataggtgacagagatgggattcaaacccagacattctttgcctcaatttcctcatcaattacannnnnnnnnnnnnnnnnnnnnnnnnnnnnnnnnnnnnnnnnnnnnnnnnnnnnnnnnnnnnnnnnnnnnnnnnnnnnnnnnnnnnnnnnnnnnnnnnnnnnnnnnnnnnnnnnnnnnnnnnnnnnnnnnnnnatttaaaaaatttttactatttgcataagttccttgcagctttaaaattctgtgatttcctgactacccagggcccttggggataatagttgnnnnnnnnnnnnnnnnnnnngagacagtttcactcttgttgcccggggtgggagtgcagtgggcgcgatcttgggctcacgggcaacctctgcctcccgggttcaggcgattgtccngcctcagcctccngagttgcgggggattacaggngcgtgccaccaggctggactaatttttgtanttttagtagagagggtttcgccnttttgggcaggggtggtctt

SEQ ID NO: 428364 - DNA, 456 bp, Homo Sapiens
  misc_feature (265)..(265): n is a, c, g, or t
  misc_feature (376)..(376): n is a, c, g, or t
  misc_feature (381)..(381): n is a, c, g, or t
  misc_feature (412)..(412): n is a, c, g, or t
  misc_feature (423)..(423): n is a, c, g, or t
ctgctttgaaacacagatttcaacaaatagagattgcccatcaaagatcagacaccttcagaacctgatccaagtgaaggctttgagtgtgagcagtttacttaggaagtgatccaagaatgtggtaggtaggaagggaagtaggacagggtgtagaaggaatacagtaaagggtgaattatttaccataggcaacctaagcttcctctccacggggcactcagggagctagcgtgaagcacacacacctcagaactcctcgctngaggggggttaagggtgttcaagtcagtctttgtctgcagctgttcctaggcgtatctggtctgcatgctgggcggactttgctcttgagcccagacacagccttagggtnaggangttttgggagggctttcagaagtttgagctngttttcccttnaaacagcctagcacaagaaattcaaggttggga

SEQ ID NO: 428365 - DNA, 480 bp, Homo Sapiens
  misc_feature (119)..(119): n is a, c, g, or t
  misc_feature (128)..(128): n is a, c, g, or t
  misc_feature (423)..(423): n is a, c, g, or t
  misc_feature (436)..(436): n is a, c, g, or t
  misc_feature (466)..(466): n is a, c, g, or t
atgcgaccatgtgacttaatacacagcagataccatcacaaccattaacagtaatcaatgctgcctgaattctcagtttgacattacttctaggtgttgggaagcaattcttttttttntaagctttnagcttcctccctccaacaatgcaaaattttccttctctggattcccagactctagcagactataatgcagttagctttccttaataaagggtcatgatgtaacaattgagacattatccccctgtgccatctgttcttggcccttcaaagctttttcagaggtagtctacacaggccttccttccagaaagctacctaaggctatcttccttctgttcatgggcctaaccccatctcctaacctgttaacacttctcacactcacatgacatttttagggtttcccaccgggggngctcttcatgatnaaagctgttttccgtacaagtaggaggccntttgggaggctgtc

SEQ ID NO: 428366 - DNA, 407 bp, Homo Sapiens
  misc_feature (78)..(78): n is a, c, g, or t
  misc_feature (89)..(89): n is a, c, g, or t
  misc_feature (116)..(204): n is a, c, g, or t
  misc_feature (322)..(322): n is a, c, g, or t
  misc_feature (396)..(396): n is a, c, g, or t
ccccttttttgcttttctaccaaatactgcttttaacacaggcttttcactgagtagtggacaatctatcagctaggngctattcagtntgaggggcatttgcaaaggtctgcatnnnnnnnnnnnnnnnnnnnnnnnnnnnnnnnnnnnnnnnnnnnnnnnnnnnnnnnnnnnnnnnnnnnnnnnnnnnnnnnnnnnnnnnnnctcaggatggtgcaggtctgaatatcttagacacagcggccaccgtgtctactgcacgggactgaatattttagacacagcggccaccgtgtctactgcacgggacggcgagggtttnaatatcttacagacagcggccaccgtgtttactgcacgggacggcgagggttcgaatatttcagacacagcggncacggtgtttt

SEQ ID NO: 428367 - DNA, 243 bp, Homo Sapiens
  misc_feature (113)..(113): n is a, c, g, or t
gtaatagtatatgatagcatagtatatgatagcagtagtatacgatagcatgtgtgtgagtccattttgtattgccataaaggagtacctgaggctgggtaattaataaaganagggggtttgtttggctcactgttctgtaggctgtacaagcatggcactaacatctgcttggcatgagcaccacgcccggccagaattttatttttagtgactaggctttcctttaaaacctctgtacta

SEQ ID NO: 428368 - DNA, 570 bp, Homo Sapiens
  misc_feature (448)..(448): n is a, c, g, or t
  misc_feature (471)..(471): n is a, c, g, or t
  misc_feature (509)..(509): n is a, c, g, or t
  misc_feature (512)..(520): n is a, c, g, or t
  misc_feature (551)..(551): n is a, c, g, or t
ttttttttaaagcagggagtaagggagagagaggaaacccaggactctgccctggccactgcagacctgcagaatgagctccccgggggcatcctcccttttaatgccagcagggagaagggaaataggtcaaggcagcagctgagttttcagctggggctgtccagcatgaggacatcatttttcaggcagcagcaaagagcaattctaatgtgtcagaaaggacaaaggggtcatcgaaaaaggccttagaaatgatcaccaaacccacatacattgcccctgtcctcagaaactgtacctcctacagcctgggaactgtgaagacagttaaactatggacactgatctctttaaataattaccttatgggccctttaaggactttcgggtttctccaacacaggcagtgaaaacattgttttgcagggcagcaattggttcagtngagtatgtgctgggtaggttgcnttttgggaaggaaagttgaggaggagacttgaattcantgnnnnnnnnncaggaacagggggcgcaaaaagggaagggtnggtttgggtttgttaggtc

SEQ ID NO: 428369 - DNA, 413 bp, Homo Sapiens
atgatattcacataggttataatttattgaagttccagtataatataggaatactagatagataattagaaagcagatcatataagaccagactgctaaatcaataaccattgctgaaccctatttcctaatgccgataaaaatgggctaagtgaagactggataacatttttcaagttcctttcagctctcaagctgcagtacttctagtggagatagaagacaggagacttttccttaaatactctagacctgatcagaccctgccagcagatgataacccagaagttaaaataatcattttcctctgtggggcattaggcttttgtggaaatatacatattaaataaacacacaaaagtaggctctatgtgtgtgttacacatatttggaaaccttccggcattgtctta

SEQ ID NO: 428370 - DNA, 360 bp, Homo Sapiens
ttgtctgccagtggaagctccatgaacaaaagatagtaattatgccaataaatggtgaaagagcttttggatatttatccaattattttataaatataatgtgcttgaaagaattgtccattgctgaaaatatgaacaaaataggaagtttttttgctgctggaatttgttcatggactttctaggtgctctacttttctccccccaacaggtgctctgctgcgcacagcaaactgaagcgcattgctttggggataaagcgtctcctggacagataaccctcttcagaccaaacctctcctcctgacattctgttctgccatcttatcgtagggagatggtctatctaagataggtttt

SEQ ID NO: 428371 - DNA, 417 bp, Homo Sapiens
  misc_feature (293)..(293): n is a, c, g, or t
  misc_feature (371)..(371): n is a, c, g, or t
  misc_feature (389)..(389): n is a, c, g, or t
attatcttaaacaggttaaaagtgcctatgataaggacttaattatttcctaaagaaaagcaaaaaatgtggggaacagggtagtgttatactatcatctcaggtactgcctatgttcaagaacatagacctggtatggtgagaacaaaaggttcctatgccaaatccagatggctatatcatttgttggctacaagtgagcctgactgcaaggtttgcttctgctgagaaatcccatggtgagagtagaactcatgaagtgctgagtcacatttgcacctctggtgtgggtngcagttcactctcccctgggatgctgtcagctgggccttgctttcatcctatccctgtagggcagggtaggttggctnggtagggagaagctattnagtgttatgacgcagacccaagctttcc

SEQ ID NO: 428372 - DNA, 418 bp, Homo Sapiens
  misc_feature (405)..(405): n is a, c, g, or t
gaaggaataagggacttgatatttatctagcatcagcaatgtgtggacatcgtgtgaacggctttataaacatttcatttaattctctacatctagccattttttaacctgtgctttccctccctctcaaagtactgtttatacatttattagtccatattttaaacgctccatgctctcaactgtattaatgctatttgttaggataagtggcagatgtccatggaaaataagtggctgcaaagtggtaatgctgaccagatgagaaaagaagtgtaaaagggaagttctaaagattaaagccctgggagagggtgggtagacaacaccagtcccaaaatagtgctcttcattgagggctgtgtagattttcccgcttcctggggaaacttgggggcatatttnccacttgcatgtg

SEQ ID NO: 428373 - DNA, 470 bp, Homo Sapiens
  misc_feature (397)..(397): n is a, c, g, or t
  misc_feature (425)..(425): n is a, c, g, or t
  misc_feature (444)..(444): n is a, c, g, or t
  misc_feature (458)..(458): n is a, c, g, or t
cctgggccttctcaccaactagagaagcgctgatgtcgttcattgaggcacttaaacaccagtcactcagccaggcctcctcccagacattctgtaacatgtcagcactcacaaggtttaaagcaaatgtgttcccttgcagagaggaaggtgctctcagactgatagattagaggagacagacaaactcgtaatccttggggacttgaagagagtggctaggggaagggctgttaaaagaaaagggaccaataagaaaatccatctaaaggtagctcttgaggaggaaattaacttcttgaggggataaattagagggtaccaagtttatgttctgggatgtacccgggggagggcgctgccacttgggtttggtcccagttggacttgaaaggtnggtgctcttcgagttcaggcgtttagtncccagagagagcttgggtncccccgggttcctnggtttttgccca

SEQ ID NO: 428374 - DNA, 453 bp, Homo Sapiens
  misc_feature (408)..(408): n is a, c, g, or t
ttccttatatttgcttattcagtaatttagttacttgctacttacatttggtattaattcactaatttcagctaattaaaatcaaacgtacaataatatcctaattttcttgtaatagctactaaaatatagttataatagagaagtgtgttcaagtagttaaaaattaccacaagatttatgttcacaaattttcctatgagaatttttcgtctccaaacgttttgagagaaaaaataaatttttctgcttagtaaatttctcaaccttaaaacaagatgctgggcctagggctagggagagggacttcttagttggaaggctcctgcttctctgggacaactttcctcttccttcttggcaaatgctttgcagaggggacttggcacctctggctggctgggaccngggtcagggaggcaagagggaaattttaaaacatttcctcgggga

SEQ ID NO: 428375 - DNA, 486 bp, Homo Sapiens
  misc_feature (85)..(85): n is a, c, g, or t
  misc_feature (137)..(146): n is a, c, g, or t
  misc_feature (233)..(320): n is a, c, g, or t
  misc_feature (420)..(420): n is a, c, g, or t
  misc_feature (430)..(430): n is a, c, g, or t
  misc_feature (447)..(447): n is a, c, g, or t
  misc_feature (455)..(455): n is a, c, g, or t
  misc_feature (465)..(465): n is a, c, g, or t
tgaggttgagaaacgctggtataattaccagtgttttcttttaatactttgctatgtatctctattttttgaatcctaaccactngcccaacagggaatgtaactgtatttactctggtggcttatttaaggtaggnnnnnnnnnngtgtgtgtgtgtaagttaactgagtgttgagtgcacttcctaaagagtcatccctttcatcactaatttgcagtgtcacttttactnnnnnnnnnnnnnnnnnnnnnnnnnnnnnnnnnnnnnnnnnnnnnnnnnnnnnnnnnnnnnnnnnnnnnnnnnnnnnnnnnnnnnnnncctatatttggcatttattttcagggccatttatcttaggcgacctttctattttccccactggtaactattattggtttttgtgtcttccatcttatantttcaggtcnggataaccaaaggcccnggactggnggtttattcnggaccccaaagggtgttgggg

SEQ ID NO: 428376 - DNA, 263 bp, Homo Sapiens
  misc_feature (41)..(41): n is a, c, g, or t
  misc_feature (54)..(54): n is a, c, g, or t
  misc_feature (153)..(153): n is a, c, g, or t
  misc_feature (204)..(204): n is a, c, g, or t
ctcccaccctgctcctggtttctagggaagggaaaccaggnaagttcacttggnaagacgtttcctaggttttctcatcagatgaagccatgggaacgcccagggaagtccatactcttcaaacccctttctggcccacttcaccttcaggtnccacagcacttttccaggcgttcatcttgaaataggcaaagggtgatgtgncaggcattcccagtggatgtgtttcctgtgtttatggaggaagggagtttgggggtttt

SEQ ID NO: 428377 - DNA, 181 bp, Homo Sapiens
  misc_feature (131)..(131): n is a, c, g, or t
atatgatcctaaaatgtatacagaaccacaaagacccaggaataggccaaagctattcctaaggcaaaaaggaacaaaactgggagggattcacatttacctggactttttaaataattacttacaggggntgtttgtttaacccaaaaccggctggggtactggggccttaaagggcggg

SEQ ID NO: 428378 - DNA, 562 bp, Homo Sapiens
  misc_feature (365)..(365): n is a, c, g, or t
  misc_feature (372)..(372): n is a, c, g, or t
  misc_feature (432)..(432): n is a, c, g, or t
  misc_feature (450)..(450): n is a, c, g, or t
  misc_feature (469)..(469): n is a, c, g, or t
  misc_feature (478)..(478): n is a, c, g, or t
  misc_feature (512)..(512): n is a, c, g, or t
  misc_feature (520)..(520): n is a, c, g, or t
  misc_feature (530)..(530): n is a, c, g, or t
  misc_feature (545)..(545): n is a, c, g, or t
ttttttttctacctgatttcatcacactttcttcctcagttttacagagcacaagatcagataccgtacggttcagcatcactaccttaggggccacaaagagagtgaaaaaggagtctccccagttcagagccaaatgccccttccacccttgcagtcctgccaaggttcctggggtctcacgggagagaccctagctgggtggtgccaacccaagggaggatgaccttgagagggcccagagtgagttctgccctgggtctagccagggtgcgactctcgctcttttcactatagagtaaaatgcaaacagggagctcagagtcttcaggggaccaaggaggtatgggctgttcaccctccantgtggantattccccagaggattaaggttttccttttttcttgaggccacaacagaggatttaacanctattcagttccttaacntttgaggaacaaggggganttaaagggnaggaaaggggaaccaggttttcatttgaggcagntgttgttnttgcaggttnatccggtttaaaagnttttaacaacctttttt

SEQ ID NO: 428379 - DNA, 341 bp, Homo Sapiens
  misc_feature (149)..(271): n is a, c, g, or t
  misc_feature (276)..(276): n is a, c, g, or t
  misc_feature (309)..(309): n is a, c, g, or t
aaataagacttgcttgaacgcaagcacggcaataccacaacagccaatctgagggttcctgagtgactagcaagcaggcaggtagatggcgtgagtacactagacagatgattcatgtccgggagatggagtgggatggcatgaaattnnnnnnnnnnnnnnnnnnnnnnnnnnnnnnnnnnnnnnnnnnnnnnnnnnnnnnnnnnnnnnnnnnnnnnnnnnnnnnnnnnnnnnnnnnnnnnnnnnnnnnnnnnnnnnnnnnnnnnnnnnnggggnttaccatattgctgtttttaggccactaatgtnggggccatctgttatggaggcattacgtggtt

SEQ ID NO: 428380 - DNA, 472 bp, Homo Sapiens
  misc_feature (68)..(68): n is a, c, g, or t
  misc_feature (106)..(106): n is a, c, g, or t
  misc_feature (375)..(375): n is a, c, g, or t
  misc_feature (389)..(389): n is a, c, g, or t
  misc_feature (398)..(398): n is a, c, g, or t
  misc_feature (428)..(428): n is a, c, g, or t
  misc_feature (441)..(441): n is a, c, g, or t
ttttttttcccaaatggtagtggacatacactaacttattatcaaatttcccttcctctaaaaagganggaactgccctaatgtaaaacatccttcaaagaaacantctaaagcatatataataatgaacacattgcaacttaattcttgtcctgaagtatcacctttaggtttgggcatttctccagtctcctgagacacatttattacatctcaaaataggtcatttctaaagataaaatagcaaccatcccaacatccttttgaccaggtttattctaagagggtaggtcttggtgccaagttctaaggggcatccaaagtaacacgcaataaactgatgacattaaataagccacagtgaggaaacatttnacatggatcgtctncttaaaagnattcaccatatgggtaagtttatatatatnccattgtaaggtnctgtgattatttgaactggtaaacactaacc

SEQ ID NO: 428381 - DNA, 498 bp, Homo Sapiens
  misc_feature (455)..(455): n is a, c, g, or t
  misc_feature (466)..(466): n is a, c, g, or t
  misc_feature (474)..(474): n is a, c, g, or t
gtcaggaaattgcaaagaagaattcactttaaacacattgtaaaatcgatgtgtctcaggtttcttttctgttcatgcagacaaatgtagacgcaggtaccttccctccatttgcaatggatttatagttatgtctatataatcagtggaaaaaattcttggcagcacattaattgagcccattcagatggcagcaaaagcagtatttcagggtcattggggaatcatttgtaataaattaacctcatcggtttgtcccagatgtgatgcccagggtgctctcaagaccattctgggagcctgcatgctgatgccttctctccagagcatcttctaatgtagcacacgtgtgaaaaaatcctctacttgaatctgtgtctcctccctgaggttacttatgggaagcaggagaggggacttgaaatacttaaggaagtggggaaaggatttttcantacataccacntgtatggntcattctaattaaaactggatggc

SEQ ID NO: 428382 - DNA, 461 bp, Homo Sapiens
  misc_feature (132)..(132): n is a, c, g, or t
  misc_feature (155)..(155): n is a, c, g, or t
  misc_feature (233)..(233): n is a, c, g, or t
  misc_feature (245)..(263): n is a, c, g, or t
  misc_feature (329)..(329): n is a, c, g, or t
  misc_feature (363)..(363): n is a, c, g, or t
  misc_feature (380)..(380): n is a, c, g, or t
  misc_feature (388)..(388): n is a, c, g, or t
  misc_feature (396)..(396): n is a, c, g, or t
  misc_feature (420)..(420): n is a, c, g, or t
  misc_feature (429)..(429): n is a, c, g, or t
tgtgttatgtcactggatgtctatcagaggaaaaattctctgtgaaaatagatttaaaacaacaggcagtttaatcagataagtacacagcattcatctttgtctcctagcaatatgattgcagcataatgnatgaagggtgggagctcatcagnaatatgtctctcctgagcaataaagtgaaaccaactgtcatcgagcatcctttcctgtgatgggagctggagcagganctgctgctgtgnnnnnnnnnnnnnnnnnnnataggctaaactattaggacttgaacaaaggaaataaatgatggcaatttggggattttatgttgnaaaggtttattccaactttacggcaatggccctnaatgggggaatttaggngttgcganggaaactncggccaacttttgggaaggccccngttaggggnaggaggcaaggggttccctttctgtggggggt

SEQ ID NO: 428383 - DNA, 495 bp, Homo Sapiens
  misc_feature (75)..(75): n is a, c, g, or t
  misc_feature (113)..(113): n is a, c, g, or t
  misc_feature (391)..(391): n is a, c, g, or t
  misc_feature (424)..(424): n is a, c, g, or t
  misc_feature (443)..(443): n is a, c, g, or t
  misc_feature (453)..(453): n is a, c, g, or t
  misc_feature (475)..(475): n is a, c, g, or t
gggtgctcagtgtggcctcggtcaacacactacctggcctccagctctccaaagccattttaggctgaaggtggncagtgaatcacatctgagggcgcaggggccttggctcnctggctaacagagttccttaggagcgcagaaccccaaacggaaccgccttggaaagtccacccagtcactgcggggtctgggtgggggtggaggtgcaaggtccccagatattctcggagattttcacaccatctcagcaccacattcagaactcagcctgcgccggttgcagcaggaagaaagaattatgacttgtgactttggaaagcgagaagctgcccagattccccctcccttgagacatttggggtgggaagttcaggggagatttttcaantgcaagaccaaggtgattttagaaggtaaaacntttgcgttttgtgttcaantttccacacnttccccttccggttcccaccgncccttgttttcccacaaagc

SEQ ID NO: 428384 - DNA, 474 bp, Homo Sapiens
  misc_feature (38)..(38): n is a, c, g, or t
  misc_feature (357)..(357): n is a, c, g, or t
  misc_feature (364)..(364): n is a, c, g, or t
  misc_feature (445)..(445): n is a, c, g, or t
tgcagctggatcagatgtaccgtaagcagctgtcgctnaggcacccgcgtgtggatggagggaatgtggtatcatctgaaagcttagaaatgccaggatctgcagagcccccaaaaagggtgttacagcgtgtcacagccctggcttgaggagccctgaggtctgggctcccagtagggccacagctcttctttctttctcgtcacctgcagtgtggcgagtgagggggtgagtttctggagggcagtttcagcccatttgtgttacagctctttcagtcctgccatcccgctccagctggcaactcctgggctggcccggccctgtttgctttttcccatcccatggggtggctanctgggtngaagggcaggagggctgtagtttttacggaagctctggcttttgggaaccccaaggttttggggcccccagaaaatttcancatttttcaattttcacaattttgggagc

SEQ ID NO: 428385 - DNA, 206 bp, Homo Sapiens
  misc_feature (145)..(145): n is a, c, g, or t
  misc_feature (171)..(171): n is a, c, g, or t
  misc_feature (180)..(180): n is a, c, g, or t
atgagacaccatgcctgggctatcttgttgattcattaatattgagatcacgaacagcagcactattaactcatgcctaaatggaaacttgttctaacacatgtattttccacaaaagggcatatcattcacagccttcttgccnttaaaaaacattagggcagttattcnggcattacnttgggggagttttttaaacaggcaaa

SEQ ID NO: 428386 - DNA, 566 bp, Homo Sapiens
  misc_feature (361)..(361): n is a, c, g, or t
  misc_feature (398)..(398): n is a, c, g, or t
  misc_feature (435)..(435): n is a, c, g, or t
  misc_feature (444)..(444): n is a, c, g, or t
  misc_feature (455)..(455): n is a, c, g, or t
  misc_feature (460)..(460): n is a, c, g, or t
  misc_feature (468)..(468): n is a, c, g, or t
  misc_feature (485)..(485): n is a, c, g, or t
  misc_feature (497)..(497): n is a, c, g, or t
  misc_feature (511)..(511): n is a, c, g, or t
  misc_feature (535)..(535): n is a, c, g, or t
  misc_feature (550)..(550): n is a, c, g, or t
cttaagaagccaactatagtaatcatgcaaagttgaggagtatgtccttcagggatataaaaagaaaaacaaatctgttttttgagctaaaagagcacatccaaacaagaatttaactggctaaaatttagtaattactgttaagtaactatcaaacttgaaatcttacaagataaatggttaagatgtcttgagtatttgggatgggggcctgtgagtctgattgagacatacattttacagagtagcagcactggaaagggctagtccaacctcccagcctctgcttgggtctccgctgccccagccacacacatcctaggaattcttgtaaacatatctgggctctgtgttaacagtncacttgttatatgttttctaagagattagttcttccngtgatttttccagtacgctgaagtagtagtatggaantaagggggncgtcaaggaantgggnttttgggntttttaaagataatccncattcctctcantggcgggaggggcntttaggctttggtataaaccggtnggttacctggtgggncggcatcgatctgggg

SEQ ID NO: 428387 - DNA, 448 bp, Homo Sapiens
  misc_feature (287)..(287): n is a, c, g, or t
  misc_feature (388)..(388): n is a, c, g, or t
  misc_feature (404)..(404): n is a, c, g, or t
  misc_feature (418)..(418): n is a, c, g, or t
ttttttttggatagatacccagcagtgggattgctgtatcatatggtagctcttatttttagtttttacaggaaccatcaaactgttctttatagtggttgtactaatttaccttcccaccaacagtgtatgagggttcccttttcactacatccttgccagcatttgttgttgcctatcttttggataaaagccattttaactgggatgtgatgatacctcattacagttttgatttgcatttgttgagcatcttttcatatacctatttgccatttgtatatttnctttgggaggaaatgtctattcaggatattttgcccattttaaaatcaggatcattaggatttttttcctataggaattatttgaggctggcttatatatnctaggttattaatccnttgtcagatggggnaggtttggcaaatattttcctcccattgta

SEQ ID NO: 428388 - DNA, 419 bp, Homo Sapiens
  misc_feature (299)..(299): n is a, c, g, or t
gataatacaattttctttattaaaaataatttacagcatcagtaacatatacacaattgtcatcaactgaactttgcctccaatatatttctatacaatacttaacattattgaacttaaaactgttacactgttttgttggctttaaataatagacaatgatttttgtctattacttagtgatagacaaagtgattactttgttacttaagtgagatatatggtttcatagccacatattatgtgtaaaattgatagaaaacgtcagcaatatcactctttaggggaaaaaacactgnaaaaggccaaagtccaccctcttcttctctcttattactccaaccaaactaagatagggataaacatccagtatcttaggtatctcctcctaaaacctaaaggacaaaaggaagggtgtc

SEQ ID NO: 428389 - DNA, 283 bp, Homo Sapiens
  misc_feature (171)..(171): n is a, c, g, or t
ccttttacataggtattcttttattttcctagaggagggaagggttcaatttattaaagttacaaatttaaaactagttctcaaactttaaatttcagattacacgttattctattgataagtgtatcacatttaagtacttttaaaaaatgtttaataattttggtcccntttataaactttgttaattcaacatcttcaaacactttaaaccatgtttgtcaacttaatatgtcagatattgtttaatttctgcaattgtctaggttacataaatcttatt

SEQ ID NO: 428390 - DNA, 450 bp, Homo Sapiens
  misc_feature (319)..(337): n is a, c, g, or t
  misc_feature (377)..(377): n is a, c, g, or t
  misc_feature (429)..(429): n is a, c, g, or t
attattaaacatgtaacaaggcttccatgcaaatcacatcatttgatattataagtttctgaaatgtttgttaacataatcacttcattaattttttcttttgaagcttccatgttctttgcaggcccgttgaataaccactgtggaccaccagatgtctgtaaatgtcacttgaggaagccctgatctataatacatattgagaaaggagaattgaggcagcatttgggttaattaaaattacactgaagtgaaatagctaagctaagagaagccactcaccactgtcctgtcttcatgcatatacttctttctgcannnnnnnnnnnnnnnnnnntgaaacaggaatctcactcagggtaggagtgcagtgggcncaggtcttcgggcttcactggcaacctctggcctcctgggggttcaaggcgnttcttcgtggcctcaggcctc

SEQ ID NO: 428391 - DNA, 460 bp, Homo Sapiens
cttcctcagtgccatcctggtgtgttcaggttttttggcaaaacctttgaggagctggtgggtggcaggactaggttaaagggactgagcagagggctcccgactgctgagctacgaggaagagggggcagtggagagcacactgagggctcagtgttgatgacatccagcctcctcgtgccagaggtccaggtcctcctgggtgcaggagcagaagctgctcaggatcctgcagagatggtggcagagccagggtagaacctgggcaccctgttgcctccaagaccacctcagatgctggtttggccgcctcccatgcctccttcccctttgccagcagctcagtccttcaagagcagggccttggcaggtctgtcttaaaacaccgtgggagtttggccatcatcctgggcttagcactgctgtgccctgttcctggggttttgggaagtggtagcat

SEQ ID NO: 428392 - DNA, 512 bp, Homo Sapiens
  misc_feature (119)..(119): n is a, c, g, or t
  misc_feature (387)..(387): n is a, c, g, or t
  misc_feature (401)..(401): n is a, c, g, or t
  misc_feature (409)..(409): n is a, c, g, or t
  misc_feature (454)..(454): n is a, c, g, or t
  misc_feature (470)..(470): n is a, c, g, or t
  misc_feature (495)..(495): n is a, c, g, or t
atcaatattgcattttatttccttctaataaatatcagagataatgatttttaaaagattaagaataaacagaactattatagcagagagaatcagaattatattttgctaggcaagantaacaaaagtatccaattaagttctgctagctccaagctctggagtcttttttcaacaaaccagggccctttgtctaccagtaaatgggagtctctgtgtcctacataggaggatatcttattgcttgtctcaacaggatattttccttttgggactggaataaagtaggctgggcaaggatattgttaagtgctatggggttattatttacacctggatacaggcattccaactgtgtttagggtggcacttacacatatggtatcnggacttttaaaggntggattanttagtttcaggaccggggggacccgccggagggtgtccattcggnagggaaaccaacaggnggtaacccccctttggccaccaccnggtttgggcactgccct

SEQ ID NO: 428393 - DNA, 474 bp, Homo Sapiens
  misc_feature (215)..(215): n is a, c, g, or t
  misc_feature (358)..(358): n is a, c, g, or t
gtatatttttttatctacacaattctgtagattttagccatgccatatatttaacttttaaggaaaagtttatataacagtcattgcttggtagaatccagtctgtcaataagttagctctaacagttaacattgaagtcttataccttatatttaaatgtttagcaatctctactacattttcaaatataaataatttggttgcaaattccagnaaagggcattaaccaaacatgggactgatcctgggggcttccacctgactaaggttttaggaagtctgtccttgtgtcctcatcttttttccccatttctctttttgatccttttaggtacagtaaatggtaatccacagggnctggatgtggaattgttcagttggactatttggcaatggaccccaaggaaaaccacccatggacctttggtaaacgggtcgcggaaacccaggggtccaacattaactcccacatt

SEQ ID NO: 428394 - DNA, 297 bp, Homo Sapiens
  misc_feature (60)..(60): n is a, c, g, or t
  misc_feature (155)..(155): n is a, c, g, or t
  misc_feature (167)..(167): n is a, c, g, or t
  misc_feature (250)..(250): n is a, c, g, or t
  misc_feature (259)..(259): n is a, c, g, or t
cttataaagtaagagttataattaaggtaatgactaaagaaaaacactgagtggtaagantgagaggaaatgttatctgtagctattgaaagctctcttctagcactctgactttgtcagggctaacgcttttttcttattgtctctatattccnaattctccaccngtaaaacagtgcaaatttatgaatcttgtaacttactgtcacaaacctgggaaaaatcttaacagtgagggtggttacaggantcatttaangtataaacattagtgggggtcttaaaggggaaattaac

SEQ ID NO: 428395 - DNA, 222 bp, Homo Sapiens
  misc_feature (166)..(166): n is a, c, g, or t
  misc_feature (174)..(174): n is a, c, g, or t
  misc_feature (180)..(180): n is a, c, g, or t
gcaggtgtgatcattggatgaggaaggctctcggaatcattccagggtgcctgctctagactcttgggtgttgctcttctttccttcatgaccttgaactctctgactccagcagtcccctctggcacatgcctgaactgcttcaggggcaccctaacagggtcantcagggcntccaanttggggggtgatggccttaggaggcattgagtataagggtga

SEQ ID NO: 428396 - DNA, 276 bp, Homo Sapiens
  misc_feature (47)..(47): n is a, c, g, or t
  misc_feature (162)..(162): n is a, c, g, or t
  misc_feature (236)..(236): n is a, c, g, or t
  misc_feature (251)..(251): n is a, c, g, or t
  misc_feature (262)..(262): n is a, c, g, or t
cagccagagataaatatttttaaaagacacctaatttttcctacctnttctctcacagcattgagcagggcttcccttccccttgatcactcagcactttgggagaactagggaactaattttgtacagaatcatggagttgaaaggggtatcagagtaggncagctgcggttcttcatttcacatgttcagttaagacctagagaatatccccagagttggggacccaagccagngtgagggcctcctcnaggctgggggncactttgtttgccc

SEQ ID NO: 428397 - DNA, 169 bp, Homo Sapiens
  misc_feature (119)..(119): n is a, c, g, or t
  misc_feature (149)..(149): n is a, c, g, or t
  misc_feature (154)..(154): n is a, c, g, or t
atgagccaaacacctgggcctcagagcatctgtattaagatagccagggcaattctaaaatgatgtcagaaaaaaatcactttttctcaaaggcaagctttaaggaaatttgatgtctnaagttacaggtctggccatttcagggtttnctgtnaatggagttttaatt

SEQ ID NO: 428398 - DNA, 145 bp, Homo Sapiens
  misc_feature (105)..(105): n is a, c, g, or t
  misc_feature (131)..(131): n is a, c, g, or t
gtataatgatgggctttgagttataaaagtatatacatttttcagaactaagtaaaatgtgtgtgtaaattaattgtgtattaattgtacatcaaaagggaaaanttgaaccttgaaccccattaatggcngagcctgtgggaag

SEQ ID NO: 428399 - DNA, 286 bp, Homo Sapiens
  misc_feature (216)..(216): n is a, c, g, or t
aattaacaaataataattgcccatattcatggggtacacaatgatatttccatacatataatgtgtagtgatcagatcagggtaattagcatatccatcatctcaaacacttatcatttctttatgttggaaacattcaacaacttccttccagctattagctatttgaaactacacattattgttaactacagtcatcctacagtggtacagggntatattaaacaataagtatatttcttaaaacatgaggcaatggcttgggaagacagcacagggtacaggg

SEQ ID NO: 428400 - DNA, 137 bp, Homo Sapiens
ttttttttaagtgtatgtgtatgtatatttgaatactcatatggtatctatcattagaaagatacacaaaaaactggaaaatgtggtagtggaacagacttaattttcattgcatgcctttgtattttttgaattag

SEQ ID NO: 428401 - DNA, 111 bp, Homo Sapiens
  misc_feature (64)..(64): n is a, c, g, or t
  misc_feature (72)..(72): n is a, c, g, or t
  misc_feature (86)..(86): n is a, c, g, or t
ggtaaaatgttattacatggacacatgactgtggttcatcaggggaatatggtatggctaggtntggaaccnattaatgaggggtntttaaatttttttggaaggcaaaaa

SEQ ID NO: 428402 - DNA, 333 bp, Homo Sapiens
  misc_feature (258)..(258): n is a, c, g, or t
  misc_feature (274)..(274): n is a, c, g, or t
  misc_feature (311)..(311): n is a, c, g, or t
gcatgcagctgtatccatggtgatcctggatggtggatggagaccaccataccccatctacacaatttcaggtatgaaaggtcaccaagagaccacacaccatatccatggtgatcctgggatggtggatggagaccaccataccccatctacacaatttcaggtatgaaaggtcaccaagagaccacacaccatatccatggtgatcctgggatggtggatggagaccaccataccccatctacacaatttcaggtntgaaaggtcaccaagnagaccacacaccatatccatgggtggatcctgggatngtgggatgggaggaccaccaca

SEQ ID NO: 428403 - DNA, 447 bp, Homo Sapiens
  misc_feature (86)..(86): n is a, c, g, or t
  misc_feature (215)..(215): n is a, c, g, or t
  misc_feature (232)..(232): n is a, c, g, or t
  misc_feature (324)..(324): n is a, c, g, or t
  misc_feature (359)..(359): n is a, c, g, or t
  misc_feature (397)..(397): n is a, c, g, or t
  misc_feature (402)..(402): n is a, c, g, or t
  misc_feature (408)..(408): n is a, c, g, or t
  misc_feature (417)..(417): n is a, c, g, or t
aagggccccttgctcacactggcccagccctgcagcatggccatgttggtctctgagccttaagcctttggatgtggacacatttntcctcttcctgaaaaatgtgagggtctgagaggccacgttcctgttcctgagtcatacgacagagtcccagtgacttgggtctgatgtctgtcccacagtgggacatccctgctgcatcccaatgccancccgtgtcctggggganacccaaatgtgccattctctcagtatcacaagtcggggactgcaggaggctcaggtgccagggtgccttctgatgttcatggccacaaggtntttcccattgtctctgggttccccagacgatgttncaggaggcggggtgtgccagaagggggccaagtcttgncaaancaccgnggtgttctntttgagaagggagttttattcaggattggg

SEQ ID NO: 428404 - DNA, 373 bp, Homo Sapiens
  misc_feature (260)..(298): n is a, c, g, or t
caatgaaatcagtttgattcatgttgattatgagattcctatagaacagtaagtttgccatatgtcatgatgattgctagacagtagttaatcctagattgaaagtctaagaaattgtcaggtctgaagatacaaacatacaggggtttgttgagaatatgggagtagacagattcctttcatacagtgcatagagaataaaatgaaaagaaggtccaggggcaaactttgggaaacccaatattgaatgggcaaggatnnnnnnnnnnnnnnnnnnnnnnnnnnnnnnnnnnnnnnnagttatagttaaagacgtagggaaatcaggaaaaaaattctcaggatgcaattaaaaggacagtaccctatttcg

SEQ ID NO: 428405 - DNA, 117 bp, Homo Sapiens
cacacatgcccggccaattagaattgctttgatgtagctttgtcaactggttatgtgagtgtgttttgcattgaccgtgattacatggggtgccaaatcaagcctctctttattagg

SEQ ID NO: 428406 - DNA, 265 bp, Homo Sapiens
  misc_feature (207)..(207): n is a, c, g, or t
  misc_feature (210)..(210): n is a, c, g, or t
aagattgaaacagtttttattacactaaaaagcatacaaacattaatatacaaatcccttcaaactgataatcactcacagttttcttatatctaagagattgaatgtgaactaaatataagtatcaataagtataaaataaacctagaagatatttctttgcattaaagatcattttcagaaattatgttttataagacgtagagnagnactacacatttcatatttcttcaatacctcatgtcagaggcatatatgcaactag

SEQ ID NO: 428407 - DNA, 422 bp, Homo Sapiens
  misc_feature (207)..(207): n is a, c, g, or t
  misc_feature (362)..(362): n is a, c, g, or t
  misc_feature (372)..(372): n is a, c, g, or t
  misc_feature (401)..(401): n is a, c, g, or t
ttttttttaacctgaaaagtataattcatggacaggactctatttcttctgccacaatatgatcaatagggtttcagacagtgactctcataacaccctcggagcgctcactctctttttaaagagtttattcttttcaaagtcgtgtggattaattccagtatgtcaagtcaaactttggctataaaatgacatggttgaccaagnaaaaacacttatgtgctcacaattttccatccagtgggcttctgaacatttaaggactacctgcccctgaccaagtcctgttttgaaaataggcttaaacaatctattcaaggaaatcatactgaggccttttctttactgggggggatggggcnggaaaagganttagggaacacacaacaaggcagggaggnggaaactttggaactttctta

SEQ ID NO: 428408 - DNA, 424 bp, Homo Sapiens
  misc_feature (183)..(183): n is a, c, g, or t
  misc_feature (231)..(231): n is a, c, g, or t
  misc_feature (345)..(345): n is a, c, g, or t
  misc_feature (376)..(376): n is a, c, g, or t
  misc_feature (412)..(412): n is a, c, g, or t
atttatttaaagttttatttgctagctaataaataccactgaaactatgcacttttaaacaaagtataattgtacatgagtgggggcagagtggaatgcaacatagtaattcatttcacatcttgcataccattaaggtgccttccagtttgcctgtaattgcatgaaatgagtatctgagcntaacttcttttaccacaaaggccactaacactgtagagggtgccaggnaaaggtccctgattcccggggcttaattaacgaaactggaaaggcaaaatcaaacttcaatacaaatggaatgtacagatccatcactttcttacttcattctaggattctaangtcagggctctcaaacccttgggtttatggncttacctatgtgctgaggacatctttttttcatacnagtccttttgga

SEQ ID NO: 428409 - DNA, 415 bp, Homo Sapiens
  misc_feature (276)..(276): n is a, c, g, or t
  misc_feature (319)..(319): n is a, c, g, or t
  misc_feature (392)..(392): n is a, c, g, or t
  misc_feature (399)..(399): n is a, c, g, or t
caaaggcacagtagataccagatgctcagagcagagcagccatggagctgctgggaccaaaccttgcctgacctagccaccaccacaccccagacatataaatttaaattttactgatataaagaatgcaaaacacaaaatttacaaagatcataaaacatacaatgttgtgtattgtaaattagtcacctgattctcacaggaaaacttgttaatttctgctgtactccaaagccactaatgggatgaaacttacggattagttccaacatggantactgggttgacatttttgtttatgttaaaggtcaaaggctgnaaggtgatacatgggagacttcaggaacttcacttgtcagtttatgtggggtggatttcctttggctaaatgntttgggnacctttggggttggtt

SEQ ID NO: 428410 - DNA, 496 bp, Homo Sapiens
  misc_feature (375)..(375): n is a, c, g, or t
  misc_feature (394)..(394): n is a, c, g, or t
  misc_feature (423)..(423): n is a, c, g, or t
  misc_feature (447)..(447): n is a, c, g, or t
  misc_feature (452)..(452): n is a, c, g, or t
  misc_feature (463)..(463): n is a, c, g, or t
  misc_feature (486)..(486): n is a, c, g, or t
atgtgactaatctgagtttcttccaccaagcatgttagttaggggtggaggactagaacctagaaccctgaattcgagcctggaagatatgtaagccacatgctattgagatcgtggtcatgggacacccgctaacacaaaccttctggtaggaagtttttgagaagactgggtccaatatccccaagctaaaatcccactggcccatcgctgtgtttgctcagaaaaggaatctgggttctttggtttctgctttccagttgacccgggttgctcctctgttttacggcattttggggagtcggtctcccagagcagcgctggattgtaatgaggaaggcgcgtttccctctctgggggggacaggagggagtngggagaaaaattggggccnggggaaaagagctcctcccaaattaaaanttatttaggacagatacgggttantggtntttggttggtnggtggttggtggttttttttggnctttaatccc

SEQ ID NO: 428411 - DNA, 513 bp, Homo Sapiens
  misc_feature (415)..(415): n is a, c, g, or t
  misc_feature (445)..(445): n is a, c, g, or t
  misc_feature (450)..(450): n is a, c, g, or t
  misc_feature (458)..(458): n is a, c, g, or t
  misc_feature (468)..(468): n is a, c, g, or t
  misc_feature (488)..(488): n is a, c, g, or t
  misc_feature (499)..(499): n is a, c, g, or t
aattctgcaccaacctactcagtcacatctttagggttcacttctaattttacttctcttgctgtttccaccacatctgcagttacttcctacactgaagtcttaagcctcccaaagtcatccatgtggattggaataaacttcctccaaacttcttttaatgttgatattttgacctcttcccatgaactgttaacgttcttaatggtatctagaatggtgaaatctttctagaaggtttccagtgtattttgccaaggtctatcaaaggaaatcaccatttatgggcagttatagccttacaaagtgtatttattacataataaggacttggaaagttggaaattactcttttggattcaggggggctgcaggatggggtgttgtgtttaaaaggtacacaaacagggggggntttttaaatcttgtacgtctctattagggnttccngggggtgntccaggaccngtttccatggggcactaatnttttgttggtntgggggccctacat

SEQ ID NO: 428412 - DNA, 223 bp, Homo Sapiens
  misc_feature (11)..(11): n is a, c, g, or t
  misc_feature (132)..(132): n is a, c, g, or t
  misc_feature (147)..(147): n is a, c, g, or t
  misc_feature (176)..(176): n is a, c, g, or t
  misc_feature (207)..(207): n is a, c, g, or t
ttatataattnaagtccagagaaacagtacctaacttttgatatacaatttattcttcattgttaacgcataacatttaggatacagtagaattatgtatctcgcaaaacttggaactgtgtgtgtgtttanttcacttcttcaganttgttgctagccctgaagggacttcaganatataatagtatcaacaactaatacatctantgacagtaggcatcaa

SEQ ID NO: 428413 - DNA, 383 bp, Homo Sapiens
  misc_feature (82)..(82): n is a, c, g, or t
tcagcttcaggctctgaagggttaaatgtcagctctgggacaagagaccatttcaggaaatggaatttgattcttggttttnttgccccctcccctccagcgtaccatactttccccgcatttacttacgtttcaggtgtcaacatggtgactcacccaccctcagggcagaagggctacccgctgccccagtgaaattcggtttgaatagggataacctgggtccctccatgcagcccggaaatggctgtcaggacctgccaagggctttagtaggttgggaatgctagtgggacgtgggccacatctgggatcttcatcccccagcccccgttcagagggggattgggagagatgaggggcagctccccaaggagttcagt

SEQ ID NO: 428414 - DNA, 417 bp, Homo Sapiens
  misc_feature (43)..(43): n is a, c, g, or t
  misc_feature (131)..(241): n is a, c, g, or t
  misc_feature (244)..(244): n is a, c, g, or t
  misc_feature (344)..(344): n is a, c, g, or t
  misc_feature (353)..(353): n is a, c, g, or t
  misc_feature (366)..(366): n is a, c, g, or t
cagtggcatgatcgtggctcatcacagccttgacctgccaggntcaagggaggctcccacctcagcctcccgactgtgtgggactacaggtacacatagctacaggtgcacatcaccacgcccggccaccnnnnnnnnnnnnnnnnnnnnnnnnnnnnnnnnnnnnnnnnnnnnnnnnnnnnnnnnnnnnnnnnnnnnnnnnnnnnnnnnnnnnnnnnnnnnnnnnnnnnnnnnnnnnnnnggnttgagccattcgcacccagcttccatttattttttaagcttcaataacagcatccaagtttatttaacaccttcattaggcagggacgaaacaaatcccncctcagctnttaaggcagtatnttcgaggtaacaccacaaccaggcattgtagataatttgtggcaccccatt

SEQ ID NO: 428415 - DNA, 207 bp, Homo Sapiens
  misc_feature (77)..(77): n is a, c, g, or t
aatctgtcatttgctatttttcatgtggcttgtaaccttgatggttgctttgtttaggtatttgccttagagccctnctctgttcttaatttacaatgtttttctttattaactttttccaaggatagacatgtactaggacacgtagcatgtagattaatttctttggcccaaatatgactatagagatattagtgagtatgaaac

SEQ ID NO: 428416 - DNA, 453 bp, Homo Sapiens
  misc_feature (131)..(131): n is a, c, g, or t
  misc_feature (231)..(231): n is a, c, g, or t
  misc_feature (413)..(413): n is a, c, g, or t
  misc_feature (419)..(419): n is a, c, g, or t
  misc_feature (424)..(424): n is a, c, g, or t
aatgaaaacagtattgaaataaactacaacataagtgtaagaaaatgccatggagctttgatgtttctcatgcagactatgttgacgcatgcttgaaaatattaaatgcttttcagaaacgtgttttggtncttttgcttctctggttccccaagcacaagcttagaatgccttttggataatccagcactgatcttgccttcaaaggagtttgcagtctcctgggaaagnaacctacacaactgaaatagaatgaaaaagagggcagggtctgaaatgctgagctctcactgaacacagaactaccagtctgaaaattccaaatgcaaacatcgaacagcactattatgatcaaaccttaaaagtgccatcttctgggggtatagttcatttaggggatttttttaaggggncttggntgttnggagacccagctggtgggggaatttcttt

SEQ ID NO: 428417 - DNA, 418 bp, Homo Sapiens
  misc_feature (349)..(349): n is a, c, g, or t
  misc_feature (359)..(359): n is a, c, g, or t
  misc_feature (377)..(377): n is a, c, g, or t
  misc_feature (396)..(396): n is a, c, g, or t
tgaagaaaagggaagaagaggaaagaaacaagatttggtagctcttgggcatatccaagcatttttgattttagagaggccctatggagtaatgaaaaaaatacaagctgacacagctttaaatccccactgtgttatcttgggaaaatcacttcaacctccttgagtctcaatttgcaattttggaaaagaaaaacaatttttgtcctgtctttcttgcaagattattatgcaacctgattaaatgtacagatgtgcagactcttaaaaaccttatgttaatgtaacccatataaaagtacgacttttggtcgagtaccagcacaaatttgcattccaaaggaaggantagttccatncagtgccaaaaagccttncaaaggtaattcagttccntcacgtattctggaggaaaagg

SEQ ID NO: 428418 - DNA, 415 bp, Homo Sapiens
  misc_feature (379)..(379): n is a, c, g, or t
acaggactctagtggctaggaatgaaattctgggataagcttgtgttaaagtagaccatgtgcgtttccaaacagtgagaacaggtcactagcaaacaatggcattttgtttgagaaatggagagcgagcaagactggagcattaccatcatgatggcctgtcaggcttttcagagaagaaatgaactgattaaccacaagtgcattattccaacaagccaaaagtcttccatcccatgggccagggtaattttcccaggttagatccagggttttggtgaaatttaactttaagatgtgggtgccaaaagagagaattggcttgtgggggcctttcaccagagacccattgccagtgactgaatgacctgggttaggnattgctacttgcaagcctcttatttggggatttaca

SEQ ID NO: 428419 - DNA, 520 bp, Homo Sapiens
  misc_feature (187)..(187): n is a, c, g, or t
  misc_feature (367)..(367): n is a, c, g, or t
  misc_feature (491)..(491): n is a, c, g, or t
cagagtgcataactaggtattagagtgatctccatttggggatggagttatagtaaataactagactgcgggtactttaatacatgttcttattattttgcatttaagtaattttcatgaccaattgtagggatgttgctacaggtgggttattttgttgccttgctaacctttatcgcatctaggnattagtatgtttcaggtactttgggaagaactttacatataatctttagcaatgaaatgatgtagagtaacttaccttagttcaaatagctgtttaagtggcaatgcccgattctgaattgaacctaggtgatcttagtccacagttctcttgatcatgatgtctcaaatctgggtaccnggggtgatgggaaataccagtaatgggagcataggcagtattgggcaggtctttaattttgtaaaacttactgttccggggtgtttttcagtgttttgcccacttgtgggtaaattaatatggnttaggagaactacccttagggtttgtttc

SEQ ID NO: 428420 - DNA, 483 bp, Homo Sapiens
  misc_feature (335)..(335): n is a, c, g, or t
  misc_feature (418)..(418): n is a, c, g, or t
  misc_feature (442)..(442): n is a, c, g, or t
  misc_feature (469)..(469): n is a, c, g, or t
atgattggttattgtgtctggtaagtctttgaacattcaacagccagacatttgtgttttatttcatgatgttccagtcaagttccaaagccctaacacagttaagctggctcagactccaggttctagtaaaaagttggaattaatgttataaggaagtattaaaacactgaaacatttctccagaaccagcaagtaagggatatgtatgtatttatgctcagttttagttggcctaaagcagagttgaatgggctttctaaatagctaggcctgcaggtacctgccactactcccatcttcagaggtatataagggagaatgtgtagcagttngaggcttttgctgtttttaaaaaagccttatgaatcagcagcacatcgggaaaaataggctcacatagtacctgggttttccncaagtaagccaagggcatgatttnctgtggtacattttatttaacagttcnttgggttttatgaa

SEQ ID NO: 428421 - DNA, 398 bp, Homo Sapiens
  misc_feature (160)..(160): n is a, c, g, or t
  misc_feature (243)..(243): n is a, c, g, or t
  misc_feature (258)..(258): n is a, c, g, or t
  misc_feature (315)..(315): n is a, c, g, or t
  misc_feature (365)..(365): n is a, c, g, or t
  misc_feature (374)..(374): n is a, c, g, or t
aggtcaccagagccagcttataataccacaacagtgctttgtcaatttgcttcttttccataaaaattatattttctgcaaaatcagtaaaatgtaaaacttcagtaacattcacaatctacaataaaactactggaagaagatgagtcagggagatctnataactgctctttccttcccatgtcaaagactccaagtagctcaccaaggaaaatctactacaataaaaatacatacataaantaaaagtgctcacanacacaaaaagataaggttacagggcaccacaccatccaccaaactgaggacatttcntacaatctgctaattggggattagaagtcaggtgttcagtacttattttntttttaaanttaggatcatgtacctgttaataa

SEQ ID NO: 428422 - DNA, 415 bp, Homo Sapiens
  misc_feature (176)..(176): n is a, c, g, or t
  misc_feature (223)..(270): n is a, c, g, or t
ctgacactttctatttatggaagtgatacttactattcacgatcatggtctgcttttagaaagcactctaggtgaaaaagtgaactcattcaaagaaaacatttagtgactgtcagaatgctggtgtgtgtacaaacagcattggagacggcgctccaggtggggaagcgtgtgcngttgaaaggccaccgctgctcaagtgcaggtgctaagcagaggtcannnnnnnnnnnnnnnnnnnnnnnnnnnnnnnnnnnnnnnnnnnnnnnntccttagggttggccccagctggacttcgcaatatctgggtccccatggctcagcaggaggccgcgggaaacaatgttttcctctcgcaggcttcggtttctgccactctgctagcagcccgaggttccactcttttctctgctg

SEQ ID NO: 428423 - DNA, 483 bp, Homo Sapiens
  misc_feature (431)..(431): n is a, c, g, or t
tattatgctagagcttcatatcttcttttattttaaccttcacaatgatagttaagctgggggagcagaacctgtcaattattccccaccagtcttcattcttttctctgcacaagttctggtaaattattctaatgtgctctaaccagttccacccaatgttttttaatgcttatgagtttgcagtttttgtacttggtggtctctgtggttcacatttttttgtgttgtagtgtctcctgcctcggttggctcagaaaataaggcctaggaactgcaattagctcatgatttgtcaagttcagttagtaccaagctaaggagtttacttacagatgacagcaaggcaggatgctctagtaattcgtcagacattgcaggggatattgtgtagtcaggatattaccctcttgtgggaaaggaactacctncacatccattatttattttccctttctgtttacccaacagccaaggggattt

SEQ ID NO: 428424 - DNA, 443 bp, Homo Sapiens
  misc_feature (253)..(253): n is a, c, g, or t
  misc_feature (380)..(380): n is a, c, g, or t
  misc_feature (406)..(406): n is a, c, g, or t
aaattactcctttccactgatatttattgagaaactgctatgctccaggtactgcgataaacactgggcaaatgttggagagctaaaaaggcatattcctcttataaagacattatttacttgtaacaaacaagtaaataaatgtattagtcaatatgtaagtaaacaaaaaaatggacaagcacaaattatattaagtactatgtaggaaaccaatagagtactgtaacagaataataaggtatatgggatnggggtgggaatctgttcagagatgatctacctgagaaggtaacatgtaggcagaggatctgaatcgtgaggagtcagcctttcagagtaagtgggagtaggcacttccaagagaaaagcatattccngggctatttggcctattcaatgtgcntcttggaacaagggttagccattctcctacctgttac

SEQ ID NO: 428425 - DNA, 450 bp, Homo Sapiens
  misc_feature (430)..(430): n is a, c, g, or t
tggaaacgtgcttacgtgaggacttcgtgatatgattttggctgctcagaagtcatatttgcttcctagttctcaagtgtgtccttaaagaagagatagggcaactcggtagaaagcaagcatttaaaaaacccattattatctgtcttgagtcctcactggggaaccacgagctccctggtacagagcctctgtgagctgtgcagtcaccaactccagggctgcgcttatgtttaagccaccctgagagaggccacctgaggtctagcaagtctttgctctctcctcattgggcagtgaagtcttgtccgtcacagggcctggaactaagtgtaaatactcaggagctttaaggaataggaggcaaacaaggttcttcacttctttaaaaagtgcctggagggattttattaaaggactggcaacttgnaaggaggaagggaaaagggc

SEQ ID NO: 428426 - DNA, 413 bp, Homo Sapiens
  misc_feature (157)..(157): n is a, c, g, or t
  misc_feature (335)..(335): n is a, c, g, or t
  misc_feature (359)..(359): n is a, c, g, or t
  misc_feature (398)..(398): n is a, c, g, or t
ttttttttcaaaaaacttactaaaatttattaagagcatttgacatcttagttaagtcactgttcataactactgttccaccatagaatcttcacaagaacagcctgctggacttcacaagaaggctgatggatgttgggggtgggcatttggggtntggaaaggccgcttggcacattctcagcatgcgccacccacaccgccccttaccaccaaagccttctatttcccattccatccagtaggagcagctgtagctgaacctgaaaccttcggggacaggctcattgattgtttaaataggggaggtgcaagctctcagggggtccgggggnctttgatgacacagctcagggcanccacagggcacctacccaccaagcgcgtcagggttgttnttgagggcttgagca

SEQ ID NO: 428427 - DNA, 452 bp, Homo Sapiens
  misc_feature (68)..(68): n is a, c, g, or t
  misc_feature (308)..(308): n is a, c, g, or t
  misc_feature (416)..(416): n is a, c, g, or t
  misc_feature (434)..(434): n is a, c, g, or t
ttttttttgcttagtagtttataatgtatgtgcatatacaattaagcacaaactatatataatgttanagctgctctctcttatgtttttttcttaatgttatctactgaaattttttcatggcattaaatatatctttataaacactttttgtcaatataatcaagttgtttattttattatggctttacccatagaatagtgaaaaaaattatgccctatcaagccttatgcagcttcctttttattttttgcaggtcaatataaaagtttatcttaaaaaggagttttattaaacattcaaaatntccagttctttacaggatgggcagggagtccatctctccttactttggggaactcttggataggtaaccccttgtaggcccattccttggcccgggggcagggagganagggcattcaaggcttancaggaccagccgggggtc

SEQ ID NO: 428428 - DNA, 283 bp, Homo Sapiens
  misc_feature (174)..(174): n is a, c, g, or t
  misc_feature (199)..(199): n is a, c, g, or t
  misc_feature (263)..(263): n is a, c, g, or t
agtaaattaagtttcagagggattgcataaaactgtgatatcattgaatgtaacatctagcctaagactattctctgttcacatgggcttaggcatgacttctgtcattgatttcattacttatgtgctggtatgcactgctcgtcaccatggacctgccagggcacctggaantgaagtccatgtagtctgtgtcctncttggatcaactccagacacctatgaattccttacatcattttcatcagattcttgccacagtngtacatagtaacttgttggg

SEQ ID NO: 428429 - DNA, 446 bp, Homo Sapiens
  misc_feature (168)..(168): n is a, c, g, or t
  misc_feature (309)..(309): n is a, c, g, or t
  misc_feature (352)..(352): n is a, c, g, or t
  misc_feature (362)..(362): n is a, c, g, or t
  misc_feature (381)..(381): n is a, c, g, or t
  misc_feature (392)..(392): n is a, c, g, or t
  misc_feature (412)..(412): n is a, c, g, or t
atgggtattcataaaacattattttaaggcaacacttgctacttcaagaaatgactgatatattatttaggatggttcttgcctgagcattttttagttacattgtaagggaccttctaacattgtgttattaacaggaaggagtttttcttaccctctgtgtaaccngtttctttgactcttgcaaatccagagaaagtatttaatcatctaattggaaccctaaacaatgaaactaagttgatttttctaccagatgtgttttaccccgaatgtaaagttttaagggtgattgtttctgttgaaaanacaaactgggtatcaatgatctaatcgcacatattgtaagggntgaacaactnccctttgaatgggtaaagnctgtgaatttncattaattttctgcattctnccattaaattttccctttaaaggtatttcggtac

SEQ ID NO: 428430 - DNA, 448 bp, Homo Sapiens
  misc_feature (368)..(368): n is a, c, g, or t
  misc_feature (393)..(393): n is a, c, g, or t
  misc_feature (431)..(431): n is a, c, g, or t
ttttttttcttggacatttcaggcctccactggcagttgctttcactgtacaaatgtaaagtgtggaaaagggtaaggacctagaaaaagttatacaaaaaatatgtgccattgtcaggtgcaaaacctggcgactactctgaaccaaattaagtataatatccttcaaaataaatgagaatatataaataagctaaaatagaatccacacaggcttcatagaaactttgaaagcattacacattggtaaggccccagggtaggaagaaaataacctaacatgttcaaaaggggcaaggaaaaacctccctacactgggaagtttgttactaaataaacttttctaaaatgggaaggcacaataatgnttcagctcttgggaatttttcattngcttaaagggcacgttttaggtattacacggaaattantctttttaaacctttgc

SEQ ID NO: 428431 - DNA, 162 bp, Homo Sapiens
  misc_feature (27)..(27): n is a, c, g, or t
ttttttttaaaaattaagtacatcatntttattatgacattgtacaggttttatggaatatagagagttatttcccatgtttgaagaattcccatcctatgagtcgtgatgtaccaagagtaccacccaatatagaaatttaaaaatcactttcccaggctc

SEQ ID NO: 428432 - DNA, 405 bp, Homo Sapiens
tctcttccacatactgacttgctttcttttggatatatacccaatagtgggatggctgggtcatatgggtagttctatttgtagcttttttaaggaacctctatactgttttccataatggttgtactaatttacattcccaccaacaatgtgtgagttttctttttcccacatcctcaccagtaagttttttgtctttttgataatagccattctaactagggtgaaatggtatctcattgtggttttgatttgcaagcaaatcacaatttaggataacagcattcaggtttagagaatattttaactatgacatgggatatgtgtaaataaaacattctatttaaaacatattggatgcttcaggtcattaaatctgtcccctgtaggatcagttatggaggg

SEQ ID NO: 428433 - DNA, 434 bp, Homo Sapiens
  misc_feature (371)..(371): n is a, c, g, or t
  misc_feature (414)..(414): n is a, c, g, or t
gagtttgcacaactcctttattgaaacaaaatggactttaacttgtcacttatttcctatatcattaaataccttcattaattttctcttcagaaaatacttattgtgtatctttattttcaacactccacaatacttttaaataaacaacattttcagtatgaactatggtaagatttcatcattctataagggcatattatttagggaggtattccttcctatggcatttcctattttacagtaaactcaggtatcagggtaaaaattaactgctaatgttcctatcaacaattcatccattcctttttatggacacttttatcttggtatacaaaaaaatacacaattttccccaaaccttgaggggngttggaattttgtggtgtggtggtggacaataattaaaggccngtcaggtggggaccggggga

SEQ ID NO: 428434 - DNA, 183 bp, Homo Sapiens
ctccatgaatccttacctcgatgccaaatcacattaggctcccatccacctgaattcaccaaccaacccagctttatctattattccacacaatgaaactaaacgggtgacctcacctaatgccgtaagaaagcagttgtacaattcctcccactctcaccaggacactgtataacttaatgt

SEQ ID NO: 428435 - DNA, 446 bp, Homo Sapiens
  misc_feature (398)..(398): n is a, c, g, or t
cgcagtaagatgtaattttcttatgtatgtgcaacacactggcagtcatttttcattttggacagtgctaagtattactaatgacaagggtttatctgcctaataacccaaaggaaatcaagtgtaattcaaacttaagaaaaaagaaagccacatataccttcctcaaatccctcttaatgctcttttcaaaacatgaagcagtcaaatcaatttccccttctaacagaccaacactaatgtcaactagggacattttctagagctagtttgaagacaacttcgaagttccaagaatatttatttgtgtagctgttcattccaaaagggatagggactgtaggagactcaaacagatttgcacattgatccaattttaaaaaggcgcttttgaaagntcccgataaaagggaaggggattgagtagggaccataatctcccgagt

SEQ ID NO: 428436 - DNA, 251 bp, Homo Sapiens
  misc_feature (181)..(181): n is a, c, g, or t
accaccgtcttccagtaattcgacaaaatgacaaacacaaagggaaagaggagaggctcctggtagatgtcttctaggccttttaggaagcatggagttgttccctttggtcacgtatatgtgaatctggattcagcagaagtgccagtctgctctgcccagagaagcgcactgtgtgagnaacaaatgggaaggagcttgagctgctggaacctcttccctatggattgattcatggcataatcggtgtt

SEQ ID NO: 428437 - DNA, 443 bp, Homo Sapiens
  misc_feature (348)..(348): n is a, c, g, or t
  misc_feature (426)..(426): n is a, c, g, or t
aaaagagaggaagtttacttaaacctcttagagttatccctccacaaataagtaacccttccaagccacagcatcctgataaatttcccttggagctgcctcaggaaaaggtcagagctgatggtggggctgagcatgcacgcaaaccccatccctgctgctctggtcctcccagctggactgggcacaaggcggtcccctcggtgggtctcaggaatgtaggcaaaggaatgattttgtccaacctgagggccttctttatatccatgacttaatttttgttctatttaattacaataggcaatggtgtttcttatgaaggaacaatccaaccaaggatctcaggantgccaagtgcaattaggtcctaccagtccacatccgcagagggcccttttgggatccaagttgcaggggacaggggtngcttcctgggcttttac

SEQ ID NO: 428438 - DNA, 316 bp, Homo Sapiens
gaggcttaaacacctaatccttataaccaccttgaaggtaacaattcctcccacttgacaaatgaggaagtgacgcccagcaaggttcagacatctgtcctgggtctgacagcaaataagtcaccagccagtcacctgagctgccggagccagtttcttcatgtacaaaactgggggtgcagaggttgacggggtgactaatgagggcacacaaacctgaaggaggcccgggctcggtgtgacacctgggctgcacccaacatatttaagttccttacttccctcccctgggcacaaaggagccgagctggcacag

SEQ ID NO: 428439 - DNA, 449 bp, Homo Sapiens
  misc_feature (299)..(299): n is a, c, g, or t
  misc_feature (375)..(375): n is a, c, g, or t
  misc_feature (380)..(380): n is a, c, g, or t
  misc_feature (417)..(417): n is a, c, g, or t
  misc_feature (437)..(437): n is a, c, g, or t
ctaaaggagtttgtgagattatagattaccgtgaaaggggtttgcaaacaaaagttggcagagttcctatttgtttctcctggtttggcataaaaaggaaatacaaagctcagtgctgaaggacaagagagggctcttcaacttgctgaaggagtggaaaagaactaaaaggaatggaaagaacttttgtgaaacaatgatccattggcattataccatataaatcatgatggcttgacataaaggagagaggcagaaatagggcaggagcttgggaggttaaagggttttgcatactnaaactgaggacatttgaactacaggttcttaaaatctacaatgacaattttaaagcattgctactagtttactttnaaaangcaacagtctatgatagaccctccttgggggcccccntggatcctggtccccccctncctggttccagt

SEQ ID NO: 428440 - DNA, 329 bp, Homo Sapiens
  misc_feature (25)..(25): n is a, c, g, or t
  misc_feature (30)..(30): n is a, c, g, or t
  misc_feature (39)..(39): n is a, c, g, or t
  misc_feature (47)..(47): n is a, c, g, or t
  misc_feature (72)..(72): n is a, c, g, or t
  misc_feature (75)..(75): n is a, c, g, or t
  misc_feature (116)..(116): n is a, c, g, or t
  misc_feature (241)..(253): n is a, c, g, or t
  misc_feature (308)..(308): n is a, c, g, or t
ttttttttcgataggcactattttnattanaaccatttnacaaatanagaaactaacgcagagagggagtanttntgcccaagaccacacaggtaaaaaaaggctaaggtggtatnccaacccagacagtctggctgcagtctgtgtcctaagtccaatgctgtcactctgtactccctaaatctctccatacacttcagtttcacctgttcttttgtccctactgattcctagacaatgnnnnnnnnnnnnngtcttccatatggacactttcattccccatacttttctgtgaaggaaaggacgcnggagggtaggcaaaggacagg

SEQ ID NO: 428441 - DNA, 428 bp, Homo Sapiens
  misc_feature (41)..(41): n is a, c, g, or t
  misc_feature (104)..(104): n is a, c, g, or t
  misc_feature (106)..(106): n is a, c, g, or t
  misc_feature (227)..(227): n is a, c, g, or t
  misc_feature (250)..(250): n is a, c, g, or t
  misc_feature (266)..(266): n is a, c, g, or t
  misc_feature (402)..(402): n is a, c, g, or t
tgaatcgagaaagacttgataagaggccaggggagtggganctggacacagaccactgatctcaagcatgtccagtttttagcattaaagacttttctattctntnctgatggcagctacaccgctgaaaaaggaggggcagcctggcgtgttctcaggacccccggaggatcccatattgggtgcttttctttccctggctctatgcagaggggcctgagttggtntgtatgcctgagtgtttgccttncgaggcacagtgggtngctgtcttgcctttgttttcgaacctaaaaccattttcagccttttagatatgtcatgtgctgctgcttcccgaagtggtcttgctttctgtttcgtaaagatgtgctttgtttttacacactgttattcaggggntttgggtgattacttgaaaaaattcc

SEQ ID NO: 428442 - DNA, 410 bp, Homo Sapiens
  misc_feature (100)..(134): n is a, c, g, or t
  misc_feature (207)..(207): n is a, c, g, or t
  misc_feature (255)..(255): n is a, c, g, or t
  misc_feature (264)..(264): n is a, c, g, or t
  misc_feature (274)..(274): n is a, c, g, or t
  misc_feature (340)..(340): n is a, c, g, or t
  misc_feature (382)..(382): n is a, c, g, or t
aattcagcatcttagttttaatgtaattataaaagtcaccaaaaattgacagaacactagaaaacaagtaattgctaaatcaaaatagaatatcgtatannnnnnnnnnnnnnnnnnnnnnnnnnnnnnnnnnncagttgccttctttcctagatcacgtatttctatcgttgttccttttttattgttcctgtgaccactgggagncactaggtaataaatccttaactcaaataggttatatttaatttcagncacccaagnctccaaatgncatcagctaaactggggttataggcatgggaggaatacctcaggacggaccacaggattttatttnttgttaaggattctatccaggactgaggggcaaatttataantaaaagtttctccatattcatagggata

SEQ ID NO: 428443 - DNA, 418 bp, Homo Sapiens
  misc_feature (312)..(312): n is a, c, g, or t
  misc_feature (352)..(352): n is a, c, g, or t
ttttttgattataatgcatataatagctttggggaaaattactgaaatgataattgtgatagtctttacttaagagaaatctgcctgtgatattataaatatatactgaatacttctgttaacagtcatagaatttatgctgctatttgtgtatgcagggtaataatttcctaagcagcctgttttataattacaacatgtttcttgaatctctcttaagattgacaggacacatttcttgcctacttgactttttttggggagttctaagttagggaatgataatattgctaggtattaacaggagtcagnaataatatacatggatgcctttaacatttgggagttttgnaaggattttaggaatttctttttgtgtggtacaccattcaccaaatacagttgaggcatatagccc

SEQ ID NO: 428444 - DNA, 429 bp, Homo Sapiens
  misc_feature (53)..(53): n is a, c, g, or t
  misc_feature (78)..(78): n is a, c, g, or t
ggcattttcccttcttctctgagattgtggggaaatgttggaggggacttctnagggtgacagggccgggtgcctggngcagaatgcagccacttgggggaagtaataccagatgtgacgctggtgccaacaatcagcctgaaatgtaaacgtgagctgagctccagtaataaacctcttacagctggagcaccagggaatgccagaaaagaggaacgaggccttgcttcttaactcaggatggatcaaaatctggtctttgcatatatttatgcccacaggcatcctattttgcgttttcagaaaggtgatccgtcttctcccaagtttattgggagggcggtttttcccaacaccacttttttaaaatatttacagggcgggcccccatggatggcatgggctttcgttttattaaccccacaggca

SEQ ID NO: 428445 - DNA, 376 bp, Homo Sapiens
aataaataatcgtaactgctgttttatctgcctgtaacatagagagcacagtgctaagcattctccttcatagttattatccattacattagcattaatgactatgtatcactatccctcatttaaaaattatgtaaaaagagaaatacacctttaagtaaaggacatataagaatgttaggttttggttgtcatacattatttcttacctatgcttggtttttgtttgcttgtctgttgtttatcattctgtttgattctgagtatttccttctgtggttctgaagcactgttcacatctccaacataatgtgcagcatttcttcaaacaatctaggagagtaggcactgggaatttaaactaggacatacatgt

SEQ ID NO: 428446 - DNA, 500 bp, Homo Sapiens
  misc_feature (366)..(366): n is a, c, g, or t
  misc_feature (377)..(377): n is a, c, g, or t
  misc_feature (399)..(399): n is a, c, g, or t
  misc_feature (407)..(407): n is a, c, g, or t
  misc_feature (419)..(419): n is a, c, g, or t
  misc_feature (456)..(456): n is a, c, g, or t
  misc_feature (461)..(461): n is a, c, g, or t
tcctgtctaataacccctctgagaggcagacagaggagtaagacacacagaactaagagtgccagcttgctccttcctgtctttattcctgattcagtattacccacagctagaaattgacaactcagtaacttcagatgtccctcatagtagcagatgggaatgtaccccctctctaaaggcaaaagcagatcaagagaaaagagagcccagatgtctcttagctgagggcaggcctacctagttttttctcccagattctctcttgtggggaggggtgggtgaggataagaatagccagtagttcagtagttctcagccttctctgtgcatcaggaatcatctggagggagctttcttaaaaantacggcatgtntgggcatccacatccaggaggntttagganttcactttgttntggggggtgggtatttttccatggaacggtttttttngggtnggttttaatttgttaccaaccaggggtaggaggattcca

SEQ ID NO: 428447 - DNA, 474 bp, Homo Sapiens
  misc_feature (394)..(394): n is a, c, g, or t
  misc_feature (453)..(453): n is a, c, g, or t
tagtagattctgactgcaaaacctagccttttctattgattcattagtggtagtaaaggtattatctgatttatcctttttaataggcagtgctttgatcaagtgggaaatagtaatggacaaataaaatcaatgatcattatctaacttgatgcctgcttttcaaaaagtgagcaaatttcacatcttcacccttagacattaattcatggcacctactataagtactcatcctcttcttacctatcttcttttctataggagataaagtggttattcagaccccccaatacaattttttggtttgttttcacagctacttaaaagattaaaataactattcttgcagatatttctagggaatatttttaggaaataatatgaaatacagggntaatagggccaattatggatctttatttttaatttctacagaaaagtactaggggattntatcctataggaaacctcttt

SEQ ID NO: 428448 - DNA, 540 bp, Homo Sapiens
  misc_feature (373)..(373): n is a, c, g, or t
  misc_feature (477)..(477): n is a, c, g, or t
  misc_feature (494)..(494): n is a, c, g, or t
  misc_feature (501)..(501): n is a, c, g, or t
  misc_feature (527)..(527): n is a, c, g, or t
aactaagcttcttcatgtaattattcaagacttagaagtaataatatgcctaaattccaaaagatggtttgaaaggaatcttactagttcatttttacattaaccagtgggcatttgcttaaatgagggagtttccatttgaatggaggttaatgtctacgaaaactagggagaagcatttggagagataacttttatccctaaggttttcacaatcccacaacctcatttttccgaagtcattctatactacctattggctttggttggttaatccttttgtataaggcaggtaatgcggcctttcctatcaaaggtaatgaaaccattagtgatcagatctcttgactatcagcaccaagccacaagagtngctggacacttaggagttcaagtgttaatgtcaagctgggctgttgacaagcaggaggctttcctcagtttcacttagctgagggatacttgtgggttgaattnggaatttgacaccccgngaccccntatgcctgttctactcggccttattntcttatccatgtt

SEQ ID NO: 428449 - DNA, 549 bp, Homo Sapiens
  misc_feature (476)..(476): n is a, c, g, or t
  misc_feature (483)..(483): n is a, c, g, or t
  misc_feature (504)..(504): n is a, c, g, or t
aagcccacaagcacctcacattcaaatagctgaaacagcctatcacctttcctcagacctgaatctcctgcttctgttttccctgtctcatgatgggagatgtgagacagggaaaccattgtctcatgatgggaggctgtgaggctaatggaattattattctcctatcatttaaaacagaaagcgcttgagttgtccttgatgcctacattttgcctacacagtcaattatccttaaaccctaatccctgtttctcaaatctaactcctcctctccttctctcaactctccctgggcctagatgtctctcacatagtcttttggaatgtcttctcttctcgcatagtttcacttccttgagtacactgatcacatataggctactcttacctttctaaaatataaatctgacttggaattctttaatgtcctctaatacttccaccggggcataaaaaggtgccaatgaccgggntttgccnatctgtaatgggttattggcnagtctttttcaggaaggcatttcctttctttcaaggggactggtt

SEQ ID NO: 428450 - DNA, 166 bp, Homo Sapiens
  misc_feature (75)..(75): n is a, c, g, or t
  misc_feature (113)..(113): n is a, c, g, or t
caacagctttccacacacccccaagcacctctaaactaggggcagctacaagccgcagtggaaaggcagggattnggcagaagcagcacacacgctagacacacagaggggcntctgtggggaggctgccctgcacagggaccctccgccctgcacgggaaccctt

SEQ ID NO: 428451 - DNA, 447 bp, Homo Sapiens
  misc_feature (397)..(397): n is a, c, g, or t
  misc_feature (419)..(419): n is a, c, g, or t
gaaacaatagtaagatcagggactatgtatgatgcctatatgtgccaggcctgttgtaatcattttatacacactaacttattcaatgaacacatagacacaaacccacacacctttgagctatatcccattgtgatcatcctgaggtacacagaaagtgctttgttcttgtcacagagctaggaagcagcagaggcaagagttgaaactagccagtctgtagagactcgcatatttcatgccaagatgtttggacaagagaggaactgaaggcatgctaataatgtgattaatatccctaggattctgactaagtttgtgggaagttattttattaagggagggaaagctgggaggaacccaagggccaacaggttctttcttggggggttcaggntggcagttaggccttccaaggntaggccaggaaaggagggtccagttgga

SEQ ID NO: 428452 - DNA, 398 bp, Homo Sapiens
ttccacttataccttctgacaagtccctaaaggtcttgaaataaaaggttctatgcaagtgcaaagttttatagttatttttattgctgattattactattactatctctgttgtcttaagagtatgtgctgatttcagagatatctcaaattgaaagaatatcagattgcttttaaagtagctgaacgagccacagaatatctgaaattattcattgttgttcctccaccaccccctttctcatgggtctgatttttaggaagagtgggcatcctcgttctaaaatgtaatggatcaccaaatacgggccttccattcaaatttgtggaaaactacaacagtattaacagtggacaaacctaattctctaggccccaaaccgggggctggacaatcc

SEQ ID NO: 428453 - DNA, 435 bp, Homo Sapiens
agataacaataaaaacaccgaaagccaaggtgaccatgtcaatctagaaccatgggttgcacgggacagagaagactgagagagaggatgcatctgagagggctgggacgtgtgcagaagccaagtttggatgggaagtctccagcaggcagtcctactcccccaagacagcatcttttgccagttgctgtttatggattttctccacactccaaatcacatacttatacctccgttcctcagttaccatctttagacaacagctattcactccccaatacctaaggatgaggcatttagcttcactactccccaatgtctggaacttttcatggactattttttgactcctggcatgaggcattttcctctttctggacaggcagtcgttggattccccagctctgttaaggttgagggacatcagtggcccct

SEQ ID NO: 428454 - DNA, 127 bp, Homo Sapiens
ttttttttcgaagaattcaacaagtttctttactgcaatatgtcttgaaggcattaatatcatatgtcatcaaatctaagatacaccctcaattggaagatgtgtcattatttaacatattactaag

SEQ ID NO: 428455 - DNA, 465 bp, Homo Sapiens
  misc_feature (428)..(428): n is a, c, g, or t
  misc_feature (436)..(436): n is a, c, g, or t
ctgcatgatgcatcttaattgcatattatcaacatagtttgctattcagcagggacaatttcataattgctatcttcagagaagtaaaataatagagggcttcttctattaacatttagtaaagtgttacaaatagcacttggtgaatgaagggcttcaaattattagaaggacataatattggttacacatgttcacagaataaggaaagatatttttagttcctttcagtatatcaatttctgtgaaataaataggcattctgcaagtaatgatatgttactggggcaagtaaaggctatgttgttaatttataatgaccggggtaggaatgtaatataaatggggatgagccaaagggaaattcgttgggttcactgctggcatccaaatctggaactctgaggttttcctcccctatatccctnccctttantgctccagctccaaattggttccccaggg

SEQ ID NO: 428456 - DNA, 226 bp, Homo Sapiens
  misc_feature (43)..(43): n is a, c, g, or t
  misc_feature (61)..(61): n is a, c, g, or t
  misc_feature (70)..(70): n is a, c, g, or t
  misc_feature (77)..(77): n is a, c, g, or t
  misc_feature (84)..(84): n is a, c, g, or t
  misc_feature (97)..(97): n is a, c, g, or t
  misc_feature (124)..(124): n is a, c, g, or t
  misc_feature (139)..(139): n is a, c, g, or t
  misc_feature (150)..(150): n is a, c, g, or t
  misc_feature (158)..(158): n is a, c, g, or t
  misc_feature (172)..(172): n is a, c, g, or t
  misc_feature (189)..(189): n is a, c, g, or t
  misc_feature (210)..(210): n is a, c, g, or t
gaacccgttcccgacaaataccaggagatgactttactttagncctaaggatcttgctagncagcctttnagagggntgaaggntaactagagcagnagcaaaatcgcaggcgaagtaggactncaacaattcaaggtnaaaaaaacctnaagctccntttcaacacctcangggtttttaggaaaagnctctttaacggggcaattttntttttgaaataaaagg

SEQ ID NO: 428457 - DNA, 417 bp, Homo Sapiens
  misc_feature (15)..(15): n is a, c, g, or t
  misc_feature (71)..(71): n is a, c, g, or t
  misc_feature (117)..(117): n is a, c, g, or t
  misc_feature (128)..(128): n is a, c, g, or t
  misc_feature (208)..(208): n is a, c, g, or t
aacttctgggctttngagctctcagagggggtgtccaagagacaagtctgcttccttccggctccgtcttngaacattttaatgactgtcagtcaccaatccaacccatccccagtngcctaccaggnaccacattgggatgagactcatgctacccttccccaggccagccaaggagcaatccacgctgtcccccatccctgggctngctgtcttatggtgcttcagcccctccgcccagctcctgtgccctcatgagcctggggtttctgtataaaagatgcaatgatatctgttccccactagccatccccacaatgaacaacttcccagggcaatagcaaatggctccatttccaaaagggcttgtttttttggtaaattaaataagagaccccatttaagacctttgaaagt

SEQ ID NO: 428458 - DNA, 420 bp, Homo Sapiens
gactttatcatcctattttctgaatccagtggctgactttaatcttctctggaggaactagataatttctagactaatgcttacactcatgatccagattgtaatttctgaactccttcttccaaatagaatcaaaacaagaaaggggaaagcctctcaaagcaactgtgcgttaataatgaaacactctttttttctaatccaaggagggtttcatactttttcttagtttcttgccctcttcccttctgatcaataattgtaataggaaatttgcaattgtgccaatactcagattcaatactgaactactttcttgcattgtaattcaaattccaaggttaacaactaggctgtatgtttccaaaacaatcttattgtatatgtattttcttagggtgaagtttccagaaatggagc

SEQ ID NO: 428459 - DNA, 328 bp, Homo Sapiens
  misc_feature (75)..(85): n is a, c, g, or t
  misc_feature (300)..(300): n is a, c, g, or t
ccagcaaacattctcttaatcttttaaagtaaccagtaaatctacaaatagtaaagtactattttcatcagggannnnnnnnnnncttattttctaggattttacaaaaacaatgtgaaattattttgggaaagataaggtagggattcttgaataaatctgaagggtcttcacaattaagtgaggaaacaccttttaaaagcataggtaaaggcttacacctaaattaacttaaaggcctaaatccattggtaatgttttgtttaggccctgcctcgtggccaggttgggggtaattcngggggcataggcgttttcccttgtggaa

SEQ ID NO: 428460 - DNA, 539 bp, Homo Sapiens
  misc_feature (202)..(202): n is a, c, g, or t
  misc_feature (247)..(247): n is a, c, g, or t
  misc_feature (413)..(413): n is a, c, g, or t
  misc_feature (420)..(420): n is a, c, g, or t
  misc_feature (447)..(447): n is a, c, g, or t
  misc_feature (462)..(462): n is a, c, g, or t
  misc_feature (472)..(472): n is a, c, g, or t
  misc_feature (519)..(519): n is a, c, g, or t
atgtgtttactttcctgtgtggctaaaaatgtctgtaaaagtgtacagatttgttttccgtggcattttaaaaacataaatgatgtcctggtgcagctgtgcagaacttgctgttcacactgaataatgtgccttcgagggccttccgagaagccagcgtgcagagacttagccaagcgcttagcctgccacgacccttctngaaatgttacctgttattattattaattgtagcaagccaaaattnggaaagaggctgaactgggatttgtagactggggaaaactccagatttttaaattggtttccaagatggttaaaccaagataacaccaaatctaaggaactagggaaggcgtaggtcttcgcagcctccattcagttcaagttgattttgcaacgctgggtcctgntttccanaaggtctggggcacagcggggaggagnagggcacaagggccnatttttttcntctgtttttgtttcaggttcgtacccagggaccagtttttggggccntttgccagggaggagaaaag

SEQ ID NO: 428461 - DNA, 129 bp, Homo Sapiens
taatagaaattcagaattcctaggcatatgacctagactaaaatgtcttcataactacaaatgaaatcagggtcatttatagtacaaactaccacagaagtcagtagttaggggatggagatagatatg

SEQ ID NO: 428462 - DNA, 178 bp, Homo Sapiens
catgcccggcctgggtttcacttttgagagcatacctaagtctccatgacgcttaggaatcattgttgatttttcttgggtcctcatttagtgtgggagggacaaagctagctgggaaacagatttcaggggcctgcaaaaagggacagaggttgaggaggggttgcagaagggagac

SEQ ID NO: 428463 - DNA, 159 bp, Homo Sapiens
  misc_feature (113)..(113): n is a, c, g, or t
tgacacccatggccgggctgaaaaataaccctttagatatctacagctttaaactgtgtgcagtcatgaaaagcagacattgggaagtcattgggcatttaataaattgcagnaaaaattattacagtaaatacattacaatcattaattaatagggtt

SEQ ID NO: 428464 - DNA, 428 bp, Homo Sapiens
  misc_feature (337)..(337): n is a, c, g, or t
  misc_feature (407)..(407): n is a, c, g, or t
  misc_feature (415)..(415): n is a, c, g, or t
cttggttttgtaggcatttatttacatcatatttcaatacttcagaagcttaaacagtgtcaggggtatagcagttctgagaaacagttttacaagaagacataaactaaggggtacccatgagtgcgtctcatccttcctctcccaggccagagtaacaggtatgctgagatgctcttgcccttggccccggggtgctcacctccagcctcgagctgcctcacccagttagccagggggctgcacaggtgtttgcgtgtcctacatgtggcctgtcatgaagaaggtccgcatacgtggctctaggctgtgcagggcaagtcttcccaagggactnaaggaagtcaccctgaaatcctctccccatgagggacctcttcctaagtcagattttctcactgctcctngttccagntcctgttgccatt

SEQ ID NO: 428465 - DNA, 439 bp, Homo Sapiens
  misc_feature (111)..(119): n is a, c, g, or t
  misc_feature (360)..(360): n is a, c, g, or t
  misc_feature (389)..(389): n is a, c, g, or t
  misc_feature (402)..(402): n is a, c, g, or t
aattgaaatatatttaattaatgtaatcaaaaggcatacagttgaaatatattttgaaatttagtggggtttgtacatagacatttttataaatgtaacaaagcaaacaannnnnnnnnaaaaaaagtagatctgagagcaacagtgttaaaattatgaccatttcaactcataactgggacatatatttgattcctaattctaatcccataaaacctgccagctcttcattaggatcctgatatggcttgctttagaacttacacttggtagatattttaacagaaggcacagatacaacacaaaatatctcactagtccttctgtttttatacaggttgaggcatccgtaatccaaanttctggaaatccaaatacccccaaatccnggaacactttggngtgctggacataaccttcagggggtgctcgttggagg

SEQ ID NO: 428466 - DNA, 477 bp, Homo Sapiens
  misc_feature (129)..(183): n is a, c, g, or t
  misc_feature (370)..(370): n is a, c, g, or t
  misc_feature (411)..(411): n is a, c, g, or t
  misc_feature (423)..(423): n is a, c, g, or t
  misc_feature (450)..(450): n is a, c, g, or t
  misc_feature (460)..(460): n is a, c, g, or t
agctgcttttgcgatagacagaaccctggagttctctactttgccattttcagcccatgttatgcattatagtggacataattttggttgttgaataacattctaactagcagatgtactgtaatttannnnnnnnnnnnnnnnnnnnnnnnnnnnnnnnnnnnnnnnnnnnnnnnnnnnnnnagataaggctacaatgaaaatctttctacatatagcttttaccatttcccagattctttaggatgcgttcccagaaatatagttactagggtctgaggaatatgaccattttaaggattcctggatactatgatcaaattgtccaaaaagattttacgggatttttatttcaacctcacggagtaanccttaaacttaggaatttttctggaaatggttttgtccacngggccaaagtcngttgaggaaggtggataccatattttnaaccttcccnttttaaaggttttaaag

SEQ ID NO: 428467 - DNA, 148 bp, Homo Sapiens
  misc_feature (39)..(39): n is a, c, g, or t
  misc_feature (80)..(80): n is a, c, g, or t
caaccccttaggatccctttccttgtagattcttaaggnttatatctctaatttggcaatatctttgcagggttttcttngggggtgggtcacgctttgtgatttaacctctgggttacatagaccttgaaaattaaacactgccttt

SEQ ID NO: 428468 - DNA, 436 bp, Homo Sapiens
  misc_feature (419)..(419): n is a, c, g, or t
gctggtctgtatagagttagtctcctgaaggagaaaagaatcacatgatagctaagtaaaacaaaaactaggatgtaatagattttaagtaacaaacagaaaatatagacaatgagggcagagtcaaagttaggaccaaaatgagtttacttttagttaaaagtaataaggaagcaagaactataatcaagcaaaagcaatatagggtgaaatgtaagaattagtgaattggaggtgggaagcccaggtaggcagatctgtagaaggaatctatagagtagaaatgcatccgttagtaatgatggtcattcctcatgtttctgattctcaaatgcatacatactctctcagttccaggaactatccttcagttcctaattggggaggccaagcttatggtgtgtcttggattgccaganttgtattgtggataccc

SEQ ID NO: 428469 - DNA, 400 bp, Homo Sapiens
  misc_feature (221)..(221): n is a, c, g, or t
  misc_feature (371)..(371): n is a, c, g, or t
acaaggggcaaattctaagacataattggcagaaaggagggcatgtcaaaaacacagaattgtttgttgaatcacatcaggcaagtcacattcaaaacaaacactcagaattgcctcaagatggggatcagagtacatgctgcacttcattttcctatcaaaaatccctatacgtatcagaagacagagacccacagccagacacactccccacagggtgnaagagtagtgatacaagattggagtagccagggagtcctccacctccatacatacacttgggaccaggggagtgagaaggagatatgattttccaccaccatcctcagaccccacctaggccctgctgggagtagtaaattccccgggtnggctggactacattaggtagggttcagaa

SEQ ID NO: 428470 - DNA, 393 bp, Homo Sapiens
  misc_feature (117)..(117): n is a, c, g, or t
  misc_feature (168)..(168): n is a, c, g, or t
  misc_feature (318)..(318): n is a, c, g, or t
  misc_feature (333)..(333): n is a, c, g, or t
atggggagggagctttaaccatgccatctcctcacagctggctgtccacagaactcatcttccatgtcgggatgtgctaggggtgcacgggagcgccattagtaatttcacccaggncacagcatggacctcgctggcctgggcaaatcagaccacaagtcagccctntcccatcgccttctcagccctgcgaggctgggccacgtggcagggactagacttgtcagtttctttatcacccaccccatgtcaagtgctgaaaatgcaatggccttcactaattgtgcagagccctgactgcccccaagtacatcggancttttcataaaagtnttcacaggaaacacctttcctgtggaccagacccgggttttttagtgggtttatttaatt

SEQ ID NO: 428471 - DNA, 500 bp, Homo Sapiens
  misc_feature (95)..(105): n is a, c, g, or t
  misc_feature (200)..(200): n is a, c, g, or t
  misc_feature (306)..(306): n is a, c, g, or t
  misc_feature (319)..(319): n is a, c, g, or t
  misc_feature (331)..(331): n is a, c, g, or t
  misc_feature (340)..(340): n is a, c, g, or t
  misc_feature (349)..(349): n is a, c, g, or t
tgctgtactaaaatgatctgaaaacccaagctcagcctaacaggatcactgcctgcattcttctgtctgcagcaagccgcaaaggaagttccttnnnnnnnnnnnggaggctcaggtcatgaggagacaagataggattcttgtgttctgtcttttgacacaatcagaactcagcaatattttgagcctgctcatgcagnttaggtttggcttcagattagtaaagtgtaacagaaaaaggcaccgttatcacatgaggtcccaaagattatgcaacatacaaagaaggtgggacagatggctccngcaaacgccaggntggtagcttctnggggaaccnaaggcactnggcatcaacttttcttttaccccaccattcacccattaaggtttttcttcaggctgggggttcccttcagttgaactttcagttccaattgtattaaatttgttaaaaattaaaccaaggggttttttttccctttaaattctttttcttc

SEQ ID NO: 428472 - DNA, 303 bp, Homo Sapiens
aaaaagggactggctctagtttttcagttataactgaatttgccatgtgggtataggcatagtgtaaattacattaatgtagtaaaacatcaattgtggttcggtttgtctttcatttatgtgtagtatagaaatcacctttctaatatgtgttgccaaactatttgccaccatctatttggtgaaatattcattgtcattgtgattttccacaagtataagttcttaagtactttatagattcagaagtaaatgctgtcctgttctccatcagctgttcgtttgttacagattttgtatttc

SEQ ID NO: 428473 - DNA, 163 bp, Homo Sapiens
ttttttttcaatcccacagttttatttgtaaagaacaaagcatgaaaagtcatatttaaatgtactcccaaacctgaaaaacccacgtcagtttgtctgatatgtatgttaaagtgcttaatatcacaatactctttcaaattttatattatgttcagatgag

SEQ ID NO: 428474 - DNA, 285 bp, Homo Sapiens
  misc_feature (62)..(62): n is a, c, g, or t
  misc_feature (203)..(203): n is a, c, g, or t
  misc_feature (212)..(212): n is a, c, g, or t
  misc_feature (221)..(221): n is a, c, g, or t
  misc_feature (256)..(256): n is a, c, g, or t
  misc_feature (267)..(267): n is a, c, g, or t
gtcattttcaggcattttatttgacctatcagcagctatttaaacacaagttaattaaagantagcaattcacatttactatgtaaatgatttacaatgagcaatcttgtttttataaaaatcactttaaatgcttaagcaataaataaaaattcttgctaaggaaatgacataattcaaaagggcagcagggtttcatagancattctagnctaaaggantagtgggagccaaaacctggggatgagggaaggancactgaagganccacttaggaactctagg

SEQ ID NO: 428475 - DNA, 263 bp, Homo Sapiens
  misc_feature (233)..(233): n is a, c, g, or t
accatccttatgagatttttgaaaagatgtggagatgtggccgaagtcactgaaggcttctgatctcccacatggtttctgtgtaggtggaataaaaagagatttagaagcttggggaaggtggtgaaagaggagttttggtgttgtattctcttcctggggaaatctgctctagccccgaggttatgaggagaagttactgcctcagggtgatgacagcagcgaagggagtnaaggcagggcccttcccaatgtggatgggc

SEQ ID NO: 428476 - DNA, 434 bp, Homo Sapiens
ggacgaggaggatctctttaggacttttgggagaggggctcacaggggaaattgtgactgaaaacttctgactgattacttctcagttagaagcccatacattcttctgctgcctgattatcatgattccctaggatccctaaattccctactgatctaccccaacactaagtaagtcggtctttccttttgactcagagagagactgaaactaaaagttactgaaggaaaatggatgactacttggtcctggatggagatcatgagcctaagggctggcgctctttgggccatatcctgcttataggatttgcctctggtatgggcatgaggagacagaccatctggcagggtatctgagggtggtctgaatgggaggagcatgggggggaattaaacagatgggtctttttattccagagaacacgaggttt

SEQ ID NO: 428477 - DNA, 477 bp, Homo Sapiens
  misc_feature (89)..(89): n is a, c, g, or t
  misc_feature (91)..(91): n is a, c, g, or t
  misc_feature (382)..(382): n is a, c, g, or t
  misc_feature (434)..(434): n is a, c, g, or t
tctcttcaaaatgagttatagtccaggattgcgagactgcaggtcaagcccccagtgcagcagtgctgactgaggcagctgcgccaagntncctgccttgtctttcaactgccgtcagatgaaacagcgagtaaacagctcatcagatgctccactcttcatagaatgcaacttctaagaatactccaggtgacagaaatcccgcttccacactgcagcctccctccaggccagttctggaacacctcaagaaagcatgaacctgagcgtactactgcgcaggactggcttccctatgaaatcctcaacactccgcaaccccacagctattcaactttgtcctgcggtggctgtcaaagcaccccaccacatctggaatctnaattctctttagggaaaacaaaggcaaaagggccctggcaccaacatatttngaaccatgtttgtaggattgagtttgttaggtttccttcccct

SEQ ID NO: 428478 - DNA, 445 bp, Homo Sapiens
  misc_feature (204)..(204): n is a, c, g, or t
  misc_feature (358)..(358): n is a, c, g, or t
aactgcccattttgaggagagaagtctgcaggtatagttagtgctgctgagacatttccactctggcattctagagttctctggcttgccttgttgctttaaagctggttccaacttcgtgggctttatgattgagcaacactggtgattgtgatttctaataccaccctccagattcatgtcacaggtgaaagtctgcctgtngggagagctttcacattctcctgggagttgaaccaaaataaggaaaacatcaacaaacacagttaccaaaagcttccaaggagggatggaggagaaattctgttcattgcagatggggagaaattaaatgacatcaagtgcataatgggaactngggtagggtttcaaacttcaagtcccctgggttcaagttccttgaacttccactctggggcatggcttaagtctgggcctgtgtctt

SEQ ID NO: 428479 - DNA, 423 bp, Homo Sapiens
  misc_feature (400)..(400): n is a, c, g, or t
gcttttgtggctttaatacccttttggttttctgagcaagctgaatacattccctgataaacaccaccactggacaaaggatctaaacattgagatttttactaaatcaaggttttgagttggcacaatgttcctactaagtcaagtttcaattagcacatctttccaatgtcaggagaaaaaaagacaaggactactatgtcctacaaagaatggtgaaatattcctaaagctgtatatttatgaagaaaaggtgattgtccctttttatgcatgtgtaggatcttgttttaggccactatgccaggaaaagtctcagtgtagagggtctacatttcagataaatgtctctggcatttgcctacattaagtttaggctatttatcctgtccagattttntaaccacaggacattgaggtgta

SEQ ID NO: 428480 - DNA, 511 bp, Homo Sapiens
  misc_feature (46)..(46): n is a, c, g, or t
  misc_feature (432)..(432): n is a, c, g, or t
  misc_feature (449)..(449): n is a, c, g, or t
  misc_feature (483)..(483): n is a, c, g, or t
ctgtgtgaagacagattctcttctccatatgtaatgccactggaantacaaagtttttaatcatgggagaagctgacagggactctggcctgaataacatagaggttcctctttagtggtttccaagagacctctggggcctgttcagttcctggaggaaacagtccaataagggattgggaatttgcactcctcctcacttctttagagcgcatcaacccttcaagggatttctgtctgatgccccattttcctggtgatggggagaagatgggactacttgctggtggtgcaggagtgtgtgacactgtgctgctgcttgcctcagacaaaactgcttacaagggactgggcagagagacggggctttccttgcttagcatcacccataggagtagagcttgaaggaggcttcaaccctgccttttcttngggaagtcttcatgtanttcagggaaagtttttcactctgaaggcaggggnattttagggggccctgactgtggactga

SEQ ID NO: 428481 - DNA, 424 bp, Homo Sapiens
  misc_feature (406)..(406): n is a, c, g, or t
aaaatacatttactgtattctgttatctttctaattttgaagtgcctagatttatatcaagtgttctagggaagctgaaataacagaaatgcctgtctaagctatagtaggggcaaggaataatgtgatggttgtaagttctgggagaaaatatgctgacaggtatcaggcgtttagacaacataattttagtgaatctaggttcaggtctttcctcaatagcatgcagaaaaatgacactttaaggtagagccttccatcctgtgtgcctgggtacaaagtggccaaaggatggtcaagatcccctcacaattcaggtcagacaggagggatgtagggtagcaaaactctgttcatctaccgctggatataagtaaccttgtctgtgatgcctagggcactgtancaattagtatactttccc

SEQ ID NO: 428482 - DNA, 322 bp, Homo Sapiens
  misc_feature (290)..(290): n is a, c, g, or t
ctctcatcttccataattttttggtgttaagattaaaacagattgcacagccaatataagggcacataagctgcccagagtacagtttggcccttaaagagaaattttcattcattgtctttatcagcactcctcaatcaggtaaatgaagataaacttgcccctaaattcctaaggctctcagcccaatttccagtattgtacttaggcagacagggtgtgggaattttcaaacggtaagtgggcaagggaacatcaatttaatccagtgggaggaagccctcatcttntctgggccacccaaaggacagtggacattagg

SEQ ID NO: 428483 - DNA, 442 bp, Homo Sapiens
  misc_feature (400)..(400): n is a, c, g, or t
  misc_feature (427)..(427): n is a, c, g, or t
atgtacaaaagactaacaggttacatccattctatacatgcagggatttcataaaagttaaacacttcttcaaacctgcacacacaaatccatactgtggcatccagagtttctttaagcctcacactgtatcagtacaaacatcctacagggaattaattcactgagcacagaacaaatgtgtaatgcaaagagattaccaagtcacctccaccaccttgatttatataagctcttctgttttagcaacacctgggaggaatccagtgggtctgtgcttcagtggtctcaaggagctcttcatgggcagttctgtaaggaaagttgctgggctttaacgcagggctggtttccaatataggggcagctgttttctgctgtggagtcttctgggaggganaaagatggggtttcacgggaaactganagtaacttgaaaatt

SEQ ID NO: 428484 - DNA, 442 bp, Homo Sapiens
  misc_feature (142)..(142): n is a, c, g, or t
  misc_feature (233)..(233): n is a, c, g, or t
  misc_feature (321)..(321): n is a, c, g, or t
  misc_feature (345)..(345): n is a, c, g, or t
  misc_feature (361)..(361): n is a, c, g, or t
  misc_feature (372)..(372): n is a, c, g, or t
  misc_feature (406)..(406): n is a, c, g, or t
  misc_feature (413)..(413): n is a, c, g, or t
actagtccctgtatgttaaatatttgacctcttgtcttattatcccgtattgattgtaatttcattgagaagactgtatgcatttatctttgtgtcccatgtagtgcctgggtgctgtgccttgcaatagtagtagctcagnaaatatatattaatttgaaaattgccactcaatttctccctcagcatatttcttagtactattccaaacacaaaattcaagacaagatcangtaactttaatacagtatactattcaggcatgttcttacaccattattataaatatttattcactctattaatctccatggaggatanacagggccaagcataaagtatatnaaattcttgctatggnccttttttccnggcttcaccattaagggttgcaggctttcagggngtttggnattattccatttggggggaatatatattc

SEQ ID NO: 428485 - DNA, 484 bp, Homo Sapiens
  misc_feature (26)..(26): n is a, c, g, or t
  misc_feature (437)..(437): n is a, c, g, or t
  misc_feature (445)..(445): n is a, c, g, or t
tagtgctttgtggaaatactgtttgngaaccaacacattaggctagaccatgacaggtccaggttaccaaagagaacagtaaacacacaaatgtgtgaatccatgagtattagatacagaatgatctgtaaggtttccagggtgtggagatatttgttgggaaagagagtattagtccaaatctgagaagtcaaatacaaaggccaagaatttaaatggtttatcaagttgaaggataaagcaaggtttggtatcagatggttaggcataaggttacgggtgtatatcagaagaggagttctcaattccaagaatgtggtccatccattgctgtctggtcttaaatactctgctgagctagcaacctggtcttaaagggatcgaataatgtcagacaggtctgtgttcctttcttccttccccgttcacttttattnagtagctncagtaagggaatggtgggacaaggggcagaaagggaatc

SEQ ID NO: 428486 - DNA, 525 bp, Homo Sapiens
  misc_feature (22)..(22): n is a, c, g, or t
  misc_feature (58)..(58): n is a, c, g, or t
  misc_feature (66)..(66): n is a, c, g, or t
  misc_feature (72)..(72): n is a, c, g, or t
  misc_feature (503)..(503): n is a, c, g, or t
  misc_feature (510)..(510): n is a, c, g, or t
ctttgaacatagacaatgaagngttatttttatttgggaaaaagtgtagtaaataagnaaaatagncatagntaaggctgctcttgcactttcgtacagcttcagccttttcatgaaacataactcagatgatcttcttctgaattagtgaaccctgatgttagttatataaccaggggaccacggtgtcagccttgttattttaagggtcttttccagtctgcaagacccaaccaatttccttcacctttcacatgtggacttctcattgttactaaactaaccatcccttcctgctcatctctacacatactttaggacttattgatttcatggacgttcatttgtctcacaaacttggtgatatagaaactgcattttctgctttgtgcaccccttagagagcctagtgtggttcagacaaacctgatgagatgcacaacttggaggtctcgatttctcatctgtaaaactgggcaagttgtataagggttgtgatactntacaggnaagtgctaaattccg

SEQ ID NO: 428487 - DNA, 139 bp, Homo Sapiens
ttaagctgctccttgaagtgtagggagtatctggatagcttgagagacgagtgggcaatttcttatcagagagtagtaggtgggaaagcacatgatctgtcccagggacagaggaacagaccaatctgctgggtaaagg

SEQ ID NO: 428488 - DNA, 269 bp, Homo Sapiens
  misc_feature (160)..(160): n is a, c, g, or t
  misc_feature (239)..(239): n is a, c, g, or t
ctaaaattaatctttgcagatgttttcctattataacttctgctggagaggtggtgatgggactctgctcccaaagactccacctgagccaggaaaagagaagctaagaaaagtcaactggcctctttacactggtatgatagccaccttgacactaggnagttccgaaatgttacatagcatctaactgcagcagaaagtgtatcagtatttttataagctcactaaaactgtaggantgaatatagacaattcagctacattttatg

SEQ ID NO: 428489 - DNA, 506 bp, Homo Sapiens
  misc_feature (124)..(398): n is a, c, g, or t
  misc_feature (421)..(421): n is a, c, g, or t
  misc_feature (476)..(476): n is a, c, g, or t
  misc_feature (492)..(492): n is a, c, g, or t
ttttggcagttataatcaaggaagagaaaatgaaagataatacatttagagtattaatgatgataaaagagacacaactctagattatatcaagcagatttttaaaattataaggcaaaactannnnnnnnnnnnnnnnnnnnnnnnnnnnnnnnnnnnnnnnnnnnnnnnnnnnnnnnnnnnnnnnnnnnnnnnnnnnnnnnnnnnnnnnnnnnnnnnnnnnnnnnnnnnnnnnnnnnnnnnnnnnnnnnnnnnnnnnnnnnnnnnnnnnnnnnnnnnnnnnnnnnnnnnnnnnnnnnnnnnnnnnnnnnnnnnnnnnnnnnnnnnnnnnnnnnnnnnnnnnnnnnnnnnnnnnnnnnnnnnnnnnnnnnnnnnnnnnnnnnnnnnnnnnnnnnnnngaacctgttttcaaaattattanacataattatgggtaaaactttacatggcacacttgcacaaacgtgtttttttcnttcccgttacaagttnaaattgttagggtt

SEQ ID NO: 428490 - DNA, 411 bp, Homo Sapiens
  misc_feature (14)..(14): n is a, c, g, or t
  misc_feature (21)..(21): n is a, c, g, or t
  misc_feature (201)..(201): n is a, c, g, or t
  misc_feature (363)..(363): n is a, c, g, or t
  misc_feature (383)..(383): n is a, c, g, or t
  misc_feature (394)..(394): n is a, c, g, or t
agccgggcggcgtncgcacgncgcgagggggtaccgccactgtggccttgggggacggaattcaaagcctgggaaaagttgctgcactttgagaaggacgaaccactagtgggagaccgccgggggccggccgtggctctgcgccctccggaacccggctcttgtttcttctacctttgccatcaggtgtctgccgcggantgcggctttatccgggagacgagcggggttgacacgcgcgcacacactactgccattcagctgccgcctggctctgcctgggagtagtggatcccacccgcccacctgccaccgagccattctccagtacgccccagcaggacgctgacacctgcaaccttnggcctttgccttttccactnctttcccggtnttgcctggtttttaagt

SEQ ID NO: 428491 - DNA, 442 bp, Homo Sapiens
  misc_feature (421)..(421): n is a, c, g, or t
tttttcttcctagactgtgagcccctggagttcagggaccatttcttaatcatattccagaacctatcacaatgaatgacacgaagaatatatttgataaaaatctgatgaatgaaccactctaaaatgcaactctaataaagaaaattactgcctattcagttggaactgtaccacgttacaaacgtaaaattatgtatagtctgataaagaaatactgtaatagccttgggaaacagctcacatacaattttttttataaatggattcattaccatataactggaccagcttactgaagagtagccctacaggcagtcacttcgcagtttgcaattcatttgaggttcaaagctaggctcaaggggaaaacaacgttagtatttaacagacttattttttaggctttaagggtcagganttttaagggggaattaaatca

SEQ ID NO: 428492 - DNA, 280 bp, Homo Sapiens
acattgttgaattctttattaattcaaaacattttaagaaagtcagtgtaatgcatatgcattttacaataacatccataggtttccacaatctagtaaaatgaaaacagctgtattttgatttactttgaaaactcaaacctatagttcgagacttctgaatatttttacattactgtcatgctcaaattctgttacatggtgaaaattctaggcattttccaggaagtatattattgtacatagggtaaaatgataaaattgattctagggaaggggg

SEQ ID NO: 428493 - DNA, 321 bp, Homo Sapiens
  misc_feature (261)..(261): n is a, c, g, or t
  misc_feature (310)..(310): n is a, c, g, or t
cagcctctcttgacttttatcacttgaacgagatgggatctaaactagtgtaaagcaagggatccggagccagaataacttactctgaaacaggcactacactgagactcacatacactgtatcacttattctccacaacaaccctatgtaggcaggtatctcacttttcagatgataaaactaaaactagtcttagggattattaaataacatgttccaagggacacctaggctaggaattgccacaccttgggattctngaacccggggtggactatttgggagccgggggtcctaaattcactaaangttggaggttt

SEQ ID NO: 428494 - DNA, 472 bp, Homo Sapiens
  misc_feature (405)..(405): n is a, c, g, or t
  misc_feature (415)..(424): n is a, c, g, or t
  misc_feature (431)..(431): n is a, c, g, or t
  misc_feature (451)..(451): n is a, c, g, or t
  misc_feature (457)..(457): n is a, c, g, or t
ctgggagctgcattgtggtgttttcaaattcaagggttataatttgcttgggcgtatatcacgacattccaggatttgaaggaaaaataatttgctcctaaaattgtccagccagcacttcttcccagctcttgtgggtggttagtaaaggtattgtagaggataggcagtcaggacaaaaggccctcatgaggaggatttcctgtcctggacacagaattccaaaaccaaaatcattcaagagatggagcagaagaggatgcggggaaaagagaatctatctcgagataatgtggggtgtagaatgtaattaaaatgtctatatgtgtggctatgggatgtttaatatacagattcttgtgttaggggattttagagaatcagatgggcctcattttaccaccnaattttaaannnnnnnnnnctagggntgttgttccatggaatcttnaagggntgttttggggtacat

SEQ ID NO: 428495 - DNA, 426 bp, Homo Sapiens
  misc_feature (373)..(373): n is a, c, g, or t
  misc_feature (415)..(415): n is a, c, g, or t
ggggcacacagtttatgtagatgtaaatgtggattttgttttaaaacacagaataccttccaccataaaactgacttcgggagagacatatcattctcaaattataggtgaatttaaagattttacttactacttttcctgacagaacatagatattaaaaataagcaagttttagtggataaaatcaggagaattataccaaatgcaaaactattaatccacttgtaaagaatacttgaagctctagctcccaaaacccaattgtaaagctgacaataaatttgttaaattaggttgtaaattaaggcataatttaagtcctccaaaactggaattatattctggcaggaactgtggggcaaatgcttactnttaattttaggtatttcactcagtatgtttcttgttttagcntgtgtattgga

SEQ ID NO: 428496 - DNA, 127 bp, Homo Sapiens
  misc_feature (102)..(102): n is a, c, g, or t
tgggaaggaagttggattccttaaccctcctggggtggactttggaggggggtttcaaggacttttaattgaaggggaggttcacctgccaggtgttgggtnggggaattggcccgggggacccggg

SEQ ID NO: 428497 - DNA, 470 bp, Homo Sapiens
  misc_feature (293)..(333): n is a, c, g, or t
  misc_feature (446)..(446): n is a, c, g, or t
  misc_feature (456)..(456): n is a, c, g, or t
attgctcagttgcactatttggggcacagaataatcaccaaaagtgagaaaaacgagtttgggtggctggggaggactttgggactcttgatgcaaggcgcaacttgagaaaattctgggtgtgatatttgcacagacaccctcctttcaaaaacagccaccccccaagctattctcagctccacacctgcagccccagctaaggtaccaggtctcctgaggcaaggcagagagaagccttgagccttctctgtgtcttctttcaagaaccccgctatgtcttctttcaagannnnnnnnnnnnnnnnnnnnnnnnnnnnnnnnnnnnnnnnngagatgggagtcttcactgtgttcacccgggctgaggtgggcagtgggttccaatcttccgtttcactggccaccttccaccttcccggggtttcaaggcgatttttcctggnttcagcctcntcgatagctgggga

SEQ ID NO: 428498 - DNA, 542 bp, Homo Sapiens
  misc_feature (488)..(488): n is a, c, g, or t
ttttttttcagagaggtaggtagaaccagtgtgagacttttattattctgaccagggaaatgtcctgggcatcctgttaattgaaatggacaacttcctaggctcaaaaaatctgtcaggtggacttgttgcagcaacataatgttaaccacaggcacagatgacatgagtcacattcgcaacatgctgctggttaaactgatttagggagataaaaaataaatgttggaaaataagctgatgatcacagaaacatacattaaaaaacttctaattcatactgatgaagaacatccttagtattgtacttcatttgcattcaaggtcacaaaagctgttaatacagagatcagggaaaaagacaggagtcttccaaataatttatgttgggatttgaaatgtcagatcctgtatcaacttgggaatgcagtattcattctcttgacatataaattgacactacttttgttctcaaaatgaggtttttncattgctctttggatagtgtctgtggtgcagtgtacacacaaaagcaatttgtg

SEQ ID NO: 428499 - DNA, 577 bp, Homo Sapiens
  misc_feature (20)..(20): n is a, c, g, or t
  misc_feature (26)..(26): n is a, c, g, or t
  misc_feature (103)..(103): n is a, c, g, or t
  misc_feature (121)..(323): n is a, c, g, or t
  misc_feature (435)..(435): n is a, c, g, or t
  misc_feature (526)..(526): n is a, c, g, or t
  misc_feature (531)..(531): n is a, c, g, or t
  misc_feature (556)..(556): n is a, c, g, or t
ttttttttgtgtaacttagngacatnaactcatcctaatgaggtttgacagacagtctttgtgcacacattagatgtttcctcagtctgtaaactgggtcagnaagtcttggagtcactgnnnnnnnnnnnnnnnnnnnnnnnnnnnnnnnnnnnnnnnnnnnnnnnnnnnnnnnnnnnnnnnnnnnnnnnnnnnnnnnnnnnnnnnnnnnnnnnnnnnnnnnnnnnnnnnnnnnnnnnnnnnnnnnnnnnnnnnnnnnnnnnnnnnnnnnnnnnnnnnnnnnnnnnnnnnnnnnnnnnnnnnnnnnnnnnnnnnnnnnnnnnattattattattatttccacccctccagggctgcctccacaggacagtgttgtgtacttctaggtcgtggtttgtagcacagatctaaacttaagagtatgtgcttatatanatacccagcatattgacccccagcctgtctaaactcagtctcacagctcccttagcttaaaagacaagaagggtagaccccggagcagagncaggnagccactcttcagctcatggacatnactgctctcagcttctacctg

SEQ ID NO: 428500 - DNA, 440 bp, Homo Sapiens
  misc_feature (41)..(96): n is a, c, g, or t
  misc_feature (331)..(331): n is a, c, g, or t
  misc_feature (339)..(339): n is a, c, g, or t
aaggtcaactcaaattatggcttcctgagttttccctgatnnnnnnnnnnnnnnnnnnnnnnnnnnnnnnnnnnnnnnnnnnnnnnnnnnnnnnnntaaattcagggcaaataatttactaccccacaatataggcttgagtaagtcttaacagttacgaatcagaatctttcacagaactgtgacttttaagtaattttattcttataaagtatcctcttaaccataaaactaattttcttaaagtatattaataattacaattttcccaacaggaaattttcctcaaatctatttctctttaagctttatgattttgcgttttcctggnacttattnacaatactgtagtcatttatatatttaagttgctcaaagcaagaaaccagttgatttgacaaaattaactcagtgctgggaatgcaggcagcctggggtct

SEQ ID NO: 428501 - DNA, 256 bp, Homo Sapiens
  misc_feature (45)..(45): n is a, c, g, or t
  misc_feature (75)..(75): n is a, c, g, or t
  misc_feature (110)..(110): n is a, c, g, or t
  misc_feature (142)..(142): n is a, c, g, or t
  misc_feature (147)..(147): n is a, c, g, or t
  misc_feature (151)..(152): n is a, c, g, or t
  misc_feature (155)..(155): n is a, c, g, or t
  misc_feature (164)..(164): n is a, c, g, or t
  misc_feature (185)..(185): n is a, c, g, or t
  misc_feature (195)..(195): n is a, c, g, or t
  misc_feature (226)..(226): n is a, c, g, or t
ttttttttcacttcagaaaagtttattaaaggtaaaatcagattnacagagtataaaacaataagggatagaggncaagaggtttcaaacaaactatgagtacaataganaggaaattacctacctggggttctcacagcanttttncttnnctnctgcacaangcctaatgtgttttttaaaanatccttgganaagcctcagcagtcatatattctcatgattnaggcagttaaacaaaatgtccacaatccac

SEQ ID NO: 428502 - DNA, 171 bp, Homo Sapiens
  misc_feature (132)..(132): n is a, c, g, or t
aatatctttaaactcagccccaagtcaggaatctttatgatagcattatgggctagatgatgaagtgggatctcaagggatattgagggggccgggcttcagggaattgagggctgctggcagttttctccnggaatcttatggaggaatttcaggatgggggcacttttt

SEQ ID NO: 428503 - DNA, 246 bp, Homo Sapiens
gagattaccttgtgagcctacaccaccagggccccgggttttaagtacaaaactgggtggctgtttggacaggcactgagcagcaggaattttttcatattcctgtggcacctggaactccagtgagacaggaaaactgtccactcccctggaaagggggctgaagccagggagccaagcgatcttgctcagtggatcccactcccacagagccccgcaaactaagaaccacactagcttgaaatt

SEQ ID NO: 428504 - DNA, 489 bp, Homo Sapiens
  misc_feature (340)..(340): n is a, c, g, or t
  misc_feature (413)..(413): n is a, c, g, or t
  misc_feature (434)..(434): n is a, c, g, or t
  misc_feature (458)..(458): n is a, c, g, or t
  misc_feature (469)..(469): n is a, c, g, or t
  misc_feature (474)..(474): n is a, c, g, or t
gagtttctgtgtggagataccctgagcaacgttgaaaacactggatcctttgtgtccgggcttttccccttggcactacggatgctctggcccagaggagcctttgtgggaggctgtcctcggtgcctgcggtgctgagtgtcacccctgcctcccaccctctggtgtggccccctggagcccttgtggggagcctttgttttttcccgtctttgttttttcctcctgggaggaggctgtcctcggtgcctgcagtgctgagcgtcacccctgcctcccaccctctggtgtggcctcccggagcccttgtggggaggaggccgtccttggcacctgcggnttaaaggcgtcagatccctggcttcccaccctctggtgccatcagcatccctcctcccagtaagaatcgcccntgcttgagagccgttgccttnaagtggtgggctgagaagttgcangtttgtgtttnttcantaggaattttaaatt

SEQ ID NO: 428505 - DNA, 472 bp, Homo Sapiens
  misc_feature (226)..(226): n is a, c, g, or t
  misc_feature (335)..(335): n is a, c, g, or t
  misc_feature (372)..(372): n is a, c, g, or t
  misc_feature (386)..(386): n is a, c, g, or t
  misc_feature (424)..(424): n is a, c, g, or t
  misc_feature (430)..(430): n is a, c, g, or t
  misc_feature (447)..(447): n is a, c, g, or t
tactatacaaaaaacagttatagtctaaaggtccactaaatgttggtaagaaaaaatttaccaagatcagtggatattcagcttccttctaatgtagatattctgtaatggtttattgaatgcacaagtgaataactgaatggactctcccatttgagcaggtttcaggcgctcttggcccagagaggagagcaatttagctgccttattggtgttgcataatttncccttctttaccgcagtttttcatcaatgattgtccacactgtagggcaatcaatggatgatgcctattccctatggtagggagccacttacagcttagttccttaganttgccaccctgtgcagggagactcttcccctgtcccnggggcatggctggnctgtggcctcttttggaggggtttgcagtgcccagaangttgangggcttcagagttattngtttcagaatacaggcctgtgcagg

SEQ ID NO: 428506 - DNA, 486 bp, Homo Sapiens
  misc_feature (302)..(302): n is a, c, g, or t
  misc_feature (351)..(351): n is a, c, g, or t
  misc_feature (375)..(375): n is a, c, g, or t
  misc_feature (400)..(400): n is a, c, g, or t
  misc_feature (419)..(419): n is a, c, g, or t
  misc_feature (437)..(437): n is a, c, g, or t
  misc_feature (449)..(449): n is a, c, g, or t
  misc_feature (454)..(454): n is a, c, g, or t
  misc_feature (464)..(464): n is a, c, g, or t
ttttttaattttcagaagaatattttacaatagcttatatttgttgaatttttacatacctgaaaatgtcatttttctatctttttcaatgatagatttgtatgactgggcatagaacccttgtggaaaattattgtgagttctagtcccaatttgactctctttcctttgcatttggcttccccaacacatttggaagctttttagaatcttctctttatctctgtgggttctaaaattgtataacagtgtatcttaccttattcattttctcggttattctatgggcctctttcaccttnggaggcttatgtttttcagtatttagatactcactcgaattattttccnttctttaatataacttcttctccnttgtggttctctactcttaattttnctgcagttcttactaggtncagtggttaggaccctcnggattagggggnccaantgggaatttncctttccagggaggatttaggt

SEQ ID NO: 428507 - DNA, 332 bp, Homo Sapiens
  misc_feature (147)..(147): n is a, c, g, or t
  misc_feature (163)..(163): n is a, c, g, or t
  misc_feature (210)..(210): n is a, c, g, or t
  misc_feature (266)..(266): n is a, c, g, or t
  misc_feature (287)..(287): n is a, c, g, or t
caaaccagagtaaagtcaaggaacaaatatctgctgtgccagctgggtgcagggatagatccactgaagagtgggagaggaggtcagagccaccttcctcatcacccggttcgagcagattagatgagtggagagagccatgcaaantcagcccctagtagantgcgagcggcacccgggtaagatgcctgctgtacagtgaggagggtnttagggttttgagcatccccatgagtccagttttcacaggtaggggtacgagggtnttacctcaggaggttcacggncagccttccacataggggtaggcaggccatttgatgttcattttc

SEQ ID NO: 428508 - DNA, 436 bp, Homo Sapiens
  misc_feature (425)..(425): n is a, c, g, or t
aacatatagaaatccccaaagaggccaatagtgacgagaaggtgaaaattgcaggcccatggggagttactgattttttcatctcctccctccacgggagactttattttctgccaatggctattgccattagagggcagagtgaccccagagctgagttgggcaggggggtggacagagaggagaggacaaggagggcaatggagcatcagtacctgcccacagccttggtccctgggggctagactgctcaactgtggagcaattcattatactgaaaatgtgcttgttgttgaaaatttgtctgcatgttaatgcctcacccccaaacccttttctctctcactctctggcctccaacttcagattgacttttcaatagtttttctaagaccttggaactgaatgttctcttcagccaaaantggggactttc

SEQ ID NO: 428509 - DNA, 289 bp, Homo Sapiens
  misc_feature (148)..(148): n is a, c, g, or t
  misc_feature (154)..(154): n is a, c, g, or t
  misc_feature (197)..(197): n is a, c, g, or t
  misc_feature (251)..(251): n is a, c, g, or t
taaataaatggccccacatgactggggactgagctgctggctaaaagcagggtctctggaacaggtggcctgggtcagatgctggttctaccactgagcagcagtgtggctgcgcaactccccatctccaaaatggggtcatgatggnagcttnctcagagctctgtggccagaagttcaggagatgatggttgggntcacaccttggtaagatgacgaaaccgaggcctcagaaagtctgcaagggcccntgttttagggaggacctggggcatgttctgctgggggt

SEQ ID NO: 428510 - DNA, 456 bp, Homo Sapiens
  misc_feature (51)..(60): n is a, c, g, or t
  misc_feature (363)..(363): n is a, c, g, or t
  misc_feature (392)..(392): n is a, c, g, or t
  misc_feature (417)..(417): n is a, c, g, or t
  misc_feature (428)..(428): n is a, c, g, or t
ccgaagattgtttggaatttattctcttaaataagaatgtaacatttgttnnnnnnnnnnttaaaagcacgacaacttggtttcacagtcaacggcaaaaacaaagttacacaattaaataaaaactcacaaagaaacacaccaagaactcacaagagcacaagttaaaaacaaagggcaaaaatgggaagtggagagaaggcgggcagtagacaggcagcagtggcgtgttccttgggcacagctaatcctctcctgttgggctctcgtaccgccgccggaagcccttggctgttccgcccctcccgcaggcaccccaaggctgaatggctcgggagaaaagtgaaccccttggtgccctgntcgggaccttaaagggctatgggtggganctcctttttggggacagcctagggntttttccagtntttttgcagaaaagagttgaaggtggca

SEQ ID NO: 428511 - DNA, 344 bp, Homo Sapiens
  misc_feature (296)..(296): n is a, c, g, or t
  misc_feature (307)..(307): n is a, c, g, or t
  misc_feature (334)..(334): n is a, c, g, or t
cataaatctgtttctggacataaaggattattagaatcaaagctacctattgaacaagttatgcaacacacacccaaatactatttgctaccagaaagttataaatgggtatatacctggcgtcacattgccaacaatataggcctacctgattactgcactcacacttgtctgtggtcaaagggctaattactatctaggcatttccccctttggcttttaattcaggccagagttcattttcaccactcaggcacacttttccatttctttccctctccttacagaattggggntgcacatgggnagtaaggtcatttaatacttttggcantgggtatacc

SEQ ID NO: 428512 - DNA, 455 bp, Homo Sapiens
  misc_feature (429)..(429): n is a, c, g, or t
ctctctaaggcaaatgcccttgagtcttctagcaggttggctccctaccaaagcagacaatagacatctcaggggcctttgggacagctctctggactgctggcaggtgggttcattcaacaaacatccctagacatttccttgctccagattccgagcaaagcactaaaaagacccttaatctcaagactgtccattgcaatcactgtactttggagtcaaggtaatactgctgctgtttggtttggaaaaggggaacaaagaaagtcattagtcattcctgaataggaaaaggactttgggtgaatagtctggcaacttaaggacggctggccctcttttaaacatcccgggcctcttacaataaggcattaaaagataaaaatcttgttcggttttgacccagagttgatttccagtgggcccgcntgaggagatggggcaggcctttttct

SEQ ID NO: 428513 - DNA, 464 bp, Homo Sapiens
  misc_feature (13)..(13): n is a, c, g, or t
  misc_feature (50)..(50): n is a, c, g, or t
  misc_feature (82)..(82): n is a, c, g, or t
  misc_feature (96)..(96): n is a, c, g, or t
  misc_feature (109)..(109): n is a, c, g, or t
  misc_feature (139)..(139): n is a, c, g, or t
  misc_feature (285)..(285): n is a, c, g, or t
  misc_feature (375)..(375): n is a, c, g, or t
  misc_feature (391)..(391): n is a, c, g, or t
  misc_feature (427)..(427): n is a, c, g, or t
tgagagatagggntctagtttcattcttctgcctatggatatccagtttncccagcaccatttattgaagagactgtccttnccccaaagtatgtncttggaacctttnttaaaaatgagttcactgtagatgtatgantttatttctaggctctctattctgttccactggtctacatgtctgtctttataccagtaccatgccgtttgggtctatagtataatttgaagtcaggcaatatgattcctccagttttgttcttgcttaggatagctttggctatnctgggtctttcactaacacttgactattagtagatgaggttacctcccggggaccattagtgcttcacctcttttcagagtctagacatncttcacttctaattcntcctctatcttccattgagtggtaattcagtcttcngaagtcaaaggtttaggtgtggtgaatttccaggagg

SEQ ID NO: 428514 - DNA, 525 bp, Homo Sapiens
  misc_feature (447)..(447): n is a, c, g, or t
  misc_feature (488)..(488): n is a, c, g, or t
tgcaagagtctaaagtttgcttttttaattgttcattgttaaatcttttatagatcactctggttgggatttgctcacttataaggagaaagtcaccaacagcttgatctattatttttccctcttcaatgtggattaaggtctttttatggatgctttcctgtcattaaaaaatatgtatcctttagacttctttccaaatggaatcatctttgatgctaatatttatactctgtgttgtatgaagaataaaactaagagccccagccacttttgaagatgtgtgtctttacaccagggccagtctctgctgctcctccctgaggagccagtcattctttgtaacaatgcattatttcacctgagttgaaggttttcattagtgtgagggaagtaggcccttcaacatatgggactcattcaggattttaattgtactaacttttnaaattgactgcttaccctattctgtgctgtttatatggccnttatttttccagtttcaactttttttctagtgttctg

SEQ ID NO: 428515 - DNA, 471 bp, Homo Sapiens
  misc_feature (283)..(391): n is a, c, g, or t
ttttttttcctagtttagtggattgaatatgaataccgacatttggagatacacaaatttttaaacttcctgtaccaggtcggaggggaaactacttagtatattggtgaagatggcctatctaagagctaattagtttgacaaaatgggaatacttcagaaattaatatgccattagctcacctttatttcatgttcatcatgctgtttagagtttcatataaagttgaaatgaattcagttcaaattcagaaaactgaaaaaatataaatcaagactaccnnnnnnnnnnnnnnnnnnnnnnnnnnnnnnnnnnnnnnnnnnnnnnnnnnnnnnnnnnnnnnnnnnnnnnnnnnnnnnnnnnnnnnnnnnnnnnnnnnnnnnnnnnnnngtggaaactctggctttccacttaaaaaggtaccaaaaatttaggctggggcagttattgggcacacacctgttattccc

SEQ ID NO: 428516 - DNA, 523 bp, Homo Sapiens
  misc_feature (435)..(435): n is a, c, g, or t
  misc_feature (500)..(500): n is a, c, g, or t
aaatgaaggagcataaatttattacatagtatattaattcaccgcaagaatagatttataggtgttgtcatgtcttttgtttttagggggtgaattttcaaaagagaggttaatgagaccacataaaatggtcgtatgaaaaatgtttttgccttctttggtaaaactgctctggggacagtgttcattattttcaattttccttttataaagatccaaatgatagggtcatgagttcaaggccaggaacaagttgatttttttcctgaatagtatgatttaatttattagataataagatacacgttaccatatgtagccccctcctctctttcttgctttctctctgtgtggctggaaggtaaatgaatgcatcagaggggacttaaggacctaaaggaaattatttaggggctgctgcttcccgggattatnctctcattaaggaactgttaattaaaataaagtaataagttattccccatggaaaggttattttncaagtcccaaagcagtattattt

SEQ ID NO: 428517 - DNA, 484 bp, Homo Sapiens
  misc_feature (422)..(422): n is a, c, g, or t
  misc_feature (456)..(456): n is a, c, g, or t
ttttttttcctaactaggatacaccataatttattagtagaacataaagtttaaatatttattctatcaaatcaataataagagaatataaaagtcagattaactaagcaggaatccccatctctctgccatccatccttaaagaagtctaactgcctccaggactctcaatcagacactacctcatgtgagtctccagtcctacaggcatgtgccttggtgaactgaccacagttcagtagaaattactctgcaatttcaacctcttttatgatgaaaacaccacatgggcaccaaaaaagtgcctgaatgtaggaatcaaatgggcaaaagttcttgttgggccacttaaaaattatgtggcatatgtatgaggcacttttcccttttctggggcctcaagtttcctcactggaggtccnttttcaaccctaggcttttaggtaactccggggncccgagggttggaaattttaaccccagg

SEQ ID NO: 428518 - DNA, 426 bp, Homo Sapiens
  misc_feature (36)..(36): n is a, c, g, or t
  misc_feature (240)..(240): n is a, c, g, or t
  misc_feature (352)..(352): n is a, c, g, or t
  misc_feature (407)..(407): n is a, c, g, or t
gccattcagtcataattacaagcggcctgtggactnccagtgggcatctggtttctaaagtaaaggcagtcatgttggggaccatggcgttaaacctctggaatctgacactaactccccatgtttagggtcagaattaaattgcagtacaccacttgtcagaataaatattatttgcttttccaaggggagagataattaatgccaaagaggggggcattcgttcatttaactcttagncacatatgcttgaagggagggatgaccaatataagactgggcaaattctaacaagttgggggttaaaggtatatctacttttgaatctgggttattttttctgacctggggngtaaattttaaggacaaggagtgtcaccaaatttgtaactctgttgcccttaggntctttaaaaatggattacc

SEQ ID NO: 428519 - DNA, 445 bp, Homo Sapiens
  misc_feature (17)..(17): n is a, c, g, or t
cctaaatctgatctttntaaataagctgactcccttgtctgcccaagaatactaaactggagactttcatagatgccctgagagagactcctgtctcctgcttttggtgtacagtagcattggcttttccagccctgtggggtcccaaattgttggaatctcagtggatttatattgccaaatttagaacacatgacccttagtaggctgtattttattccgtttttccttgcaaaccagccagttcttgtttgtttttatcttattcttacagtagctcactaaaagcatacaaggggcagtcaacacacaccagcattctactgccaactgcttcccataaagctacaaattcagatgacacagggtctcccaagttattgaagttttagcagatgttttgctacaagtgtaacaagggtttgccagctttctagtctggcaa

SEQ ID NO: 428520 - DNA, 489 bp, Homo Sapiens
  misc_feature (179)..(187): n is a, c, g, or t
  misc_feature (408)..(408): n is a, c, g, or t
  misc_feature (427)..(427): n is a, c, g, or t
  misc_feature (436)..(436): n is a, c, g, or t
  misc_feature (447)..(447): n is a, c, g, or t
  misc_feature (452)..(452): n is a, c, g, or t
  misc_feature (464)..(464): n is a, c, g, or t
ttggactgataagacaaaaatatagattccaaatctattgacatatgatatcacatccacaaatgtttgcctatttttgtagcattattttggttgcaaagtctcttagggaatgcacaaaaataatacaaccttaaaaatcagactagaagatggaatataagtggtttccttgtaannnnnnnnnaagcttggagaggtaataacacatctttgaattcaaactgaggactgctgcttaatggtgcttttacagggtggttctaaaatttttgagagtcaggtattgctttctctgactgtttaattcaccactgggcacgtgtttcctatcctcaaggcataaggtttaaaaggttacaaacctcatggctgctcagttttttctttccagtaaatcaggtggcnggggttctctaggtttacnttagggaancgagtgtgggnggggntttggcttacantcagtgtaggggggaggggctgttt

SEQ ID NO: 428521 - DNA, 282 bp, Homo Sapiens
aaaacaatagtcagcctgactgtacaatcccttcattggcagtggatagctctggtgttttatttatgttgatcacactgtcaatgctatatggaataaccatttagttgcctctctattagtccataacatttttattactgtaattaaatgtcattatccatattgaactctgtattagaaaaatcaaattaggtaaactgaaatatccagaaagaactacagaactgttgggattcacccccagcaccctgacgtcatcttcagactttgatgagaagg

SEQ ID NO: 428522 - DNA, 431 bp, Homo Sapiens
  misc_feature (215)..(215): n is a, c, g, or t
  misc_feature (365)..(365): n is a, c, g, or t
  misc_feature (394)..(394): n is a, c, g, or t
ctgcaacaagcccctagattgacttgaagcctctgtctgaactgctggcgggatccccagcttccccccatgtgcctgttcatggcatgcagaggtcagccccttgctccaggcctcggaccagagtggccatctcgttagcataggacacaggacagaagcattgccctcaagtttcctgagacatgtttgcccctgggaaggcggtgattttngccatcattgctgcaagactgtcatcggggcagcatcttagcatcagcattgctgtcgtggggtgaggctgcctactgtgccctgccgcccggcctttctgtgcttcctcaggagaaagaccagcagggattccaggggggaggcctttnttagcagttgttagaaggaaaatgttttnccaaagagctggagctgttttcccttttctttttctt

SEQ ID NO: 428523 - DNA, 409 bp, Homo Sapiens
  misc_feature (354)..(354): n is a, c, g, or t
acttcacaatggcccccaacgtgcaagagtaggtgatgctggcaattcacacatgccaaagagaagccataacgtgcttccattcagtggaaaggtggaaggtctcaacttaataaggaaagaataaaaactgtatgctgaggttgctatgatttatgttaagaatgaatcttccatctgtgaaattgtcaagtaggaaaaataaatttgtgctagttttgctgttgcgcctcagactgcaaaagttatggccgcagtgcatgatgagtgctgagttaagatggaaaaggcattacatctgtggatggaagagaaacatgttccaattagatggcaatctggttcggtactatnccaaggtcttcaggcatccactggccggccggatgggggttttctgggagaatat

SEQ ID NO: 428524 - DNA, 373 bp, Homo Sapiens
gcagactaaaacccaacaaatgggagagggatgaagggaggggaaagctaggagatggcttatggattgccccaatactattgatttattttgactgcctttgggttcttgtgagatggctttacactcttattttgtgatggaagatccttatatgatctcttaaccttttagctagagtccaacatagtttagttgggtttcatctgcatctatattgtatccaccatcttattaatatccaaactgtatctttgataccaaattgcagtattatttatatgatattcaaaaattaattgggacttttctgtttaggatgtgtttttgctaatagtttcatatgccatgtgcttatgtattatcggctttt

SEQ ID NO: 428525 - DNA, 470 bp, Homo Sapiens
  misc_feature (418)..(418): n is a, c, g, or t
  misc_feature (445)..(445): n is a, c, g, or t
ttattttaagaatttcatcaattttctgctttcatagaaaactgaatggaacagtagaaaagccctattatattcattttcataattattaaacaattaagagaagtcattggtattttcttttacagttgaggaaaccatggttcagacaggtaaaatctcacaaaatcacatagcttgaacttactgaattttgtatttcaaagactaccagttacctctcgctttaatgaaaacaatgatgagatgaaatgaaagtccagggactttcattgtatcagtaagatgtcatgcttccatattgatttcctatgtaaaatatggcaatttcaaaaggctttcaattcttattagtgggaaactcctctttaaaaaatcctacttatttaggtccataaattctctgtctaggatccantatcccggtaaccaaacttggccaccnggtacccccctggattttataaggt

SEQ ID NO: 428526 - DNA, 185 bp, Homo Sapiens
  misc_feature (41)..(41): n is a, c, g, or t
caaagtcaggccacactaactgtcaggaatagaaggcagangaatgcctgcctttgatgggagtgacaactgggaggggacaccagggcaagggttacaggaagctgggcaaagctatatttcttgatctaggatgatgtgttgcaggtaaaagatcactgcaatatttacttatgatttgtgca

SEQ ID NO: 428527 - DNA, 394 bp, Homo Sapiens
  misc_feature (155)..(155): n is a, c, g, or t
  misc_feature (199)..(199): n is a, c, g, or t
  misc_feature (274)..(274): n is a, c, g, or t
  misc_feature (307)..(307): n is a, c, g, or t
  misc_feature (336)..(336): n is a, c, g, or t
  misc_feature (344)..(344): n is a, c, g, or t
  misc_feature (369)..(369): n is a, c, g, or t
  misc_feature (382)..(382): n is a, c, g, or t
aaatcatcgttattataattgttaaaaaataaacttggtccaggtgcagctccaagaaaaggcagttcagttggttgagctcaaagtcattaattgtctttccttgtgactctatctctttgctctgtacatagaaacaaaaaagtctgcacccnctcacccccaaccagacacttctcttctctctcttcctcaaagnaaatagtgcatctaggcaacagatctctcattggctctagtaccatctctgggatgttacaaaactctcagttantctgtaaaacaaaaaggtactaatcctaattanttcattgttgggccaaaatgctaaagggncctttagnaattgtatggtcagttaactagggnaacaaagtttttncaactatttggc

SEQ ID NO: 428528 - DNA, 343 bp, Homo Sapiens
  misc_feature (134)..(134): n is a, c, g, or t
  misc_feature (152)..(152): n is a, c, g, or t
  misc_feature (173)..(173): n is a, c, g, or t
  misc_feature (234)..(234): n is a, c, g, or t
  misc_feature (250)..(250): n is a, c, g, or t
  misc_feature (265)..(265): n is a, c, g, or t
  misc_feature (285)..(285): n is a, c, g, or t
  misc_feature (320)..(320): n is a, c, g, or t
  misc_feature (333)..(333): n is a, c, g, or t
tgtttgagattgcaatatccattgcacacacatcttgtggatttcagaaggacagaatatcttgataacgttttgctgataattcccagttgccagatctaggttcaaggcttcccgcagacgattcgtatttncctctgtcctaaagcagncaaccgggaaaacccaaggtnaccagtcacctggggaaggaaaaaatgggtgtttaggcttccctctagtgggctgtttagntgcctgcgtgggctgncaaaggggttgggancccaggccctgctattgtgncctttcgaaaagattttttcaggcaagttcacttnccttcaccttttnaagttttcgt

SEQ ID NO: 428529 - DNA, 264 bp, Homo Sapiens
ttttacagatgtgctcaatatacatcggcacaaagaagtgtgtgcaaggttatctgctgcagcattgtctgtaatcacaatgtgtaagaatttcagtgtcctatagattagagacatatttcagtaatttacggctcattcatggaatggattactatgtcgctagcaaaaagattgaggcaaatctttatgtattgacatggtaacattaagtggagaaaaacaaggaacagaataatttgtaaattataccacgatttgtgt

SEQ ID NO: 428530 - DNA, 352 bp, Homo Sapiens
tgcttcaaaggaagctgatgtatggagcgtgtgtcaccttcctctacaggaatggggtttggcagtgatccaaagactcactgttatgacatgttctcagggaagtaggtcatatgtccccagggtattcagagaggcctgtgagtgtgagatgtttgggctgagcagggctttcttcctctcaaggctccaaagggcgggccaacaggtcatttggtttttctcagtgatatgttttcctcctcaagattcatcacccctctctcctcctctgcttgttctgaggcaaatggacacagaaatacattctctgttttatccttcatcgttgctaaacccctgtgggttccgg

SEQ ID NO: 428531 - DNA, 242 bp, Homo Sapiens
  misc_feature (184)..(184): n is a, c, g, or t
  misc_feature (195)..(195): n is a, c, g, or t
  misc_feature (211)..(211): n is a, c, g, or t
  misc_feature (220)..(220): n is a, c, g, or t
aaggatatgaaaacactttatgaaaatgaaattcattaaagcccttaataatcaggtagggaaggcaggtgctcacaattgtcacctgttggtgagtgaacaccttaggctcggggaggacaatgactcaagaacaaggtcgaattgcaggtggggggtgaagctgatccctaacagtgtcctncagcccctggnactgaggaaggacatngagggcttncatcgacttttcctgggcaggc

SEQ ID NO: 428532 - DNA, 453 bp, Homo Sapiens
gaagtattaaatattagttcataagattgttaatctgctgggtcaggcaaatacagaagagtttttcactttattcttgattattttacttatgatcatttccaatttagttggggtaataacctgatcagttatatacattgcactcattcattcttcagcaaacatgtactgaatacctgcccctagtatgttcttggcccagactaggccctagcaacccaagtgaactgcctgtctggctgccttaatgggggctcccaatctagtggggagcaaatgaaatgatcagtgcgatcatttactgcactagcgctggttctgccaagagtgtgcagaatcactctttattaacctagaaatgacctgagagaggcatgtagtcgagttctggtcattttgtaagtaaaggcatatggtcacagaggtgaaggacacataggaggctaaggt

SEQ ID NO: 428533 - DNA, 452 bp, Homo Sapiens
  misc_feature (88)..(97): n is a, c, g, or t
atgaatttatatagcttattttaatgctatatatgaatttatatagatgaatttggcttttgaaaaacaaattaagtgcattaggaannnnnnnnnnaaaagtgatatgtttttcttacactttgcaagtttagaacttgccatattatgtttttgaggcaggcttctgtggatataatgtggggaaaaccatgaggtttttgcttgggatcaagtgggatttaggtgcatgccttttgtgatttaaagctattttaaagtgtgcttttaacaccatggaattacaattgttttctgaagtcaggtcaggactctgattctgcagaattatggtgaagccagtttctctttaacaagcaaaaaccgtgtccatcaaactgtacaaccaaaggacctaaatagtccatttccctagtcttcagctgtaacaaaggtggaatcaatctctctgt

SEQ ID NO: 428534 - DNA, 437 bp, Homo Sapiens
  misc_feature (408)..(408): n is a, c, g, or t
aaaagttttggtgatgagacattcaggaagatctatcaataaatagcaaacctggtcctttttaagacactgtgtataaaaaaattccaaaaagattaaaatcagtgcagaaaccaaagaaccatttttttctatatcatattgatcatttcaagtggaactgttagctatcttagaaaaattgtggttctcaattggttttgcctctatctctgaaccaccaatcctaaagaaaaacattcaaccagaaaatttcagcacatcacaatctctctgaagattaagaagtctctgtgaaggactgaatgtataaattgaaaaatttttgctgtcacatttaggtaaaagagaaatcgttcttcatatccccttcctttccatctgtaggctcacctatgtccaactttncctcttcggaagtggaattaaatttaagg

SEQ ID NO: 428535 - DNA, 455 bp, Homo Sapiens
  misc_feature (133)..(133): n is a, c, g, or t
  misc_feature (315)..(315): n is a, c, g, or t
  misc_feature (348)..(348): n is a, c, g, or t
  misc_feature (370)..(370): n is a, c, g, or t
  misc_feature (431)..(431): n is a, c, g, or t
  misc_feature (440)..(440): n is a, c, g, or t
gtgccagatccacaatctttttcatgatttccttgattggctgtcgtaaagcctgtgaagtcatgcacatctggacacagttttctctagcaggaatttattgtcctgggcttgatggctttcacagcttttnctataacaatgatggcatcattgatggtgtaattctttcagactttcatgttctgtcaaggttcttttccatacatttgacaatcctttctatagagtgctgtttgtaacgaggccttaaagggtccttatggacaccctgatctagagggctggaattaggaggatgtgtgtttcgggggnaaggtaggaaccactttcaatgtccttcgggtntttgaaactcatggggagtttnggggttggcccctcgggaaatttctcccagttatccaaaaggaaccttttaaaaagggganagttccccnttaccggggccaaga

SEQ ID NO: 428536 - DNA, 177 bp, Homo Sapiens
acaaaaattaactctaatttattaaggattcaaataacagagctaaaactagaagaaaactttggtgtaaaccttcaggagtttgcattatctttatgacatcaaagaagcaacaaaataaaatataaattgaactttaccaaattcaaaatcatttatgcttcaaaggacatcagg

SEQ ID NO: 428537 - DNA, 476 bp, Homo Sapiens
  misc_feature (372)..(372): n is a, c, g, or t
gagacaggtatggtgggagttatctccatttcaaagctttatagttggtccaaggtgacaggattaagttttcaaactggcattagaatgcggagaccattgtctgctcaactgtgtttactagtttgcatggctatgatgcctggccaagcacacagacactaattggaaaaagagatatagatacagtcccttaattgactaactttaaaattgagcaaagtgagatagggctgtctttgaaattagatcaaaatatctcaaacaaaatgttatcagccacttaaaatggttgttaccatcttgttcttcaactgttgaagtttaccactgctgacttcactctgtcagcaatctttgagctgttcattncatgcactcgtatcataccttttcatggatctttggaggcacctactgtgtgtaaggacattgggggcaagggacccatccgtattttttacagccctttaccc

SEQ ID NO: 428538 - DNA, 544 bp, Homo Sapiens
  misc_feature (407)..(407): n is a, c, g, or t
  misc_feature (464)..(464): n is a, c, g, or t
  misc_feature (501)..(501): n is a, c, g, or t
  misc_feature (518)..(518): n is a, c, g, or t
atctagaaacaagagtttatttacacagtgtccttcttcaatatcatggtgtactgggagaagcagggccatctttacagcacggccaaatgaccacctgaagaccccccattctgccttgagtgcttattgcgtattttgggtggaggtataaggcatgagggaaaggtggcctgtcacttttacacattggagaataattttgcacattcaagaaattttccttgagaaatgccatgtttggaatagcttccagagattgattgagaacaaaagcattaaagcaagtgcattacatttagaagcacaatacattggggaaacattctcaaaagctcaaagagcagggctgtttttccactgaggctaaataggtaaataagtgtgcatactgtttgcatataggnatatgttcagagctttcaaaagtcacatcccgccacaatttaacagctaaatgagcntcttgggccctgacccttaaattaaccctctaatttntgcaacttgctcacagntttctttaaggggcccctttagggcc

SEQ ID NO: 428539 - DNA, 495 bp, Homo Sapiens
  misc_feature (403)..(403): n is a, c, g, or t
  misc_feature (434)..(434): n is a, c, g, or t
  misc_feature (441)..(441): n is a, c, g, or t
  misc_feature (456)..(456): n is a, c, g, or t
  misc_feature (463)..(463): n is a, c, g, or t
tagttaccccatggcttctaaaaaaataagatccaacttctgaattgccatgttagttaatggtggctaaacagatagcaaagggaatataatataattgttcattgagggctaaaaaagaggaatgctctgaatatttactgtcttcctcctctttaaaaaataatcaatgactttcctcttccattgttcagaatcagaaatgttctttcgtatttgcttctcttctacaagagattatatttggcttattaaaatataaaccatgtccaaatgattgtatttttatctttaacaaattatgcctggggatttgttttttacagaaataaggctaaaggcttctgcttcagtaggggtgacatgtttgactcctgtaaaaatgattttgaatgttactccngttcaaaatggattttattggcaaggtaatnaaggtcntgtgggggtccaganccaggcntatttgttaaacacatggttttttttccccgt

SEQ ID NO: 428540 - DNA, 458 bp, Homo Sapiens
  misc_feature (380)..(380): n is a, c, g, or t
  misc_feature (392)..(392): n is a, c, g, or t
  misc_feature (423)..(423): n is a, c, g, or t
  misc_feature (436)..(436): n is a, c, g, or t
  misc_feature (441)..(441): n is a, c, g, or t
agtcatcctgctttggtttcaggtgtgggatttggaccatgaggggctcccgtagaggatggcggtttgtgtttgattctgatttgggatttcagtacatattctccacttcccatagaaggccacttattctttgaaaactggtgttcatgtttgccgttcaatgaagtcccttgtcaaagacaaggacggtcaattcacgtgtcactttcactaggcagaagtttctccaataccttctggctacttgaaagttactacaaaaattccaccagcaaagtactccagggtttttcaaaaggggaattttcattatgggatcagtaccaaccgaaattgattttcatttccaaaacaaacactgggcaccaacattttantttggggaaganttgggcaggagtgttagttcatgatctgttnacttacgtgtttncagtnctgtttttcttcacccc

SEQ ID NO: 428541 - DNA, 296 bp, Homo Sapiens
  misc_feature (206)..(206): n is a, c, g, or t
  misc_feature (233)..(233): n is a, c, g, or t
  misc_feature (242)..(242): n is a, c, g, or t
  misc_feature (254)..(254): n is a, c, g, or t
cgttgagtaaatttctttctacatctaaagttgttgccagtttaaaataagctattctaactacaatttattctacataagcctcatggtaaccacaaagcaaaaaaccaccccagataaacaaataataaagagaaaggaatcaaagctcagcattatagaaaatcaccaaatcacaaaggaaaacaagagtaggaaaggaacangggctctacaaaacaaccagaaaacanttaacaaantagcagaagtangtccttccctatcaataataagcttgaatgtaaatgggatta

SEQ ID NO: 428542 - DNA, 231 bp, Homo Sapiens
  misc_feature (45)..(145): n is a, c, g, or t
acaggaaagcttgtgtctatacaaatattgataaataataaattnnnnnnnnnnnnnnnnnnnnnnnnnnnnnnnnnnnnnnnnnnnnnnnnnnnnnnnnnnnnnnnnnnnnnnnnnnnnnnnnnnnnnnnnnnnnnnnnnnnnngcctctaaaaccaccctaactgatcaaagtaaacattttcaataatggggtaaattaaaagttgccacctgattttaattacatta

SEQ ID NO: 428543 - DNA, 535 bp, Homo Sapiens
  misc_feature (433)..(433): n is a, c, g, or t
  misc_feature (455)..(455): n is a, c, g, or t
  misc_feature (485)..(485): n is a, c, g, or t
  misc_feature (508)..(508): n is a, c, g, or t
tagagttgttaactttaacttgagtagctcctgtgggtcagttgatttattgagtacttgcaatgctaagtttaataacacatgttactgcattcagtaagttcacagcagcctgaaacagggctagatttctctgataagttttccccagaactgtccaataaatgaacatttatgaactgtctgttatattccagacattgctagatgcttgtttaaaagatgaataagatatgcctagcctttggaagcttccaaactggtggtaaggagagtggggagaggtaaattcataaaatatgcataatctgtagtggggaacccagggtctgccctgagggccagggagtgtgtgtgggcagaaagttgagccagtagtcttagctagggggagcacctgttctctttttgtggctttcacttgccagccttntgacatcattgacatgccaggntcacacagttattattactgggggtgattncctgttactctctgacacaaacnttttctcgatttttattttataatttt

SEQ ID NO: 428544 - DNA, 579 bp, Homo Sapiens
  misc_feature (462)..(462): n is a, c, g, or t
  misc_feature (473)..(473): n is a, c, g, or t
  misc_feature (509)..(509): n is a, c, g, or t
  misc_feature (520)..(520): n is a, c, g, or t
  misc_feature (531)..(531): n is a, c, g, or t
ggctgggcacttcacaaggatggagctacatttgtttatcaccgtagttccagtactgatgtagatctggcacatagatactcggtaaatatattgaaaactcagtacaactaaatatttactatttggccactctgtgtcatgcaattcagttttgtcccccaatcacaattccaactgtgactacattgaacttgatgcatttatagcttatatttgtaggataagtcattatcctattttctgaccttataggtaaacactttagagtttatatctgttttctaaaataaccacatattagggaccctgtcattgaccaagaacacacaaaaagtgctttcatgagccccgaagacagaaggcaaggcaagagcattgttccgaaacaggtttctagtgttcatgtctagcagcttctttattttgcacttgacccggatttaacctgttactccgggnttatttcctanactgggtttaataaactcgtgttgacccctgtcagnctccaaggggncagttcttggngtgggtctcttgggctccgtcctgcgtttgggcctggtcggtttgtag

SEQ ID NO: 428545 - DNA, 347 bp, Homo Sapiens
  misc_feature (132)..(132): n is a, c, g, or t
  misc_feature (175)..(175): n is a, c, g, or t
  misc_feature (186)..(186): n is a, c, g, or t
  misc_feature (291)..(291): n is a, c, g, or t
  misc_feature (330)..(330): n is a, c, g, or t
tgcccagagagatgacactatgtgcactcagcaggctgcagggccacctgccgcccaaacagctcaaccaagactgataacacagagggagggcgggcatctgataacacagagtggagggcataccttttntttcacaaatgcagagcaagtgagagagaggcaaccgacccgnatcccacaggncgcctccccaccacccggtgcatgagcagagctgggggcaagcatgggtacggggaactgaatgccctcctagaactgccggccacttgggatgggtgccctttngccagccagagttcaagctgcctccctaaaaggggacancccacagttttggggag

SEQ ID NO: 428546 - DNA, 501 bp, Homo Sapiens
  misc_feature (31)..(31): n is a, c, g, or t
  misc_feature (343)..(343): n is a, c, g, or t
  misc_feature (384)..(384): n is a, c, g, or t
  misc_feature (403)..(403): n is a, c, g, or t
  misc_feature (426)..(426): n is a, c, g, or t
  misc_feature (438)..(438): n is a, c, g, or t
  misc_feature (450)..(450): n is a, c, g, or t
  misc_feature (474)..(474): n is a, c, g, or t
tccgatgagtaaggccagggcctctggctgngaacccctgttctggaactcttcattttcctgtcactcaccctggcttggcccttgggaggccacgtttcctacagacccacacccttcctttcccttcttctgggcctctgcctccagacttctaggcccttatcactttgcatccttcccaatcacattttcttctgttactaatcagtttactgattgttgtggttatcttctctgatcatctcttctagttccctgattccttcagtgactcctttgtatccttttccccttttttcttccctgtcaaggattccatataacttgtctttcagatatnccttcatacttgaaggcccatgaacacctctgtctgacctngtcttacctcagaggaggnaacttcactctctaaggacaagncagttaatgttnatttaatttttntaggtttttaaagatggggctcgntttgttgccaaggtggagaaaggtgca

SEQ ID NO: 428547 - DNA, 187 bp, Homo Sapiens
  misc_feature (153)..(153): n is a, c, g, or t
  misc_feature (174)..(174): n is a, c, g, or t
atgagccacagtacccagtctatcaatgtctttcaataggcaatattgaaatatataatcctagttgtaatcccttccacatgggtaaattcaagggagttgatcatatgtttgcaacagggtggcaatttttcccctttggggcaaaattgncattacacaaaggaccacaantaggggccccaaa

SEQ ID NO: 428548 - DNA, 451 bp, Homo Sapiens
  misc_feature (441)..(441): n is a, c, g, or t
cattttaaaagagctctttatatggaatgtatcatgtgaagtacacaatcataggaaaagatggactgagaattaaagacctggcaacaaagtacaaagcatcaaaatgaagatctccagtaactggacaaacagtgccaattatttttttcctaaactgtgctgggcacacaataagcatccaattccacttattataagatgatagctttaaagaggtgtatgtgaaaagaagacaactacttttttaagtattatcatacaaagaacagaactgaagagaaaaaaattatagatttgaacttaagacttagcttgaaaatttttgttctttccacatgtgcattaatgtaatagggctgtttgaacctttcgcatggaccccccaatgcctctagcatcataatgaatttttatctctacatccaaaggatctaccancaatttaggt

SEQ ID NO: 428549 - DNA, 498 bp, Homo Sapiens
  misc_feature (266)..(266): n is a, c, g, or t
  misc_feature (273)..(273): n is a, c, g, or t
  misc_feature (452)..(452): n is a, c, g, or t
  misc_feature (484)..(484): n is a, c, g, or t
aaaaatgttgccaggcgttcggttcttctcagagtgatagctgcttattagcaaagaaaccaactttgaactgtcaccttcttctgccacttgcactccgttaaacccagagactgggcagatgcctttcagcacagccgcactctgcctcccctcccttcctcccagaactcctgtctgagacagaacagtatctttgagaacccgaggggcaaaatcctctgtcaggagtaggagggcggctcttaaacagccccagcgatgtngaaggtnggcggaggctgagctattgcactgctccccaaatcccagtgcctggctgcacccccacacctgaaacctgcctaccctggtttaagcctcccccagccttcctggtgaagacccctcatggattcttgttactctcaggattgtgcaataaacccttctcttcacgcagagtagacgtnacgggaaagttatttcttggcttactgtattnaatttgtttaaaac

SEQ ID NO: 428550 - DNA, 397 bp, Homo Sapiens
  misc_feature (79)..(79): n is a, c, g, or t
  misc_feature (143)..(143): n is a, c, g, or t
  misc_feature (184)..(184): n is a, c, g, or t
  misc_feature (204)..(204): n is a, c, g, or t
  misc_feature (342)..(342): n is a, c, g, or t
  misc_feature (352)..(352): n is a, c, g, or t
  misc_feature (380)..(380): n is a, c, g, or t
ccacttcttgcaaaaaagtagtacagagaaaaattgcataacatcaaagcatctcatatctaaataataataataaccngagaacaaattctttctttcttccaaaacccaggaatatgttttctgtcaaatcaggtcacagncctaagaaaaaactcctctttcttggggcgagtgtcttatnacttcaggcacactgagggncttcaccatcattttcaaaaggccctccttaactattttaattccgggtgggccacatggtccttcattaacaattaccccatgtttgtggcaccccaacataccggcttttcccaatctgggatgtggcgggtaagnatcttccacnctgggtgttttaaactattgttaatggntgttagttttttaaaat

SEQ ID NO: 428551 - DNA, 442 bp, Homo Sapiens
  misc_feature (372)..(372): n is a, c, g, or t
  misc_feature (424)..(424): n is a, c, g, or t
cccacaggaaggagaaggtggggctggtctccgctgggccagcaggtggcgccagggcctgtcggtctctccccttggccacctcccttgcgcttgctcatctcatgcccaggcgctgagggttctcagctggggcaggagagatggggtcctgaggcctgggtgaagttccaagccctgggcttcgggggcagactctcgctcacccctcccagaaagatgttttcctaggggatgtccagcctaacacggcagggaaggaagtggtggtcacctggggaaaggggccaacctgagaggttggggggtcctgatgaggctgctatttttctttgaggacatgaaatgagaggcggtgaagtcagtcagttnagttcaaaagttgagatcttagggaaccagacacaattttggggagaagttncggtgaaattcaatcatt

SEQ ID NO: 428552 - DNA, 388 bp, Homo Sapiens
tctggtgggggtgatgcagtggccccgggtggagaggccccatggtgaggtcaccagctcccatggccaggagttggcagggagaagcctctgagggctagggctgggggaggctgtggcagggaccgtgtttcctgttcagaggctgtgctgagaaccgacttgacctggaccactgccccatgagaagcaggcagcatcctagcctggccccgagaggtagctgcttgttctgttgacaacctttgttcaacgacccaaaacataagtccctttcctttttagagtctggcgatcaaaagtgtcttaagtcagtagaatcctgagggtggactagggtgaagtgaactgaaacagattcgacacaggtcatttttgtgttagcatt

SEQ ID NO: 428553 - DNA, 398 bp, Homo Sapiens
  misc_feature (266)..(308): n is a, c, g, or t
  misc_feature (317)..(317): n is a, c, g, or t
  misc_feature (368)..(368): n is a, c, g, or t
  misc_feature (381)..(381): n is a, c, g, or t
gatgctattttatttgttgcttgcaaggggaaggtgatcaaaattcttttgacttatttaaaaacatctatatattttggccacgttttaaagattaaagaagtgttttaaatggcacatgatagttgttattacatccaacatatctaggctgttaaaaacatcttattgtatgacatatattgtaaatgttaaagaaaagtaactatcaccatatgcttacagttgcatgagggatgatacccttgataccttaggcctctggnnnnnnnnnnnnnnnnnnnnnnnnnnnnnnnnnnnnnnnnnnntatatttanttaaacattggatacattattttggaattggacaatctggaaacatggttntaaacaatttggntttgcttgggcacttct

SEQ ID NO: 428554 - DNA, 533 bp, Homo Sapiens
  misc_feature (47)..(342): n is a, c, g, or t
  misc_feature (390)..(390): n is a, c, g, or t
  misc_feature (436)..(436): n is a, c, g, or t
  misc_feature (460)..(460): n is a, c, g, or t
  misc_feature (487)..(487): n is a, c, g, or t
  misc_feature (509)..(509): n is a, c, g, or t
  misc_feature (520)..(520): n is a, c, g, or t
ttttcaccaagttctttagttaacaaagaatgcttttaaaaatgttnnnnnnnnnnnnnnnnnnnnnnnnnnnnnnnnnnnnnnnnnnnnnnnnnnnnnnnnnnnnnnnnnnnnnnnnnnnnnnnnnnnnnnnnnnnnnnnnnnnnnnnnnnnnnnnnnnnnnnnnnnnnnnnnnnnnnnnnnnnnnnnnnnnnnnnnnnnnnnnnnnnnnnnnnnnnnnnnnnnnnnnnnnnnnnnnnnnnnnnnnnnnnnnnnnnnnnnnnnnnnnnnnnnnnnnnnnnnnnnnnnnnnnnnnnnnnnnnnnnnnnnnnnnnnnnnnnnnnnnnnnnnnnnnnnnnnnnnaaatgttgttgggattctttttgaagcatttagacaattgggtagttnatttcagaaagggagtttacttactagtttgcattttacatgtgtnaatactttgacatttttccaaacnccccccatttttcctttgatttccctnacatttttgggagtaccccagntgggttttttnccccttttggggt

SEQ ID NO: 428555 - DNA, 597 bp, Homo Sapiens
  misc_feature (18)..(18): n is a, c, g, or t
  misc_feature (46)..(46): n is a, c, g, or t
  misc_feature (279)..(279): n is a, c, g, or t
  misc_feature (457)..(457): n is a, c, g, or t
  misc_feature (471)..(471): n is a, c, g, or t
  misc_feature (486)..(486): n is a, c, g, or t
  misc_feature (513)..(513): n is a, c, g, or t
  misc_feature (518)..(518): n is a, c, g, or t
  misc_feature (532)..(532): n is a, c, g, or t
  misc_feature (542)..(542): n is a, c, g, or t
  misc_feature (584)..(584): n is a, c, g, or t
tagttttaaaaggtttgnccataggcccagggtgcatattctaagnctaacctccaattgtggttggggtagaaaaactgcctgcatttagagtagtacatgtgtgtatgttcccaaaacattttaatagaaactctcattttattcccttagtgtctccgggtggggataagagacagttatctttttatagctgtagtgatctgaaaaatctgctgagtaatagagagttaagaggtggttgtacttgagaacagagaggttccgagaacatcagtngcctcttggctgaaaggagtctctgagaatcttcctgtgtggctttaactgaatcagcacaacagggcatgtaattcagaccatgcatatatatttcttcatcatctattctgctctcagccgtttctttcccatctgccttttcctgtctttcagaacatttctggggtgttgtttnggctcagcactgtnggaagtgaagcattngcctagccagggactggcattatctgnagatnccaaatcttagtantgtggctcanaagaaaggaggtaaggaccagcagaggcagtgctggacagancagatacagtttt

SEQ ID NO: 428556 - DNA, 466 bp, Homo Sapiens
  misc_feature (237)..(237): n is a, c, g, or t
  misc_feature (433)..(433): n is a, c, g, or t
  misc_feature (446)..(446): n is a, c, g, or t
ttcaggtagaactggcagaaagaattttttttccagtagtagtagtattagtggagttgaaaaatatacttttaattatacattgcaagctctgattgcaggttagaaaactaaaatcgatcattcctacatcaatagtgttgtctattactacattgatttgtgtttatttatgcagagactttcagttatttatttacatatttcagcatctgcctcttgattattatcgtaggntgcttttaatgaaagagcttatataggaagcgaaacacacttgacagatccattttaagtaaacctgatagtgaattatgggcaacccaaggagattatgaaattacttattcatacttgctttttaggcaattagggaatctgtttctggattaaaaacctcatgctggcttggaaaacttcccttctttttctnccatacattgtanttgatgtggcttcattaaat

SEQ ID NO: 428557 - DNA, 162 bp, Homo Sapiens
ggtcacctttggagggtgatagtgaagcaactcatttattctgaaaacaagaaaataaggagaaagaaacaaagtattttattctaactttcctatacaaattgtacctccacatataaaataactgatgagcaaaaacaaatttttcagaattccagcaat

SEQ ID NO: 428558 - DNA, 465 bp, Homo Sapiens
  misc_feature (177)..(284): n is a, c, g, or t
  misc_feature (423)..(423): n is a, c, g, or t
  misc_feature (446)..(446): n is a, c, g, or t
aaaggtcttgctacaaagcttcattcagaaagttcaggagcaggcctcgcaactctgcaactccgggttaaccctggaaactcagctatctgcctccctctgcagcattctctctaaactatgtgctagctgaaatcactctcaccaagaaagtattcacatgaacaaattgaatgnnnnnnnnnnnnnnnnnnnnnnnnnnnnnnnnnnnnnnnnnnnnnnnnnnnnnnnnnnnnnnnnnnnnnnnnnnnnnnnnnnnnnnnnnnnnnnnnnnnnnnnnnnnngaatgaaagttgttgaaagcacttcaaatttcagatgactatcttaatgagctgttcattaaataaataacctaattaggccgtaattcaagtgggaacccagggtgttcctggacccggatccaagttttgggaggtnccaactctgaatttttgggggtncctccgggagagttgtttt

SEQ ID NO: 428559 - DNA, 502 bp, Homo Sapiens
  misc_feature (420)..(420): n is a, c, g, or t
  misc_feature (472)..(472): n is a, c, g, or t
aggagacctgattatgctatttaacctagaaaaaagtcactcctcaattttttcaactttcttaaatttctttcagtcgtaatccctgagggacaaggaattctagcactctggtataatcctggtagaagcagaggatctgtagtgcagagatgataaggataaaaaagtagcttgcaaaacaggaaggaggaaccttgaatagcaagccaagaactttagaatttaccttctaatgaacaagaaccagtgaagatttatgatgtggtaacatgaccaaagtatatttacaagattatgctagtcatgcttgtaaatagtttcaagtgggagagaggtattaagagaaattaggggaaatatgggtaggaaatctgactatttcaggcaaggattgctgtgggaaatggaaaggttgcnggaaacccatttgggcccagtttattttccaattactctggagccttttccntaattacctggcccgttcttttcccggggg

SEQ ID NO: 428560 - DNA, 437 bp, Homo Sapiens
  misc_feature (426)..(426): n is a, c, g, or t
tgcaccatccctcccttctcccccacccctgaccgtttaaaacaaaatgtctcaaccagtcagtgatactcacttggagaaggaaatgtttctttaggatgttaggttgacccatgagaacatggacaatttttggtcacttaagcaagttgccacaattaagggatggactggtttcccagttctctgtttgcatgattttgttggactggtggaagaaatggcctcgtgtctcctcgtatgttgtctggagagttcagagatggaaaatcttgagacagcaagaaaagcatgattgtaggaatcagcatccctgattacattagacctggggcaaatgggacgcctgggtcccaggggagttcaggctattgttcatttaggatgggaagatggccctttgaagatgccaggcttgaggggccntgatgaattgc

SEQ ID NO: 428561 - DNA, 428 bp, Homo Sapiens
  misc_feature (382)..(382): n is a, c, g, or t
tgagtgccaggaactgtgcaaggtgctggagacataagacagataagacaaataaggaatttacaggctgttagagagtaggatgtgctaaccagaggggagtgcaggttaccagaggagaggtcaggttaaccagctgggagggaaggttaccagaggagagggcaatcaaatcagagggtgtgtgttattaactcaaattcggctgattctcaaaatcatcccagttgttttataaatatatggattcctggggctctacccatggcctaatgaattggaatcttccagagccattatctatacttttaataagctccctcattgattggaaacaatcatgatagttgtgggagtaaggtctcacagacacagtattagngaactttggctcttgggtgccagggttggatgcccagggagggggt

SEQ ID NO: 428562 - DNA, 323 bp, Homo Sapiens
  misc_feature (152)..(175): n is a, c, g, or t
  misc_feature (249)..(249): n is a, c, g, or t
  misc_feature (269)..(269): n is a, c, g, or t
  misc_feature (281)..(281): n is a, c, g, or t
  misc_feature (306)..(306): n is a, c, g, or t
taaacataatatggtaaaactatacatgcacacatgcacaaacgtgtatattcattccagtacaagtaaaaatgtaggattgcatttttcccccaaaaggaatatgttttacaattaactcaccgtataacccaaatagattaacaaaaaannnnnnnnnnnnnnnnnnnnnnnnaactccctgtttaaaaaatctgatacttattaaaaactttaagggataggataatcctaaaggtttttacccanttaattcttgcaaggtaaantaatccccaatnaaatttgggtggaaggtaggtttcntgaaagccaattcttgg

SEQ ID NO: 428563 - DNA, 464 bp, Homo Sapiens
  misc_feature (420)..(420): n is a, c, g, or t
tttttttaacgataccacttcccagatttcaacaagtgtgacaaggcatttaaatcaaatcttttgtggggcagggattaaggaccacagctgcaccacagtcctgggctgactcatggccagtcaccacgtctctgcagccttttcacagaagtacaaaagtgttttctttgtggagacaggacttaatttgatgcatttcaaccctgtctaaattcccctctttatgggccagacagatatactgtcaaacaaattccaagtaaggccaaacagaggctgagagaatttgtcagtgggagaaagggcaagtttcacttattcttgataggactgagttccagatggggcagcagtgccttcagtagggtaggagttgcccagcaaagggggcaggaccctggcaccccactaaggcantttctggggggacccggggcagctttgtttctttaacccggggg

SEQ ID NO: 428564 - DNA, 396 bp, Homo Sapiens
  misc_feature (194)..(287): n is a, c, g, or t
  misc_feature (363)..(363): n is a, c, g, or t
aaactcccatttttaaaaccaccagatctcgtgagacttattcactatcacaagaacagcatgggaaagactcgcccccatgattcagttatctcccactgggtccttcccacaacacgtaagaattatgggagctacacaatgagatttgggtagggacacagagccaaaccatatcaactttccttcacaannnnnnnnnnnnnnnnnnnnnnnnnnnnnnnnnnnnnnnnnnnnnnnnnnnnnnnnnnnnnnnnnnnnnnnnnnnnnnnnnnnnnnnnnnnnnnttaaatccatttaaacctcttttctttttgttaaattggcccccacaatcctaggggccttaccccgccgcagtanttgatcattctatttttccccctctatttggat

SEQ ID NO: 428565 - DNA, 431 bp, Homo Sapiens
  misc_feature (321)..(321): n is a, c, g, or t
  misc_feature (337)..(337): n is a, c, g, or t
  misc_feature (396)..(396): n is a, c, g, or t
gtttgttaatgcaactggaatatttgacttaggtgagtatcagttaacatccttgtatttatatagtgacatcaaaataaatgcaatcatcttgaactttgatgttaagggagattttgaaaaaatatttagttatttcaaattcatattggttcaaaagtatcagtttctgctgaataatatttttaatttcaaaagggttttgttccctctgtgctccattctgaggctcaagagcttaatgccagtatgttttctgagttaaaataacacttttaggatgaggaaaatgcttgtatccatacaggggctattaatatnaaataaataaattgtnatggtatggcaaaatttatccatattttctaccccctttaaaaaattaggttagggaantaggccttattttccttggcacatccatatttttc

SEQ ID NO: 428566 - DNA, 504 bp, Homo Sapiens
  misc_feature (99)..(99): n is a, c, g, or t
  misc_feature (367)..(367): n is a, c, g, or t
  misc_feature (453)..(453): n is a, c, g, or t
  misc_feature (460)..(460): n is a, c, g, or t
  misc_feature (467)..(467): n is a, c, g, or t
  misc_feature (482)..(482): n is a, c, g, or t
  misc_feature (493)..(493): n is a, c, g, or t
aatatgttttggaaggttaccgcagaaatagcagatgcgggtaaaggaaaagattgtatttgatagatgaattgtgtttttgacattggaccctttttnttatatttctatcttttcccccatccatctgtgctgttattgatatgagagaaaaaaaggtaaaatttgtttcaaaattcatgtgtgaagttacagtgccacagtggaaccaagttccttatcatctgagctacagttgcgtggaatgtgatttgagcacttagccctgtgttggccaccattcttatcattccccctgagtttgaatactgatgtaatgggaaagcaaatctgagaataagtttgttgaacgataacaaaaatcatngatgtttttagactcttctgataaattccaaatgctgtgggattaatcaaaaaatgacaaatttgtatggcatcctatagcttagngctttantccattncttcggtagtgtggntctttacaccngtgtggaacag

SEQ ID NO: 428567 - DNA, 418 bp, Homo Sapiens
acaagactaaagtttattttgcaaacaactcagtcctatcatgatttatttttaacaaaaatgagaactggagagaaattatgtttcaagacttatatatttgtcattagattttagactcattcgttgtttttaagttttggcccacattttaaactaacactgcttattcctgtgaaccaaccagcaatctctggctgcagctcagaagcagcaaaagggatgagtaatgtaaaaatctggatcaatattctagttctgggcaattaccctgcaaatcctgccagatgattaggactaaataaggtgcccataacctgggaggtttcttttttggggaaaataaggaccaagggagtctaacgaaagccaagccccaaacaccccaatcttaggcagggcataactataggctacc

SEQ ID NO: 428568 - DNA, 515 bp, Homo Sapiens
  misc_feature (401)..(401): n is a, c, g, or t
  misc_feature (465)..(465): n is a, c, g, or t
  misc_feature (470)..(470): n is a, c, g, or t
  misc_feature (487)..(487): n is a, c, g, or t
  misc_feature (494)..(494): n is a, c, g, or t
aaatatttgtttaaataactatactagttgcttctttatatatattataaaatgtaatgctcatgcaaggtagaattcagtgctttataccctaatcttggaagacacatcccattatatttactgtattctgttcactagaagccagtcactaggtccgaccccatactcaaggggaagggatacacaagggcaacactgccaggccctatgtaagagttgggctcagtgactgttacacaatgtgtactgtgttctaaaaacataccagggctgcttggatcccaaaaacctcagaaataaagagaaaggacttgaatatatggtgatactacctttaaggaaccttagccccatctcaaacttagggagcttaaattgtgagggatgggggtgggttncagacagtaactgtaaggccaatgtgggtttcttccattaaggttctgctcacaacctcccttntttcnggaggattatctgggcngaaaagnttgccttggggcggctcatct

SEQ ID NO: 428569 - DNA, 513 bp, Homo Sapiens
  misc_feature (59)..(59): n is a, c, g, or t
  misc_feature (199)..(199): n is a, c, g, or t
  misc_feature (211)..(211): n is a, c, g, or t
  misc_feature (238)..(238): n is a, c, g, or t
  misc_feature (243)..(243): n is a, c, g, or t
  misc_feature (437)..(437): n is a, c, g, or t
  misc_feature (475)..(475): n is a, c, g, or t
taaaatggaggataggggaataacatctgccttaaggggtgggttgatgggtgtctggnaatgcagtagcactgtgtaactgtctgacgttatcatcacaggttccccaacctctgtgccatgaggcatttatcttcctgaattcactccccctacctgaggctttgctggaggcatcttaatgggcctcttggcccgnacccaggctggntaagagccttggcaagcgcacgcctgngtccncattctccagagttcctgggcctcgcgatcgtgcactgatttccttcagaaccccagggcccgctctgggacgtggaaggcagccgtgccgttctgggaaagtggagccgagcccgggacgctgtcggcctaaatggaacgccggccccggggccgctccccggcggttcccgagctaaatcctccaactgttncatgacgtatcgggcccccttcccctgcttcggcccgngcggccccagcgttgcgtaaaggagtgttgcggtcccg

SEQ ID NO: 428570 - DNA, 469 bp, Homo Sapiens
  misc_feature (42)..(102): n is a, c, g, or t
  misc_feature (381)..(381): n is a, c, g, or t
  misc_feature (423)..(423): n is a, c, g, or t
  misc_feature (443)..(443): n is a, c, g, or t
  misc_feature (457)..(457): n is a, c, g, or t
tctttttgtgtgggactgacacaactctcttaaccttaccannnnnnnnnnnnnnnnnnnnnnnnnnnnnnnnnnnnnnnnnnnnnnnnnnnnnnnnnnnnnttgctcttaatcaaggttgtcaggtgattcttatgtacattaagtttgcaaaatgcagctctattgaaatacagaggaccagaaattgtataattgagaataaggtgaggagaggaaggggtgcatgtgtgtatgtgtgagagactgggaggatgcatttcacttgtgtatgtaattgtggggagtgtgttctcattttacttgaaaaagcagctcactgagctattaattcacataccatggcagttcacctatttgaaagtgtactgttttaaaccncttattgggttttaagtgtgtttcacagccttgtgcaccccntaacccgcaatccaattttngggaccgtttttanaccggggggagg

SEQ ID NO: 428571 - DNA, 194 bp, Homo Sapiens
  misc_feature (64)..(64): n is a, c, g, or t
  misc_feature (89)..(89): n is a, c, g, or t
  misc_feature (97)..(97): n is a, c, g, or t
  misc_feature (103)..(103): n is a, c, g, or t
  misc_feature (115)..(115): n is a, c, g, or t
  misc_feature (129)..(129): n is a, c, g, or t
  misc_feature (145)..(145): n is a, c, g, or t
  misc_feature (152)..(152): n is a, c, g, or t
ggccttttaacgggtgggctgggtggaaacagtgggatgggtgcctcttatggcccgggattantacttcaggcggttaaaaaaggaantaatttantggacngggggcaaccantgggggtggatttnccggggatttgttgcntgagttnaggccaaggccattcctttaaagtttttgcacacgttttggg

SEQ ID NO: 428572 - DNA, 507 bp, Homo Sapiens
  misc_feature (241)..(253): n is a, c, g, or t
  misc_feature (273)..(327): n is a, c, g, or t
  misc_feature (487)..(487): n is a, c, g, or t
gtagttaggctaagattggaaaaatgattagaagttggccaaccagggtggagtatgggggtagggaggtagtgtttaggtggaggaatatcacatgcagaggttgagtggtgagaaagttcttgaggatggtaaggagctccacattttcatggatgccacagctcacaggtgattcatcttgaacatacagccaataaacacccaaagactttcccatcttgtaccaaggcaggtggannnnnnnnnnnnncaagactgaatctctgttgnnnnnnnnnnnnnnnnnnnnnnnnnnnnnnnnnnnnnnnnnnnnnnnnnnnnnnngttcaagcgtttctcccaaggcaagtggattttggaaatcaagaaaatgggggttcatggagagaattcttggcccctgtttgctgttcaggaaggcttttagactaaaaagatgggagctaatgaaagcatttggataggggcaagcgtatgagccttngcttttcactgggctttatt

SEQ ID NO: 428573 - DNA, 138 bp, Homo Sapiens
ttatataaaatagttatctgcatataacctaagcacatctcccatatactttaaatcatctctagattagttaaaatacctaataaatgtacatgctatgtaaatagttgttatattgtttaggaaataatgacaagg

SEQ ID NO: 428574 - DNA, 343 bp, Homo Sapiens
  misc_feature (199)..(199): n is a, c, g, or t
  misc_feature (207)..(274): n is a, c, g, or t
  misc_feature (291)..(291): n is a, c, g, or t
  misc_feature (314)..(314): n is a, c, g, or t
ttttttttagaataccaccacttttaatatctcattaattaatagatcaaaagctgctcgcattacagagacaaccaatagtatgaaaaaaccagcatgctatcaccaaaatccaaactaagaaaaactctacaaggtaaacaacacaacttcttcaacaaatatattgtaagagggcagagagatgctgatgaaccantaggtgannnnnnnnnnnnnnnnnnnnnnnnnnnnnnnnnnnnnnnnnnnnnnnnnnnnnnnnnnnnnnnnnnnncacagcagacttacagntcaccagctctgggggtgggggnccagcagttttgtggttctaacaagggct

SEQ ID NO: 428575 - DNA, 534 bp, Homo Sapiens
  misc_feature (195)..(195): n is a, c, g, or t
  misc_feature (242)..(242): n is a, c, g, or t
  misc_feature (486)..(486): n is a, c, g, or t
aaaaacaacatcaaacagaacatagtaaatatatctgtaatgtatacttttttctagtttgggactgcatcatccacatagcttcttttctgtcctctagacaagggctccaggagtaagtggcagatttggttctgagagctaagctcaccaacttgtctccccctcaacagatgagggaagggcagggagccnttttcagtgactcctgggcgctgcagaatcactcatctttggaggtnagcagagagagctctgaggagtttccttcttgcaactcaggcggacttttctttaactcaggagcagcctccattgctcccgccaacccctcaccatggccccttgtccccttgtcccaaccatagcatagagatgacaagagagaggcagtcctatttctgagactggaccaattaaaatgactgcactggctcaaggactctgaacctgtcttgttccggggtcctccagttgttgggaagncatttttttccccaaccatggtgaaatgccacttttaccacaaaatga

SEQ ID NO: 428576 - DNA, 540 bp, Homo Sapiens
  misc_feature (437)..(437): n is a, c, g, or t
  misc_feature (486)..(486): n is a, c, g, or t
  misc_feature (512)..(512): n is a, c, g, or t
  misc_feature (529)..(529): n is a, c, g, or t
gatcagatctatttgcaacaagttcctcctgtttctttagatatctccattttgaagtgcttgtctttgtggtgccctctgcaggcattcacatggtcacccattctgggatcagtcattttgtcctgggtacatagaagatctttggtgctaatgcaaggaaaaggtacttttagtagtcacgttggtgtttcatagaacatagtcagatttcactgggcctggttgccagggattatgtgagtaaatgccaaggctctgagaaattgtggcttgctgtactttgaactctggctccacttgctctcatctttgtctttgaactgtgctgccagtgttggtttctttgaccttggcctgaatataggaggcctaggacgggcttcagggtcatcagcactctgcctgatcatgttaacaggaaggcatccttcctngggactgcagagaccagagagttcggggtgaagggttcctccaaaggtnggagatgggttctgaaatggagagcntttcaaaacttcgaaantattttctttg

SEQ ID NO: 428577 - DNA, 104 bp, Homo Sapiens
tcaaggtttcttcaaaggaactaggaacttaaaaatacccttttgatcccggcattcccaccacggggatatcttcccaagggggaaccaaattcgtttacatt

SEQ ID NO: 428578 - DNA, 418 bp, Homo Sapiens
  misc_feature (41)..(41): n is a, c, g, or t
  misc_feature (102)..(102): n is a, c, g, or t
  misc_feature (205)..(205): n is a, c, g, or t
  misc_feature (236)..(236): n is a, c, g, or t
  misc_feature (310)..(310): n is a, c, g, or t
  misc_feature (315)..(315): n is a, c, g, or t
  misc_feature (324)..(324): n is a, c, g, or t
  misc_feature (335)..(335): n is a, c, g, or t
  misc_feature (345)..(345): n is a, c, g, or t
  misc_feature (351)..(351): n is a, c, g, or t
  misc_feature (359)..(359): n is a, c, g, or t
  misc_feature (380)..(380): n is a, c, g, or t
  misc_feature (387)..(387): n is a, c, g, or t
  misc_feature (398)..(398): n is a, c, g, or t
aagatgggagggacaataactcagtgacagggtacccaagnaaagagaaaattcccagcagaaaggggtacacatgcctcccggagactaccgagtcctggnttccacctccgatctggcctggtggaggtcattcctgagagcagacaaagccgagtggcaggcctataaacagaaccgtctgcgtccaaaccaaatctgtggncacggtgaatcgaggttagaagaagggggantttcctagttgctaaaaactgaaacaggtcatcaaataaattgtggaatctccttccctaaggcccttcagaantaggntcgacaggnctggagtgganggccccccgnccgccncccttttnaggtcacggcgcaggagaganggagggngcggaaacgcnacaccgctgggaagttcggt

SEQ ID NO: 428579 - DNA, 451 bp, Homo Sapiens
  misc_feature (46)..(46): n is a, c, g, or t
  misc_feature (338)..(338): n is a, c, g, or t
  misc_feature (376)..(376): n is a, c, g, or t
  misc_feature (385)..(385): n is a, c, g, or t
aattatttattaaaaagatctaatgttacaaggaacagtacacagnaactattatttgactgtgaccttccacacggtatatgccttatatatagtatatatacagatcgtacacaatatatttaacagtttgacatggggtccacagtaccttcatttgggtatgcaaaacttttgctttcatgaaatttctaattataaggactgttgctttcttcatattcaatgggacattatacaaaaatacagtctctttagtgatttaagactgtggttactatcccataggcagaaaaaactcagtactgtagctgaaaaataatgtaccttgataagantgctcttctggtttctacaaagtaacagatatgcagcnccataagtncataaacattgaaaacctgttttttaaatgggtttgatgcaaaatacatattctgtgtatgttagg

SEQ ID NO: 428580 - DNA, 243 bp, Homo Sapiens
  misc_feature (89)..(89): n is a, c, g, or t
  misc_feature (117)..(117): n is a, c, g, or t
  misc_feature (131)..(131): n is a, c, g, or t
  misc_feature (140)..(140): n is a, c, g, or t
  misc_feature (147)..(147): n is a, c, g, or t
  misc_feature (175)..(175): n is a, c, g, or t
ttaacatgtagcagagtcagctgcccagccacactgggcacggatggacccacaacattaagcaacaggacccgtgcagccgcaggccncaggagttacagcgcatggggagaagtntggggcagagcagncaggtgcgnctttggnccctttcttttgagacactgggcacctntgcggcaggccatgtttgccaacggcggccccttagggaagggacacagggcattgtttgcgggttcc

SEQ ID NO: 428581 - DNA, 454 bp, Homo Sapiens
  misc_feature (388)..(388): n is a, c, g, or t
tgaattagaaacagcaattgatggtggactttcactttggtctacacagtgctttgtgttatcagctgttgccacctcttcccacagtagaactctcaactcctagacatgactggttgaccagccgttccccaggaggatgtatgttccaccttgacctgtgtttggcaggcagtttccaaggtaccccacattgaggcagtgacccagcaccttcaccactgggttctttattcctgattatcaaaagtcagactactgctctgtggtaactgcatctcgtttgggttgccatcactgggatgcttggagtagccatgtggaacgttattactgtacacacttgggacagcttccagggattttgtgtgtgtgaagttgcagaaanggaggaatgtcccccatggcttggggagaatttaaggcatgttcaccctaatttgtggtaaccaag

SEQ ID NO: 428582 - DNA, 137 bp, Homo Sapiens
  misc_feature (86)..(86): n is a, c, g, or t
aactacacacacatccatgcaccgagcaggccaaacaaaattatgtcctgtggggtctgattccttcattccattcctttcattcnttccttcctttcaaccaggccttttgtttggcgcgcctacttgggcacaag

SEQ ID NO: 428583 - DNA, 199 bp, Homo Sapiens
  misc_feature (110)..(110): n is a, c, g, or t
  misc_feature (139)..(139): n is a, c, g, or t
  misc_feature (158)..(158): n is a, c, g, or t
  misc_feature (171)..(171): n is a, c, g, or t
  misc_feature (186)..(186): n is a, c, g, or t
ggcatgagctactggggcctgggccagtttcactgtatttttcggaacaatttccaacaggaaaggcacagcagtggacgtttccttactgggtcactgctcccgtgctntgaggcctgggagctgatccaagggaagnttacacattttcccggccntgagcagatgganttttagggttgctantttgggggacttt

SEQ ID NO: 428584 - DNA, 120 bp, Homo Sapiens
  misc_feature (97)..(97): n is a, c, g, or t
tagctcctgggcacaacatattgttttaaggcctccatgtccctgttctctcttcattggctaacacacacttattcttcaaagctcaggccagggnatcaccaactccagggaacccca

SEQ ID NO: 428585 - DNA, 476 bp, Homo Sapiens
  misc_feature (185)..(185): n is a, c, g, or t
  misc_feature (459)..(459): n is a, c, g, or t
taggacgatagaactcaatcctggcagtgcactatatagaactttgaaaaaaaatattaatacagatatccaaacacagacccactggatttaatactaatctaacacagagccactaaattaggacctctacggtcaggactaagcatgtgtattttttccttcacgtttaaattaaccttttntatttcaagatagtttaagactcacaagttgcaaaatagatcagagttcccctgtacccttcatccagcttccattgatatcttacataatcctgggcactttgtcaaagctggaacactggcattgagacaatactattaactcaggtacagaccttatgtacacttttttcccccggcatagagttttatgaaatttatcatgtgtgtatattaatgtgccatcaccacaatcacaacatgggagctgttccttcaccacaagggaactccntcgtgttaccccttagg

SEQ ID NO: 428586 - DNA, 424 bp, Homo Sapiens
aaggcagtattgaccagacatttctatttcagagttggatttgtgcttagttttttttaggtgttgggacccttgtagttgctttttattttgcttagtcaacaaacactaaaatgataaaatttggtatgtataagtactggacgaaggatgttttgacactaaaaaggacataatttaggaaattaagaatttagacaccaagtttggcttaatagaaaaagtcactatctgaacttctttctttttcaccacaaatcaccgcagaccagtgtttgggagcaggtgtaggaaattgaattattggatctatgtttaggtaagaaaactaaaggtacttcagaatttaggctatgacataactgtctttctgaagtttaaagaaagaaagtgaactatagaaatctatttcagctaatttaaa

SEQ ID NO: 428587 - DNA, 524 bp, Homo Sapiens
  misc_feature (115)..(115): n is a, c, g, or t
  misc_feature (413)..(413): n is a, c, g, or t
  misc_feature (428)..(428): n is a, c, g, or t
  misc_feature (465)..(465): n is a, c, g, or t
  misc_feature (475)..(475): n is a, c, g, or t
  misc_feature (490)..(490): n is a, c, g, or t
  misc_feature (507)..(507): n is a, c, g, or t
aaaaactttatctcacgcttttcatcaagagctgtaatcagtgagcctgtgtacttccttttccctgccagatagttgttcctggctggaagacattttatgatatttatttgangacacacacctgctgagtggatgaaaagcaactgttcctggggatgacctacttcaagggcgcagtcagcttctgaggccttcagcaggttatcctgaaatcattttagttcaccttgatatcacctgttgaacatatctaagactggtgtattcgcagacttgttgtaggcacagttgctaaccccagggaagagatttcggagtcagtaactactttgtcagtgtattgagactggggaagacacgctgctttaccaaacctactctgagcatatgggagtgctgttcttgggcantcggggatggcggcntcagcccggggacctgccagctggggagccggacccntaggaggggnttttagttgggaacntaagttaagtattggtnccagcacagaaggggtt

SEQ ID NO: 428588 - DNA, 344 bp, Homo Sapiens
  misc_feature (54)..(54): n is a, c, g, or t
  misc_feature (137)..(137): n is a, c, g, or t
  misc_feature (187)..(187): n is a, c, g, or t
  misc_feature (191)..(203): n is a, c, g, or t
  misc_feature (238)..(238): n is a, c, g, or t
  misc_feature (254)..(254): n is a, c, g, or t
  misc_feature (329)..(329): n is a, c, g, or t
ttgcttttccccctctatctcaaatgcctcactccgggacaaatattccttctnagcactacttaacataaataaatcaattttggctcttcaaagtcattctgcatataagcctgtcacccttataggagcctacngtacattctcattgtgaaccaatctctctttacattcacaatattatganggcnnnnnnnnnnnnnctcttccccaaggtaaatgtggctcatttaaaaanctacagtggggctctntgatctatgtacacatgtatgtcacatatttggaccatttaaaaaacacagaagcccttgagactttctgtaaantttgggatcataaga

SEQ ID NO: 428589 - DNA, 369 bp, Homo Sapiens
  misc_feature (335)..(335): n is a, c, g, or t
gtggtggtagttgttttttggtaagaccacttaatatgaggtctgctctctcaacaaatttttaagtgtacaatacagtattgttagctctaggcattatgttgtacaacagatttctagaacttattcatcttgcataattgcaaggtgaactgcaatgaaaaaataactgcatattgtcatatgtctctgcagtacatctttaatcctgctatcaaggcaacctaatagaatatgcagaaggttgtacattatagcttctactgccttcttcatacacacagaaaaggcatccgtttctgaggccatgcatgtgactgcattctgaccctgtnttggggcactttatgggtgcattgtctgtaggct

SEQ ID NO: 428590 - DNA, 479 bp, Homo Sapiens
  misc_feature (434)..(434): n is a, c, g, or t
  misc_feature (449)..(449): n is a, c, g, or t
  misc_feature (467)..(467): n is a, c, g, or t
ttttttttctatctattttgctaaccagatatctgagttgaatgtaatttaggatcaaggattctttcaagtgtaggactgtatggtattagcaagcactacataactgagcccccttgctatctgcacttagaccattagccacaaccctcaaaatcccagaggagttcaaggctagcagccattcagccgctctgagaaactgataaattgattatcaatgatcctttcctgttcattaaagcaatcctacccccacccccaactctacacttgggtaggcaattctttaaaaatattcttaaacttaggatttaggaatgacagggcctatgggtcttcttccaactggggctgggcatttgtggctgtggacacagcctgttaaggaatgtccacagactccgggggcatcggggtttcactgttggggnatgttacaggtgggngcttccaaagggggggtngacccggcaatt

SEQ ID NO: 428591 - DNA, 519 bp, Homo Sapiens
  misc_feature (437)..(437): n is a, c, g, or t
  misc_feature (456)..(456): n is a, c, g, or t
  misc_feature (489)..(489): n is a, c, g, or t
  misc_feature (506)..(506): n is a, c, g, or t
ttagttttaagcacaagcagaggaagatgggagcatagagaaggggaaatttctcctgcgcagttagttcaagaattcttcctggagaaagtgacctctgaactaaatgtttagggattctgtaatttactaagcaatacttacaaaaatctgttatgccagatgcagttctaggggctgggattctatagaaaagatctcaactttcataaagataccttctggggaggaaagtgagacactaacacaagcaaacaaataattaaaatcttcagtagtgatgagagtgatgagagctacttaaaatatatcaaggttgtatgattcagcctccattttgctattgtaacatttaagctgatacgtgggaagacaacaaagaaataatggagtaggtgaaaggaaatgcatttccaagcttcgggaaacagccaacngttaaaaggcaaaccaacngttcgccgctagggcagctttaaaaggtttttntttatttaaaatttgcnttttggaaaaccg

SEQ ID NO: 428592 - DNA, 423 bp, Homo Sapiens
  misc_feature (211)..(211): n is a, c, g, or t
  misc_feature (382)..(382): n is a, c, g, or t
agctgaaagtccaagatcaagctgccagtggattctgttcctggatgagggctctctccctggcttgcagacagctcactgtgccctcgcatggtgaagagagagaacaagcaggctctctggtgtcccttcttataaggacactaatcccaacatgagggccccacccttatgacctcatctaaccccaatcacctcctgaaggccccanctcctaataccatcacactggggcttagcacctcaacatatcaattttggggaaatacaattcagttcacagtgcataggatagatattaattgatattattcaaaagaaaccatggggcaggataaacccaaaaccaaactgttttaatggttatctattggggaagaanaagatacagggtgaacgggaagtttacagaaggcaaggttt

SEQ ID NO: 428593 - DNA, 470 bp, Homo Sapiens
  misc_feature (30)..(30): n is a, c, g, or t
  misc_feature (47)..(47): n is a, c, g, or t
  misc_feature (65)..(412): n is a, c, g, or t
  misc_feature (447)..(447): n is a, c, g, or t
ctatcctccctgcaacttcagtgctgggcnaggactggctcttaatnggatactgaatgaacccnnnnnnnnnnnnnnnnnnnnnnnnnnnnnnnnnnnnnnnnnnnnnnnnnnnnnnnnnnnnnnnnnnnnnnnnnnnnnnnnnnnnnnnnnnnnnnnnnnnnnnnnnnnnnnnnnnnnnnnnnnnnnnnnnnnnnnnnnnnnnnnnnnnnnnnnnnnnnnnnnnnnnnnnnnnnnnnnnnnnnnnnnnnnnnnnnnnnnnnnnnnnnnnnnnnnnnnnnnnnnnnnnnnnnnnnnnnnnnnnnnnnnnnnnnnnnnnnnnnnnnnnnnnnnnnnnnnnnnnnnnnnnnnnnnnnnnnnnnnnnnnnnnnnnnnnnnnnnnnnnnnnnnnnnnnnnnnnnnnnnnnnnnnntgggtcaagctgacttaggacaaatgagtgtgccngatccttcccttgaatgtgacag

SEQ ID NO: 428594 - DNA, 425 bp, Homo Sapiens
  misc_feature (23)..(23): n is a, c, g, or t
  misc_feature (356)..(356): n is a, c, g, or t
  misc_feature (394)..(394): n is a, c, g, or t
  misc_feature (412)..(412): n is a, c, g, or t
tatctatcttttttgtttgtttntaatttggttgattgatatgcacccaggccgtcttatttttacttgttaaatgtctgtctaggaagaactgtgattggaaaggaattaattattatacaaataaatctggtaggatatgagtggagtaagtttgcttgaaacagaagtatattttctactttgaatcacctcaccagagtcatctgtcaagaattatgtataacaatttatctttattgcctacatacaacatactttttctgaattaagataacttctatttgtgagttgaacttcattatctgccattttgtgggaatccaaccttacattctttgggtgggactagagcntgattgtcaccacaagggtatatgaccactctggttcntagggcttatacccattnttaggggtatacc

SEQ ID NO: 428595 - DNA, 468 bp, Homo Sapiens
  misc_feature (409)..(409): n is a, c, g, or t
  misc_feature (430)..(430): n is a, c, g, or t
  misc_feature (442)..(442): n is a, c, g, or t
  misc_feature (448)..(448): n is a, c, g, or t
ggccagggactgtgagtaaattctagaatatgcccttttggatatccaggaactcctgttaccttcttttggtaggttttcagtttctggaagcatagcattgttttagtcactggatttattctgttagatgaactgcatacacaaacttcagattttaatgttttcatttcattgaatatatgtatctcctgataatttatggaagtacttgacattagctctaatgttttgcagaaacacctagtttatacatttctagtaaggctttatttgtagaaataactctcatttataagtgttttttgaagcttcatgctctctgcctctttaaagagaaggattatactctttcgtgaaggattttttatgcttgtaatagggagtgggttaacatttatgggaacanctactatgtgtccagttcagngatttaaaaatnattttnatgggggtttaaatttgccc

SEQ ID NO: 428596 - DNA, 443 bp, Homo Sapiens
ttacttttagtttcctcttgctatcctgacagaaattataccaactagagattcacttggattaataaatgtatacttagttatacatttttcgaggactgttgaaatgatggtcatattttagtttaaatggtttccttttagcagcgtactataatgcaagaaaagttaagacactaagcttttaggatcaaatttggattgaaattctaacttcggaacttaccagccaaattaccttgaaaaaattacatagcctttctgaacaacggttttgttttttgctctaataccgtcaaccttaagccttgtggggaaaggtaaactgagaacatatgggtttgggcacttaacatacgcctagcactggggtaggggattgctaaatgggttttccctctggctaaccaggaattacacagctttgggaccagctggcactg

SEQ ID NO: 428597 - DNA, 491 bp, Homo Sapiens
  misc_feature (415)..(415): n is a, c, g, or t
  misc_feature (446)..(446): n is a, c, g, or t
  misc_feature (473)..(473): n is a, c, g, or t
ctaagactctacttgagctagaaatgttgagcagatccatttctcccctctacatcaaagccaactgtcagtggggaatagaaaaaaaggatgaacttccaggcattttatggactggtgcttaataaaaagagtgcctagtaaagtgcaaatgatagaaacatgaataataaatgtagtccttttacaagctgaccttaattggaaaaagtactcatggggacggatggaagagaaaaaagaaaggcagtgtcttgagtggattttttgacagcagagttccaaagggatgggatgatggaagagcctgttgcaaattttgatagcctctcagctaacattgctcctctaacacatttagccaaaaacagcagcccgtggaatcagttattgagtttaaggtgagctaggaacntaattctccccaagggggaaaaacattcccnttaagttaacctgggcttattcctttnttttcacagggcttggcc

SEQ ID NO: 428598 - DNA, 335 bp, Homo Sapiens
ttttttttggttcaaagtgaaattagtgcagtgattaatcccattttagagtctttgttcagcatgattgaagtttaatgtttttgctaggaaaaattacttggtgttttgatagagctgtaacacctacaataccaccagtagcattggttcttgagaggagacatagcatgcattccctcagatataatccttcaataaatactactgaagcagctctctaccagggaaggaaaacagcactcatcctcatcctcccgtgggactcactgtttttgtcttgcctattctgtgctgtaattctcacatcttaactaaagggagctaccacaact

SEQ ID NO: 428599 - DNA, 456 bp, Homo Sapiens
  misc_feature (399)..(399): n is a, c, g, or t
  misc_feature (413)..(413): n is a, c, g, or t
cctatttgaggtgatagcggctctaacaagaggtagatagatgggaggggtttgtgcctgacatcacaccatgagcaggggctgggggtgttccttcatctttaggacccaacatgtttcagtgtcacctgtacatcctgggcaactttgaggaagcttcctctctgtgacatacttagcagctaaacaggtttatgttttccatataaaactccctgagtcattaaaattttggagttccctgaggagcacagcaagttggcctggggggtgaaaaggaaagtccttttgttttgaaccagtggtctggggattaaagagactctggggagggttcatttgggtgaagcaggagagagactgctctggttaggaaactgctgatccagttttgaacantttgttcagttgtncatagtttccatgttttaccttgccccttgaagtgcttgccaa

SEQ ID NO: 428600 - DNA, 469 bp, Homo Sapiens
  misc_feature (398)..(398): n is a, c, g, or t
  misc_feature (428)..(428): n is a, c, g, or t
  misc_feature (444)..(444): n is a, c, g, or t
gcaagtaacaaactatactcatatttaataagcaccatttacctctatgtagttttatatagttctcagcaatgtgatttatatgagcgcttcctctatggaagaataagatgatttggatattactatcaatgcacagtacggatgccaattagatggtaaattcaattattcttaaattttaaaacaacaagtttcatgctttgttcaaatacagcttattttttgaaaaattcccctcttccactctcctaacttgggtacataaagttagggtaatatttacattgaatttacagtctttttcatttaaaacagtatcagtatatcttgctgtaggatattaatttaagtgattgttgttaacttcactatacccaaacttggcaatatgggcngtgaggtccaaataaaactttggaaagggnacccgccctttttcanaacccctttctggaccgtgaatctt

SEQ ID NO: 428601 - DNA, 357 bp, Homo Sapiens
tagttcacttgtttactttttaacctatattggcttaaattcactttttagcccctctttgtcataaggttctgtgctgcatttgctacaatagaagctcctatggttttaaagaaagttcagtgttttgtcagtgtcaagtgctacttgatgattatatttgtctggaacagtattcacttaagtctgtttataggcaatcccttttttgacaaaatttacaaagttgggcatttttactttaaattccatctctatcagtgacttcctaaaaagaggcaacttaggaaatgggggggaaaaatgtttttaaaggcccaaatgctccagtttttattccaagtcaagtcgttattc

SEQ ID NO: 428602 - DNA, 419 bp, Homo Sapiens
  misc_feature (133)..(149): n is a, c, g, or t
  misc_feature (225)..(225): n is a, c, g, or t
  misc_feature (269)..(269): n is a, c, g, or t
  misc_feature (346)..(346): n is a, c, g, or t
ccagatcctattcttcaacattcacagattctccagcatctcccatgtctcccattttatacaaagtacagcctttaattccatctcttcttgtagtaaatgccttagtatcctctagctaccaacaaccccnnnnnnnnnnnnnnnnngagatggagtttcactcttgttgcccacgctagagtgcaatagtgggatctcagctcactgcagcctctacctccngggttcaaacgattctcctattcatcctcccgaatagttggganttacagacacccgctaccacgcctggggtaatttttgtatttttagtaggaggacaggggttttggccatgttgggncaggggtgggtcttcaaactcctgactttcagggcgattccgctggccttggggcttttcaaagtgttggggg

SEQ ID NO: 428603 - DNA, 440 bp, Homo Sapiens
  misc_feature (195)..(205): n is a, c, g, or t
  misc_feature (428)..(428): n is a, c, g, or t
ttgaagtgacttttctagtaagttgtagaggaggaccagaatctactgctcctggaagcactaatgatttcctgtaatagatttctaatattttcacagggatttcatgagcacaggcaaaacatacagagaaaatattgttgaaagtattttgaatcactgccttctttaaagctaaggtgagatatggagggnnnnnnnnnnnctccttatttcacataagtaccatgtgctaactgattgcgccactgggagctcctttcttcttatttctatagatcttgtataccaaggttaggattaggatcagattcagtaggttgaacctcacttttgatccaagtttcttcacagcccacatctaggcagagcttttcccctcaaagggctggggtaggaggagtgggcctttggtttctggatgtatnaatttaacccct

SEQ ID NO: 428604 - DNA, 369 bp, Homo Sapiens
cctacctcccatttattcaatagatcaggtaactcccctctttgttatgagcctagttttctagaggtggaccagattccatcatatgtacatcactcagctagttgagctctctaaatgaaaacttcagccgtagccactggatagaagaatacaagaaggaatgccgacttgaggagcaagttgtgttgagttcaggcattgctttggagaatctgcttcttcacctgctggcttaaagggttggatgacctgaggcagcagcaggaagtttaggacaattatggttgggatgattcttaactgtcctaatcccaagtcctcaatttataagtgagggaactgggaaaatcatttcacacagctagg

SEQ ID NO: 428605 - DNA, 115 bp, Homo Sapiens
ttattttttctttcacctcctgatactgaataatctcagttaacctgtctttaagttcactgactattctgcctgcttgaatctgctattgaaatcctctagtgatttttttatt

SEQ ID NO: 428606 - DNA, 490 bp, Homo Sapiens
  misc_feature (190)..(190): n is a, c, g, or t
  misc_feature (325)..(334): n is a, c, g, or t
  misc_feature (436)..(436): n is a, c, g, or t
  misc_feature (441)..(441): n is a, c, g, or t
  misc_feature (458)..(458): n is a, c, g, or t
  misc_feature (465)..(465): n is a, c, g, or t
  misc_feature (470)..(470): n is a, c, g, or t
ggagctgcaaagtgactgctaatggaggaacgatctgctggctgggggaaatgtggcctgagactagagatgcagagaggcatctctagaaggagagatgatgccaatagaagccccaggagggaactggccagtgaatacaattttataaagattctcagtactttttctgaaaaaattcctaaaattntcaagggcgcgtctagcccttctgcctctttagaggtgagctcagtgctacttctgggttcttaaggcaaatgccctacaaacaccaaagtcttgtattttccacttctcagccggcactggcttaagtggggannnnnnnnnncccttccctaagtgaaaggggacttgtttttcagggagaagtgtccttttaaacatccagctaaaactgggaagtaatttttttgcatggaatgggcttttnacagntagggtctacagcaggnacaaaantgttnttaaactaagtgccacttta

SEQ ID NO: 428607 - DNA, 209 bp, Homo Sapiens
  misc_feature (60)..(116): n is a, c, g, or t
cttgggcaggcattttgtttataatttttacaatcaataatagaatgtccctgttttacnnnnnnnnnnnnnnnnnnnnnnnnnnnnnnnnnnnnnnnnnnnnnnnnnnnnnnnnnttcaatagaaagagacataaaaaagaccttttcaaatgaggcatgacacgcaacactcgacactcttatttacaatatagagatgtactttct

SEQ ID NO: 428608 - DNA, 418 bp, Homo Sapiens
  misc_feature (394)..(394): n is a, c, g, or t
gctgctgctttggatggggcctgcgctccccagttttacaactccccatgtaggcaccctcccttgctgatttgtgccatttgccaggctcctgtaggcatttgagttcccagccctgccttgactgtgtctcataacttcctgtaaagcccaaatcctcccgcatggcacccaagatgaccccaacttacagtttctccttcatcctctgctctaaccttacagaatgatgtgccttttcttgagtttttcaagtctccttcacctgggaatgcttccttccttcacctgggaatgctttcttccctgacacgtctccagctaatgggaaacccatggttcccagtaaggatttcactcaagtgttcgtttggtttgatatttttggaaggcnttctccaggttaaggttatcctgg

SEQ ID NO: 428609 - DNA, 360 bp, Homo Sapiens
  misc_feature (335)..(335): n is a, c, g, or t
cccccagctctgcctaccatagtattgctcccttttggtcactgatgcacatgactaagaagagttctctcctgagtaactacatgactttggagatctttgtcattctcttcactgcttatcttccagaactcatgattacccacacatgcctttttaccaggcagtaagaaatgcagcccccctaggtagtagcatggtcccctccttggcccactccactcttgccctcaacctctttcaaccaaacattatcacccaccttaagaaattaaaaaataattctgtcccagtctgtctggaacttagtacatgatccagggatgtgatggggncttaggggcttgggctgggaaggtt

SEQ ID NO: 428610 - DNA, 383 bp, Homo Sapiens
  misc_feature (304)..(304): n is a, c, g, or t
  misc_feature (313)..(313): n is a, c, g, or t
gagttacggtttcttcttctgtttccgtttcctctctctctactcactcctactttctcctgcatcaactttggtcaattaacatagacaagtgattcatctgtagagaggctcctagactccaagcagcccccttccttgttcattgtggctgtaggttttataaggaggtctgtggctccctgggcatcaaaatatgaaaaataaaatctgtgcctgttccagcttcaatcctcctccaagccttagcttttcaacaaccctaccctttcaacttcagggatcatgggagtcacagagactnggacaactnctccaaatctaggacaaaggactttcttaaggcgccctgagcccagggggcattatcttcccatcagggg

SEQ ID NO: 428611 - DNA, 512 bp, Homo Sapiens
  misc_feature (60)..(60): n is a, c, g, or t
  misc_feature (90)..(90): n is a, c, g, or t
  misc_feature (118)..(118): n is a, c, g, or t
  misc_feature (130)..(130): n is a, c, g, or t
  misc_feature (137)..(137): n is a, c, g, or t
  misc_feature (200)..(200): n is a, c, g, or t
  misc_feature (204)..(204): n is a, c, g, or t
  misc_feature (305)..(305): n is a, c, g, or t
  misc_feature (328)..(328): n is a, c, g, or t
  misc_feature (375)..(375): n is a, c, g, or t
  misc_feature (420)..(420): n is a, c, g, or t
  misc_feature (425)..(425): n is a, c, g, or t
  misc_feature (432)..(432): n is a, c, g, or t
  misc_feature (470)..(470): n is a, c, g, or t
  misc_feature (499)..(499): n is a, c, g, or t
gtaaaggcagccagaaatgcagagtgtagatgtttattaggcagtgttgaattagtagancagtaaaccatcagaaacctaattcagggntagggagaaagttatcttttgccttctntttattcctttnatttttncctgtaaagtgaagagaacataagttttgaagtcagtttatattcgtgacttcattttatttnactnacttgctgtgtgatcttgaatgagatttggaattgttatactctcctttacccagttcacaaagatttaaagtagatatgatagttatctcagtttatttntgagaaaatctaatgatataacntaggtaacacatttctgttttttactgttcacattgggagggagggngtgagtagataagtagccagctattcgtaagagatggacataggnaacancgttaanataggaactacacccatgccccaaacgtgttctaatcntctcacttggcccttttttaaatggaccnaaactgttctttt

SEQ ID NO: 428612 - DNA, 467 bp, Homo Sapiens
  misc_feature (376)..(376): n is a, c, g, or t
  misc_feature (409)..(409): n is a, c, g, or t
  misc_feature (414)..(414): n is a, c, g, or t
  misc_feature (421)..(421): n is a, c, g, or t
  misc_feature (441)..(441): n is a, c, g, or t
  misc_feature (452)..(452): n is a, c, g, or t
cgtgccatttgccagattccaaatgaggtcttcagtgcagcaaagcccaaaaggtgtagactcagttatgcaattataaggttaaggcgtagaagaaagctgctgctaggtttttgttgcattttacttgactgctctgctgtttttcttgtctctcatgtttggttagctatgacttgagcatcttggtaactgacaaaggtcttccttgggggacttgaacatcttggtaaatgacaggtcttcttggaggactccagcagtatcttgtttaaacgactgaaaggactattaaggttgttgaattgtgttaattggggactcattgagggaaatgcgacattgatcctcctcttattccacagtgtggttttcnggatccatattaaaggaagggttccccaacccntcccntcccccnttcaggggtttatttccccnggggggaaggncttaaattggcaaat

SEQ ID NO: 428613 - DNA, 407 bp, Homo Sapiens
  misc_feature (374)..(374): n is a, c, g, or t
gtaaatgcattttcatatggctttgcatgatgattaaagattattaaactgctggatataataaggtgccttttgctttaaggatagcttatttcattctttagaaggaagaaaataatccatatgagtaaatatagctaagtaaatagtttatttttccaggtgctatgttaaataaaagattgtgtttaaatattttgtatatattttgcttaggtaacctatatctctaatatttgtttagattctttcctaacatttttaccttacctgtaatgttgatatctgttttgtaggattcagattaaactttacaggaagtctgggaaaatgtatttaatagggtaggcaaacccaatatggagttattgaangaggccaaatgtattactttctagggggaatat

SEQ ID NO: 428614 - DNA, 344 bp, Homo Sapiens
aagagaaaattaaaagtagaaagatttattacaacctagatttcttccattctacttcctctagttagcatcacccacatagtaacttacttatctaagagtcctgaagatcagctgaacattataagcattatttaaaatattaaacattgtgaaaacatagatatagaagtttattgaagataatgttttcaaacagttacataataatttgaatatagggaatcctagggaatttaattttttctgacatcaaatactttaacaacaccggggttttgggggtaatcataggtccctcaggggctttttcaaatatggcacatttagtggaggtataggtt

SEQ ID NO: 428615 - DNA, 174 bp, Homo Sapiens
  misc_feature (62)..(62): n is a, c, g, or t
  misc_feature (138)..(138): n is a, c, g, or t
gactattagggcaacagtgggagctccacaaaggggctacaacattttctcctctcctctgncctgctggctatcccaatcctttggaggtgcagcagcaagttggtatgcagttggtctccccatgtgggatggctntaacgagagaaactgctgttaaataagtccccaacc

SEQ ID NO: 428616 - DNA, 439 bp, Homo Sapiens
  misc_feature (411)..(411): n is a, c, g, or t
acattattgtttagaaatgatagactgttattgacttttggtgtagctgggaagctggagaagaggtagtatgtagtttgcttttgatttcaaaatgccacctcttctgattccagatacaattatcttttggcacatttcctaattagcattaggttcttataaatgaaattttattttacacacagtttttaatggaacttacttttgaacatcacgaaagttatctctagcccttttcatgccttaggtgctgataagcattccgtttatcataagctatgtcattagtctcagcttcctagtggggaagtaaaactcataggcaattctctcagtcatccatggatatataggctagggtgggggccagatggatttgaaaatttaacatattgttccatttagggngccttggttttcattttaaggtggtttc

SEQ ID NO: 428617 - DNA, 429 bp, Homo Sapiens
  misc_feature (393)..(393): n is a, c, g, or t
  misc_feature (404)..(404): n is a, c, g, or t
  misc_feature (416)..(416): n is a, c, g, or t
tttactatctactggtgcgtaacttggggtctttccagggttagcagcctcctaagagttttcctgtctgaattggaagactgtctcatccttggttctggggtccaaatctttcatcagcaattcctcagtgtctttactcgtattatctcattctgccttctctgcaggaaggtggtaggggagaagggacagaaggaagaaagagaaccatttatgtagcacctccagtgtctagcactgggacttggattagaaaaagtaatcaataaacatatgtgggaatgaattgcattatagagttcctcgtaaggtttctccctattttcatactccccgcttccaccctccaaccttccccaaatagggatctcttttgaggaacagggggantctaggattcntaccagagtttntgcactgttgctt

SEQ ID NO: 428618 - DNA, 419 bp, Homo Sapiens
catggctcccaagtgccgcagggtccctgttttcacagtcccatcctcccacgtttctcttcagatggcttcatagagcccagagctcctctatacaaagtgtgatcattcccagtggatttcttcgctccatagctttatcattggagatctggttgatcctgacgtagcgctcaagaaagcactaaatctgaaacgtttaaaaaccaattcacgtctcctgagaacgatgttgtataacacaatttttttctttccttttgatcccaaaagaagaaaatcatgacaatattctttcataaatccattattacactattactatgacaggatattgtatgtggggaaataatgaagccatttgccgtctcttccccagtttcctttaggagtttctgtggctgaggcaaacctccctg

SEQ ID NO: 428619 - DNA, 316 bp, Homo Sapiens
  misc_feature (49)..(49): n is a, c, g, or t
  misc_feature (122)..(122): n is a, c, g, or t
  misc_feature (187)..(187): n is a, c, g, or t
  misc_feature (204)..(204): n is a, c, g, or t
  misc_feature (213)..(213): n is a, c, g, or t
  misc_feature (216)..(216): n is a, c, g, or t
  misc_feature (234)..(234): n is a, c, g, or t
  misc_feature (276)..(276): n is a, c, g, or t
ctatatttgagatgataattgctacaggaaaaaatgaaaaatcactcantatgcagattggtgtccctataaattcatggtctcaaatctcaaccagtttctcagaactgcctatcaatctnagtcgtctttgtcagttttctcattaacttaattattatctaaacctccttaagtcttcttatancccttgtcactcccctncaacctcgnctnactctcagttttctactnaaagaaaattaaagcatgacttctctcaaattatcatctttncccccttattacaaccagccctccttatatgtgggattcc

SEQ ID NO: 428620 - DNA, 165 bp, Homo Sapiens
  misc_feature (118)..(118): n is a, c, g, or t
  misc_feature (130)..(130): n is a, c, g, or t
  misc_feature (146)..(146): n is a, c, g, or t
gactatggattcattaagggtttctaggtcaacaggcagggcttattaggtaggttaaggttttaggggggagttcaaaaagtttacacggcaaaatttttcaaaaggtttgaggggnttgaatttggcntcaaccccgtgtttgnttcaaggggttaacctttt

SEQ ID NO: 428621 - DNA, 453 bp, Homo Sapiens
  misc_feature (417)..(417): n is a, c, g, or t
  misc_feature (435)..(435): n is a, c, g, or t
ttttttttaccccctctggagctcttagaacatcttttagaaaaattcaaaaatctggtaccactggatgagcagcagattggaaggtgagtcgccactgccccctttcggcaggtctatactttctgccagcgtggtggctcatttgtcacctgacctctgtcggcactagtgtttggtttagcccagggaagtgactgcaggcttggtaatgcccagggactgccatagggtggcagcactggtgtgccgataaggctggctcatcagccagaacctgcagccagaaccagaaatctccttacttggtagctgacagtctcttcccaagttccatccgatttgttccctgggaagcaacagcagctcatttccgcattcccactagggctcagggagccttagaagaaggccaangacttaacctggttcctnctttcagggcaccaccag

SEQ ID NO: 428622 - DNA, 306 bp, Homo Sapiens
  misc_feature (189)..(189): n is a, c, g, or t
  misc_feature (234)..(234): n is a, c, g, or t
  misc_feature (281)..(281): n is a, c, g, or t
atttaatgcatgtgacactctggtatttgaattactggtgtcttcattggtcttcttttctctgtgtcctttgggacctcttcccagggaactctgtgtcactaacagtgggatgctcaaccatggtggggtactgttctgattatgagccatgggcctgctagtgaagagaggggcaggggtctaggnggaaggctgcactctgtctgtatggtggcttagttctaaaaaagnctttaacttcagtgtagttaagaattaatagacttccattcttgatngttcataggctcaaactttttgcaa

SEQ ID NO: 428623 - DNA, 445 bp, Homo Sapiens
  misc_feature (83)..(83): n is a, c, g, or t
  misc_feature (313)..(313): n is a, c, g, or t
  misc_feature (388)..(388): n is a, c, g, or t
  misc_feature (399)..(399): n is a, c, g, or t
  misc_feature (407)..(407): n is a, c, g, or t
ctatttgcataggttcaaaaaaaacatgttctccttcctaccagggaataattaacaaatcacttttgtaaccatcaccatgnccacacatctcattaaagtagatatggcaaacccattattaagcaaagcagttccaagcaacttggctgaggtaaattgaccggttcttggttcctgacttcagtatagtatgtggggcagtatcttacacataaagaaatgacaacctcttgggcttgaaaaagcctccagacaaagttaactcctatgttgtagtaacacatggccctagttttattaactagacttntaagaaggtctttgtatactaagcgtaaccttttatcacactcacataataaaactagtcatcaaactaatgatnctaaatcaggnaatcactnagcaaattttggccaattcatgctttggggggatttgg

SEQ ID NO: 428624 - DNA, 407 bp, Homo Sapiens
  misc_feature (136)..(148): n is a, c, g, or t
  misc_feature (189)..(189): n is a, c, g, or t
  misc_feature (280)..(280): n is a, c, g, or t
  misc_feature (283)..(283): n is a, c, g, or t
  misc_feature (394)..(394): n is a, c, g, or t
ctcacaaaatttcattttaatcatcttctttacaaagcacaatacttaagacttttctaaatacaactttataaaatgaagcaaaaaaataatctccatagatgcctggtcgagtccatgctgaatgcaaaataannnnnnnnnnnnncaaaagtgatacttccaagcttttcaacattctcgatgggnccattttgtaaagagtaaagatggtggcagtttgggtagcggctcgtccagttccttgatgcagaatcctcttgctgggtagcccgagggncgncaatgaagctagacataccaacttctccttccagaatcacttctccctctccttatacaaaggaagccaatggcctctatgaggggggaagacatcagctctctaacattnccatgttgaccag

SEQ ID NO: 428625 - DNA, 424 bp, Homo Sapiens
  misc_feature (149)..(149): n is a, c, g, or t
  misc_feature (174)..(174): n is a, c, g, or t
  misc_feature (281)..(281): n is a, c, g, or t
  misc_feature (286)..(286): n is a, c, g, or t
  misc_feature (336)..(336): n is a, c, g, or t
  misc_feature (369)..(369): n is a, c, g, or t
  misc_feature (398)..(398): n is a, c, g, or t
gactgttacaactatagtctttaattgtacatatgcatgcacacttgtgtacacagatgtaaacttggctttgagtatatttatatatagcacaggcttagactcatgcatttggtaaatttggggcactagttgtcttattgcctggnaaatactatagaaattcttttaganttttacatgcactaatcaagaaatatatgctagaaattcttgtcagttagatactgagtaaatttactgataatgacttagaagtgaaatctaattaatttaaaaancagtnttaatttattaaggcataatcccagatgacagacaaatgggccctcaatnttgggcctgtacattaggatcccttggggaagnttttttaaaaaaatactgatacccggggnccccttgcccgtctaggtttggggtc

SEQ ID NO: 428626 - DNA, 564 bp, Homo Sapiens
  misc_feature (165)..(247): n is a, c, g, or t
  misc_feature (303)..(303): n is a, c, g, or t
  misc_feature (387)..(387): n is a, c, g, or t
  misc_feature (402)..(402): n is a, c, g, or t
  misc_feature (408)..(408): n is a, c, g, or t
  misc_feature (441)..(441): n is a, c, g, or t
  misc_feature (483)..(483): n is a, c, g, or t
  misc_feature (491)..(491): n is a, c, g, or t
  misc_feature (500)..(500): n is a, c, g, or t
  misc_feature (539)..(539): n is a, c, g, or t
  misc_feature (547)..(547): n is a, c, g, or t
gcttgagttcaccagtttattataaagaagaaaactcaggaactggcaaagggaagagatagaagacagagtgtgctatgggcatgggacttccagggcccctctgggtgcaccagcctccagggtctccacatgctccccacccagaagccccaccagccttgnnnnnnnnnnnnnnnnnnnnnnnnnnnnnnnnnnnnnnnnnnnnnnnnnnnnnnnnnnnnnnnnnnnnnnnnnnnnnnnnnnntacccagcccatcttgaggctgtctagagagcccactcttcagtcatctcattagncataaattcagggtgtgatcaaaaggggactctttattaaaaaacaattatgtttacaacaaaataacacttaacaatgtaagntattaacaaatgttncttttnagaaaatttcccaggagttttttaggccttttntatttttcaggggacccaagggggcaaaggacccaattgtcntttttttnatttttacntacagggggggttttaaggttgaggaggggtagaagggncccggggnttgaggttttgaggcag

SEQ ID NO: 428627 - DNA, 165 bp, Homo Sapiens
  misc_feature (152)..(152): n is a, c, g, or t
tgagacaccacacatgggccaattttttcaactttttatgtgtatcaggaatcaactagaggaacttttataataaattcacatcgtggggctcacatccaaattcacagtattattcaggaatctcttgggggcagagcaccaaaacctcntataggttattaa

SEQ ID NO: 428628 - DNA, 397 bp, Homo Sapiens
  misc_feature (36)..(36): n is a, c, g, or t
  misc_feature (156)..(156): n is a, c, g, or t
tttttctttttgtataattgagtcacctcttcaagnaaaactgacacaattttctgtgttcttgtcattaattcttctataactctctacaatagaacatataggataatccattattgcaacttatcttttttctctgaaagaccttcccctggnaatcctcccttctcctccaaaactcaggactggctgctgtatgggactggtattcaggtgttatccctttcttcaacttcattgttctgggattacctttgcctctcttctgcactggaatcctccaatttctggaatctcatggctatcttcattcttggatttattcccttaggtttgatggaaccacaagttgtatggagtgggaggaattttggaaaccgtggtgttttttggaaat

SEQ ID NO: 428629 - DNA, 459 bp, Homo Sapiens
  misc_feature (79)..(111): n is a, c, g, or t
  misc_feature (443)..(443): n is a, c, g, or t
aaatgttggttttatatcaaaatatggaaacctcatccagatagaaattctatgagtttctttggactcttttctaagnnnnnnnnnnnnnnnnnnnnnnnnnnnnnnnnncatattggactgaaatctgccaccctgtaacttccaactattggttctagttctgttctctggagcagcatggagtaagtgtcttctattagaaggcatctgtcaccttttctagactgaatttctccaggtgtcctcccctttttatatgaaattaaaacccatatctctgaccttcacattgattccctttggaatcttacaatctaatatgaacttcctagtttatcagtgttttccctaatacagttaaaatatgatagccccaaattttaaatttaattctatactatatttctatgttactatggcacaccagttacagaataccntgtactatagaccatt

SEQ ID NO: 428630 - DNA, 475 bp, Homo Sapiens
  misc_feature (428)..(428): n is a, c, g, or t
  misc_feature (440)..(440): n is a, c, g, or t
catgggaaaaggaggaaaaaagtaaggtctatgacatttggaaagtgaaatgtaagataaacatggtgatcagagcataggaagcttataactaactgaagaagaaaggtcctgcaagaaataaacaacgttttacctctgggccctggaattggaggcaacaaaaatcactgaaacaaggaagaagagagaaggctgaaattctgcagcagcaattcatctttcagatttcctccacagccaaatgacaactcctcctaaatcctgatataaggcaggagacttacctattggtaaaattaaatcagaaatattctagacttcaggatatcagacacaatagagggcctgaaaacaaggtaattggatggaaaaatctaggatacccaagttggaggaagccatcaacttccttcttttacccgggntgctatattccnaggttttggctctcttgggccgggagccttattgg

SEQ ID NO: 428631 - DNA, 115 bp, Homo Sapiens
aaagacactgctggtcataaaacactgttttacataccatagggaaaaacgctgccaatcttaactaagatgctacaactgtacagttccttccaatcagagatgttcacgtgtg

SEQ ID NO: 428632 - DNA, 417 bp, Homo Sapiens
  misc_feature (221)..(221): n is a, c, g, or t
  misc_feature (253)..(253): n is a, c, g, or t
  misc_feature (277)..(277): n is a, c, g, or t
  misc_feature (302)..(302): n is a, c, g, or t
  misc_feature (363)..(363): n is a, c, g, or t
cctgtgtaaaaacagctactatttattagcactcaccacatgctaggagctttgtaagcatcatctcattccatgctcttgacaagcctaaggggtgggtacgtttaccatacatcatcccatattcagaggagcaggcagaggctcttcaggttgcccagggtcacacacttgacaggaggaaggggcagctgcttaaactgggctctagaacttgccgntaacatctacactttagccacggggtaatgtnttgggggtatggtggggccagggnaatccaaactaggcagaactggatnttgctacacagcatgcagtgctgacctaggaaagggtcccaaggggcacttctgatgctgnaatcagggagggcatgaagggctactttagggcaaacagagcaacttttgcaca

SEQ ID NO: 428633 - DNA, 502 bp, Homo Sapiens
  misc_feature (210)..(210): n is a, c, g, or t
  misc_feature (470)..(470): n is a, c, g, or t
gaaaaacacaaataagtgagatggcacacagcttaaataaaagcccttagtacctcatactaactctgccaccaagatagaattatgacaaatcatcatctccaagatcaatgactcatctttcaaatttaattaagaggcaactccatagtaaatgactttcacctaatttcaaactgtgtcatctcaggaacagtatagtttcagggnacattttgggcttcccaaaacagagtacaaatctatttaacaaacctaggccttttaggcaagcaattccagctgagcaagtcccttttcagaggaaacaacttcccaactagtcactgggaattgtgtaaacaacacacgcagttgactgacccaccatttataagttaccccaatactctttaactatatttcaaaatgcccagtgattttcccattcaggaagttgttcacagtttttgttctcaggagatgaaagncttgacatgtatttctttaaaggggggtttct

SEQ ID NO: 428634 - DNA, 648 bp, Homo Sapiens
  misc_feature (29)..(29): n is a, c, g, or t
  misc_feature (46)..(46): n is a, c, g, or t
  misc_feature (53)..(53): n is a, c, g, or t
  misc_feature (73)..(73): n is a, c, g, or t
  misc_feature (146)..(146): n is a, c, g, or t
  misc_feature (167)..(167): n is a, c, g, or t
  misc_feature (186)..(186): n is a, c, g, or t
  misc_feature (211)..(211): n is a, c, g, or t
  misc_feature (351)..(351): n is a, c, g, or t
  misc_feature (456)..(456): n is a, c, g, or t
  misc_feature (579)..(579): n is a, c, g, or t
acctgttaaaaaaagcctttaaattcttntgttcctttaattcttntaattgnataaccatccttaagcatgntgccataatttttggggaagtaaccatatgaataaattccaaccaccattccataataaatccaaaatccagncataaattgggggatatttgntccacccttaaaatattgnatcttttcttgaatgcctatggagncatttagggttaaatgggggtaccaaaatgttaccagtttaggataaaaaaaggaattaaggacctgggtcttcaaattaccatccatgggtgggctatagttaaaccatttaacccattggtaccatttccaaaaatgnctaggaaggaggaataaatttcccaaccaccggtttttttggtttgcttacttttttctggaaattctaaataggacctgaatacaatccaggtcccctgcctgntagcggaaaaaataaatgactttccctccaaaatgccaccttcaaggaatgtgaccctcaaatgggatgtaaccaggaaaggaaccctgctccttgggtgttttggggaaaggaaaaagggtnttagggcccgccaccaatttccttcttcctcccaggggggattcaggaggtcctgggggggccaggaat

SEQ ID NO: 428635 - DNA, 566 bp, Homo Sapiens
  misc_feature (112)..(112): n is a, c, g, or t
  misc_feature (125)..(125): n is a, c, g, or t
  misc_feature (454)..(454): n is a, c, g, or t
  misc_feature (469)..(469): n is a, c, g, or t
  misc_feature (496)..(496): n is a, c, g, or t
  misc_feature (516)..(516): n is a, c, g, or t
  misc_feature (527)..(527): n is a, c, g, or t
  misc_feature (532)..(532): n is a, c, g, or t
  misc_feature (556)..(556): n is a, c, g, or t
ctattgttgaaatttctgcctggctgtagaaagcctctggggcaatagcagatccttccagtgtggggacacagttgtgccatctgaagagggtggcatgttgggtggattnggcagccccaggncaaagaaggtggcagttctgcagtcggaccttttacttcactgtctacacatctgtgttatttcgctggggctgccatagcaaaatactacatacagggttggcttaaacaatagaaatttattttctcacagctctggaggctggaagtccaaggctaaggtgccggcaggttggtttcttttgaggcctctccacttggcttgcagatggctgcctttcctgtgtgtcctcacacagtcttgcctctgtgctcacatccctgggtgtttctttacgtgcccagcttttcctctttccatgaagacaccagccacattggaccaaggnccacccaaacagcancacggccaggccctttttccttttttnaaaggaaaccatgatattgnggtttttaatnattgnatttaaacattttccaattgttgnattgtttgag

SEQ ID NO: 428636 - DNA, 356 bp, Homo Sapiens
  misc_feature (84)..(84): n is a, c, g, or t
  misc_feature (235)..(235): n is a, c, g, or t
gcttattataaaccatcttttgaaaatgattaaaacaagacaacaattgtctgtgactagccaaatgtccaggttagttgcagntagaaacacaattgacaaagaagtttggctatctctgtggtttacaataacttaacaaccttaattatggttgatagcatatacttagacattagagttttagaaatcccatataattttgggaacatacattaggcattattcacaaaantataacctaaagaaaactgaacatcattttgggcaatcccatgtacctaaacatgtcaaatgatcctgtttacctatttcttgggatatttcagggggcactccaaacgggtcccaaaagg

SEQ ID NO: 428637 - DNA, 414 bp, Homo Sapiens
  misc_feature (214)..(214): n is a, c, g, or t
  misc_feature (259)..(259): n is a, c, g, or t
  misc_feature (281)..(281): n is a, c, g, or t
  misc_feature (318)..(318): n is a, c, g, or t
  misc_feature (324)..(324): n is a, c, g, or t
  misc_feature (347)..(347): n is a, c, g, or t
  misc_feature (355)..(355): n is a, c, g, or t
gcgtttgtccagtattattcaaatgaccggacataatgaaggatggcgacaggacgaaggcttctgccctaagatttctctcatctcgtttttaccatcttgtcttcgtggccctcacttgtggttgtgtctgctgtggtgttatggacactgctagtgttaatacagcacaataagaaagtgtgaaaggggccgggaaaggtggcgggacggnggcggcacgtggggttcccctcacagcactgtgcacggtgcctgnttggggttcctccatgttggancagcaacgttgagcggcccaattttgcggcagggaantttcantgggtgatcaagggcaagccccnttatttancaagacaaagcaaatttggggtttaagccagttcaaggaggtttgcaggtaggttgggg

SEQ ID NO: 428638 - DNA, 429 bp, Homo Sapiens
  misc_feature (176)..(184): n is a, c, g, or t
ttttcaggaaatgggcctcacctcttttcttcctgtcaccctggtagttttgagtcaatgctgagcatacatgcagttttatcttgcgccccacattactttgcatatggcctcaaatgtcccttattttacactggtctttgatatatttatggtgtacatacatatcagaaacnnnnnnnnnaatcacaattccttatggacttaattatcacattatgacatgaaattaccaattttaggtctcttttttccctagggcgtgttgaggatcactagagtaacatcttgggaaggtgccaagtagtaggagttttatgggacttgagtttattcttaccaggggtgttgcaaagaccttactcctggggttgcaactatcttaccatttccccaggcattccctcttgactttcttttttgcagatc

SEQ ID NO: 428639 - DNA, 539 bp, Homo Sapiens
  misc_feature (190)..(190): n is a, c, g, or t
  misc_feature (199)..(199): n is a, c, g, or t
  misc_feature (201)..(201): n is a, c, g, or t
  misc_feature (203)..(205): n is a, c, g, or t
  misc_feature (220)..(438): n is a, c, g, or t
  misc_feature (463)..(463): n is a, c, g, or t
  misc_feature (482)..(482): n is a, c, g, or t
  misc_feature (497)..(497): n is a, c, g, or t
  misc_feature (508)..(508): n is a, c, g, or t
  misc_feature (515)..(515): n is a, c, g, or t
aattattaagacctgggaacatatggaactaaccacacccttaattatgctaggagtcaaaccttggctgcatctggcacacaaaacagcttaccaagttttacattaaaattaaaaattgctaggagttactgttttaacatgtaattgagactactggaaatagatttatatgcgaggtgtgtaagancagtaaatntntnnnttttttgaaacggannnnnnnnnnnnnnnnnnnnnnnnnnnnnnnnnnnnnnnnnnnnnnnnnnnnnnnnnnnnnnnnnnnnnnnnnnnnnnnnnnnnnnnnnnnnnnnnnnnnnnnnnnnnnnnnnnnnnnnnnnnnnnnnnnnnnnnnnnnnnnnnnnnnnnnnnnnnnnnnnnnnnnnnnnnnnnnnnnnnnnnnnnnnnnnnnnnnnnnnnnnnnnnnnnnnnnnnnnncacccgttttcagcctccccaaagngctttggggttaacaggtnttgagccaccaaggnccagccaaagngtttttnttgtaaaaaggttataaggagggc

SEQ ID NO: 428640 - DNA, 425 bp, Homo Sapiens
  misc_feature (309)..(317): n is a, c, g, or t
catttatcttattattagtaatgttaactttgatcacttggctaagttgacatctccactttgaagttactattctataattatcttgtgggaagatactttcatattatgcaaatatgttctttcccaacatatattcaccactaatcttagcatccctccaaggttctttcttgcaacaattattactatgatatttgcaaagtgatgattcttatattttatgtctcctacatttaatgaaatcttactgtaataaaatactacccattctcaatctttggtttattatttatgtcaatatgggannnnnnnnngagttgggagtcttgttttgtcatccaggctgggtgtgcaatgggtgcgatttccgctcactgcacttccgccttccggggattcaagccattatcctgcctcaggct

SEQ ID NO: 428641 - DNA, 374 bp, Homo Sapiens
  misc_feature (341)..(341): n is a, c, g, or t
cctggattttgcagaacccaggtagggtctcacagacttaccttcagacaccactgagttttccacaagtttatattgccatttatattagacaatactcacaaaacatttttatggagtacatttggggccatctgaacgactgccttctaactgcactgccatttggcgtcagtgcggccctctcagatgccccagagacacttcaaactctcgaccttgactcccctgcccccaggcttcctctagtgttccctctctccatccagtcatgtaggccagaaacctcagtgatactcttgaccctaccttccccgccatcttcacatacctaaatcttntcactagttctaggagattttaaaaaagagcag

SEQ ID NO: 428642 - DNA, 275 bp, Homo Sapiens
  misc_feature (174)..(174): n is a, c, g, or t
  misc_feature (220)..(220): n is a, c, g, or t
aaaaagctcaatcttgcagcttttctctggtaactagtgatattttcagcataaggtcatgctagctgaatttaaaattttgtgtactgtatgtccttaaattttgaaagtgaaatgtttctggttttgactaaatttatcaaaaccatttcacgaaaattcagcaaacgtttnctagttagctagtcccaaatcttttgctgttaaagttaaccctganaatttctgtaccagccaaatgaatgtgtgcatgtaaccttgtaaatgatttgaaa

SEQ ID NO: 428643 - DNA, 469 bp, Homo Sapiens
  misc_feature (88)..(88): n is a, c, g, or t
  misc_feature (105)..(105): n is a, c, g, or t
  misc_feature (227)..(227): n is a, c, g, or t
  misc_feature (274)..(274): n is a, c, g, or t
cctggctttgagtgtttatctaagctaagcccaattgactgttgtcattctttgtctctcccttgctcagacatcagtcaggtatttnttgaacactcctgtgtncacagcatccggctcctgggattagagacagctcttgactcctggttttcctctttgaaacctattggactgctttccttttaagatacaccccccacattataggaatctatccatttctntgttcatttctttaattgtgcattatatcagtccgtcagtcagtttncctcctgaaatatgctaagtattgagaattataatagattctattaagcaccgctaattaaagtactatccttatagtagtagtagtgtttgcggtgatggtcgtgttagtactagtagtaatcaagatggccatgaagagactgcttttgaatctaccagtaatcatggtaaaatagtaatagctcaatgtatt

SEQ ID NO: 428644 - DNA, 325 bp, Homo Sapiens
  misc_feature (80)..(80): n is a, c, g, or t
  misc_feature (104)..(104): n is a, c, g, or t
  misc_feature (113)..(113): n is a, c, g, or t
  misc_feature (127)..(127): n is a, c, g, or t
  misc_feature (144)..(144): n is a, c, g, or t
  misc_feature (158)..(158): n is a, c, g, or t
  misc_feature (167)..(167): n is a, c, g, or t
  misc_feature (188)..(188): n is a, c, g, or t
  misc_feature (204)..(204): n is a, c, g, or t
  misc_feature (221)..(221): n is a, c, g, or t
  misc_feature (249)..(249): n is a, c, g, or t
  misc_feature (260)..(260): n is a, c, g, or t
  misc_feature (274)..(274): n is a, c, g, or t
  misc_feature (280)..(280): n is a, c, g, or t
  misc_feature (288)..(288): n is a, c, g, or t
  misc_feature (293)..(293): n is a, c, g, or t
aaactggccattttttttgctcattttattatacatttagttcttacagacatcaactggcattattttgacctgttttnccacttgatttttgcatatttggntgttttagngcaagtatgttttnccctagatattcatggncaaacttacacctngggcatttnactttgtttcttcatgtattncctatactttattttnaaatctctttaggagangaagctcagttacaatctaaatttttgngggagtattgnccctttacatttcncctgtnactttttnaactnggctttgaaacttctccttcaccaacatactg

SEQ ID NO: 428645 - DNA, 521 bp, Homo Sapiens
  misc_feature (487)..(487): n is a, c, g, or t
  misc_feature (496)..(496): n is a, c, g, or t
  misc_feature (508)..(508): n is a, c, g, or t
ttgaattgggagcatcagtgtgtgaattcagctttgattttagaactgcagttcaattatgctttccttggaaaaagtatgtccaaaaacattaggaaagtagtgtgtattttcatatataacagtgtcaccagacccaggaaaagaaaccatctctattttattgaaagttggtggtagattttttacaaagtaaggagaaaagagaaaaactaaatagtgaattgaaaatgaataaagtaaacttagaatttttacccaagtgtagacttaaatgttgctttgagtatggctggatcttgggagaattccagggaaatattaggtattagaaaatgactttgattgcatttcagcaggtgtctttattctgagtagtatcttagggagacaaactgtctcaagccaaggaaacattgaattttttaaatattatggacagttcagggctttaaggccagtttaggagtattttgctacttgaccntgattttcngttattttaacntttgatttttttt

SEQ ID NO: 428646 - DNA, 356 bp, Homo Sapiens
  misc_feature (43)..(43): n is a, c, g, or t
  misc_feature (168)..(168): n is a, c, g, or t
  misc_feature (206)..(206): n is a, c, g, or t
  misc_feature (335)..(335): n is a, c, g, or t
tccatgcatttgtttgctttgatagtcattcttgttcccattnccgttcaatacagtgagggagccggcatcagaaaacaacactgggagctggggactgacagtacaggagaccagagggtagccaggtaaggaggttcatttggagacctaaccacaaaagagaanttcattcgctccaagtcgatagggagctcaaattactntaataaagcgtcaaagagggtcttcccacttccagagtctgggaagtggtcactcttaaggtgaagagccactgggggtgatatggggcaagatggggacatcttcctaataggcttgcacatgctggnctgggggttccctttggcctt

SEQ ID NO: 428647 - DNA, 474 bp, Homo Sapiens
  misc_feature (102)..(102): n is a, c, g, or t
  misc_feature (177)..(177): n is a, c, g, or t
  misc_feature (181)..(181): n is a, c, g, or t
  misc_feature (194)..(194): n is a, c, g, or t
  misc_feature (200)..(201): n is a, c, g, or t
  misc_feature (209)..(209): n is a, c, g, or t
  misc_feature (232)..(233): n is a, c, g, or t
  misc_feature (241)..(241): n is a, c, g, or t
  misc_feature (245)..(245): n is a, c, g, or t
  misc_feature (258)..(258): n is a, c, g, or t
  misc_feature (273)..(273): n is a, c, g, or t
  misc_feature (285)..(286): n is a, c, g, or t
  misc_feature (390)..(390): n is a, c, g, or t
  misc_feature (462)..(462): n is a, c, g, or t
agtccatctgctaacttaaaatgtttccgactctttgttttctgcctgtttaacttagatacacaatcctaagataattttggaacaataaatatggctttnattgggaacttcactattgcatgctttacaaaactaattggtgttcttgttaccgagaatctttacaggcctttnagantctctctactgtntatctnncctttatnctactagttgaaactcaattttnnaatatganacanatagacatctatncatgcagcccaagantccatgttattnntgtcttgccttttgtatgtcatgttaacattaaaatattgctgtaacatttcagtttttgtgttagggtgtgcttatcatggatagggtgccctgtccatattncccttttaatttagggggcttgccatggaatttttttaaaggatattcttttgggatttaaaaaaataattngggcccagtgtg

SEQ ID NO: 428648 - DNA, 372 bp, Homo Sapiens
  misc_feature (28)..(28): n is a, c, g, or t
  misc_feature (37)..(37): n is a, c, g, or t
  misc_feature (42)..(42): n is a, c, g, or t
  misc_feature (54)..(54): n is a, c, g, or t
  misc_feature (61)..(61): n is a, c, g, or t
  misc_feature (72)..(73): n is a, c, g, or t
  misc_feature (75)..(77): n is a, c, g, or t
  misc_feature (81)..(81): n is a, c, g, or t
  misc_feature (93)..(93): n is a, c, g, or t
  misc_feature (99)..(99): n is a, c, g, or t
  misc_feature (126)..(126): n is a, c, g, or t
  misc_feature (128)..(128): n is a, c, g, or t
  misc_feature (142)..(211): n is a, c, g, or t
  misc_feature (247)..(327): n is a, c, g, or t
  misc_feature (330)..(330): n is a, c, g, or t
  misc_feature (340)..(340): n is a, c, g, or t
  misc_feature (349)..(349): n is a, c, g, or t
  misc_feature (360)..(360): n is a, c, g, or t
atgtctgtcaatgatgattgtgtaaatnaagtgtganatatntctccaatgganttccatncagtgatgaanntnnntgangtactgatacancctggnagacccttgaccacattgttaagtgananacgtaagtcagacnnnnnnnnnnnnnnnnnnnnnnnnnnnnnnnnnnnnnnnnnnnnnnnnnnnnnnnnnnnnnnnnnnnnnncgcctttccaaaggttggtggatggttgggaagacnnnnnnnnnnnnnnnnnnnnnnnnnnnnnnnnnnnnnnnnnnnnnnnnnnnnnnnnnnnnnnnnnnnnnnnnnnnnnnnnnggncaactgtgantatactganaaccagggganttgtatgtcatt

SEQ ID NO: 428649 - DNA, 116 bp, Homo Sapiens
  misc_feature (24)..(24): n is a, c, g, or t
  misc_feature (31)..(31): n is a, c, g, or t
  misc_feature (33)..(33): n is a, c, g, or t
taaatggcaaattataaatacatnataggtntnaactcacgaaataatacctgcccccatttttctccttccagctccacagagaaccgaaataaacttttgtaaattacacaggc

SEQ ID NO: 428650 - DNA, 513 bp, Homo Sapiens
  misc_feature (457)..(457): n is a, c, g, or t
  misc_feature (469)..(469): n is a, c, g, or t
  misc_feature (499)..(499): n is a, c, g, or t
ttcatacatcctctgaaatctaggcagaggtccccaaacctcaattcttgacatctgtgcactcgcaggcccaacatcacatgggaactaccaaggcctgggacttgcaccctctcaagcaatggcctgagctgtatgttggcctcttttagccaagtcttaaggctgcacacagcaggagggaaaaaatcatttttcccgtctaggcctctgggtctgtgacaggaggggctgcagtaaaggtctctgacatgtcctggagatattttccccattgtcttgattattaatcttcagctcattgttacctatgcagatttattcagactgcttgaatttctccccggaaaatggggttttcttttctatcacattgtcaggctgcaaatttttctaacttttatgctttgcttcctcttgaatgctttgctgcttagaaatttcttctgccagatancctagatcaggnctctcaagttcaaagttccacaaatctctnggggcaaagggaaa

SEQ ID NO: 428651 - DNA, 219 bp, Homo Sapiens
cagacaagtagtttccagggtggatgcatttattttttggatgcaaatatatcactcttcaacacacacaaaacagttacaatctctgaaaatgaagtctgccagagagaactgcaatctccttgattcatataccttaatccttcagtggggagcctcggcatttcacactttaaatgtgtcaggaaagggtttggaaagaagaatctacatcagctc

SEQ ID NO: 428652 - DNA, 434 bp, Homo Sapiens
atacatgtgggggattttatttcaggcacttgctcttcagtttttcttacacgatgttccacaaatataaaaatgagaaactctttcagattatctgtatatccatatacctggattattctggctaaagcgacaggaaatcccagcagtctggcttccccgagtaaccctgtactgcctggtttaatcccgccgtctgagggtggggtgggcgtcaggcatggctggacacaggagtgccagtggtggggtcagaatccagcttctccctctcccggccccagtgggtctattccccgaagtccttgctcctgtctgcagggctgtgccacttgccggtggggcaggggagtggagaaggggggctgactcacttgctcttctcctgggagttgctattttaacggcagcaaatccacaggaaaaaggtaaac

SEQ ID NO: 428653 - DNA, 543 bp, Homo Sapiens
  misc_feature (107)..(107): n is a, c, g, or t
  misc_feature (410)..(410): n is a, c, g, or t
  misc_feature (423)..(423): n is a, c, g, or t
  misc_feature (466)..(466): n is a, c, g, or t
  misc_feature (475)..(475): n is a, c, g, or t
  misc_feature (495)..(495): n is a, c, g, or t
  misc_feature (529)..(529): n is a, c, g, or t
aatccttggagcaactctaggagggaggtgttatcctctaattgcagatgaggttgatgaagcttaaagagtaatgatgccttgagtccatcctctggctccaaagnccttgtatttaactgttctcccttttgcatccctgtgctaaagtgactttgctataatatccacaaggaagaatttctgtgtaaaaattagacttccttgcaggcagtctatcagtgatatccaataaagactcaataatggctaacaatacaaaccacacacacaagataaacttctccttttgtgccaggtacttagattaggtgtagtggttttcttaaactgattatcaaggtaaacaccacctcatacatttcagcagagagcagtggtttctctctccagcagttgggagccattgngtcaggacaatgncacacagttgggctttcatgttaggtcggtcactcttgtgggntttgggggntgggctttttaaggagaggngtcttggagacaggggggctattatcctgccagnttttttggatgtcc

SEQ ID NO: 428654 - DNA, 433 bp, Homo Sapiens
  misc_feature (121)..(154): n is a, c, g, or t
  misc_feature (249)..(249): n is a, c, g, or t
  misc_feature (298)..(298): n is a, c, g, or t
  misc_feature (355)..(355): n is a, c, g, or t
  misc_feature (364)..(364): n is a, c, g, or t
  misc_feature (370)..(370): n is a, c, g, or t
  misc_feature (398)..(398): n is a, c, g, or t
atttttacatcagcttgtcagaaattatattaaaaacactttggggaaagctaagagcagtgcactgtttagcacagattttgtgagattctatactcttttaatgagcatttcatagggnnnnnnnnnnnnnnnnnnnnnnnnnnnnnnnnnngctttgctttactttgccaatcagttacttttataccaaattaacgaagtttctttaaaaacttcctggttaaattgtctgttatcatatagaanagaatcaaactgaatcactttacatttctctaaagatagttcagttttnaatccatccagagtttgtgaatcagcctgatagatcataagccatttataattgtgnaacgttccnttggantgagtatatcataccaaatgtttaattncctctcggcttcattcaggtttttacattactttt

SEQ ID NO: 428655 - DNA, 310 bp, Homo Sapiens
gagcaacctggggtcacgagaccagggtttccctaaagatcatctgttctagtgactcattcatttgtagtctacatttgttagaggagattttggacaggcacatgtttgaaagggtctgcctgacttctaaaatcgctaagaaaaacaaaacttcacataagtggcttgctttccagaaaaggtgggcaagataaacagcaagtcctaatgacaagttctcaggagcttgtttattttgctggttgaaggctaggaagaaacactttattatgaatccgatcatgtgtatagtgtgttatatttatat

SEQ ID NO: 428656 - DNA, 341 bp, Homo Sapiens
  misc_feature (322)..(322): n is a, c, g, or t
gaaataatacccaggtcatcaaagtctgtgaaaccaactgcaacaggacctctgattcttcccactcagagacccacaagtgccactctgtttttggacaacggtcaacaagcttcaccgccaagtgcctgatttgtcaaatgagagctttgtcgtttcttcagatgctgaccagtatctgaattcagtatctctgaattacaggagaggagaaaatagatgaaatactgctgtcagtaccacggttgctggctcttgtttagcttctgagtcagctggggaagggttcgggggttctttcccccgggaaggggccccaggnaacgggggtggaaaggatt

SEQ ID NO: 428657 - DNA, 262 bp, Homo Sapiens
taagtaactacaaaattattgaaaagagtcctaacaaggatagctccctgatgtgccaccataccagggcctcactgggctcatcacgcgacccgatcacaagggaagcaccaggcgtgcttaggacactgagtagaatttggcagcagcatagaaaatggaggaggatcggctcgtctcattgacaaatgatatctgtccacatgaatgtccagaagtcggttttaaagagtctgaacacttaatccatttttatacagac

SEQ ID NO: 428658 - DNA, 202 bp, Homo Sapiens
  misc_feature (28)..(28): n is a, c, g, or t
  misc_feature (58)..(58): n is a, c, g, or t
  misc_feature (62)..(62): n is a, c, g, or t
  misc_feature (72)..(72): n is a, c, g, or t
  misc_feature (79)..(79): n is a, c, g, or t
  misc_feature (91)..(91): n is a, c, g, or t
  misc_feature (108)..(108): n is a, c, g, or t
  misc_feature (110)..(110): n is a, c, g, or t
  misc_feature (126)..(126): n is a, c, g, or t
  misc_feature (129)..(129): n is a, c, g, or t
  misc_feature (131)..(131): n is a, c, g, or t
  misc_feature (135)..(135): n is a, c, g, or t
  misc_feature (142)..(142): n is a, c, g, or t
  misc_feature (147)..(147): n is a, c, g, or t
  misc_feature (159)..(159): n is a, c, g, or t
  misc_feature (164)..(164): n is a, c, g, or t
  misc_feature (171)..(171): n is a, c, g, or t
tttaaaatgcccatgcgcgtttttttantaaaacctaacagggccaagttaaccaagncaancaattaaggnctctttntttcccataaanttttacagaaaggtttntnggggttccaataaaangantntcgntttggancaggnagttattagaanctgtnaagttantgggttgggggattaatttttaaaagagact

SEQ ID NO: 428659 - DNA, 470 bp, Homo Sapiens
  misc_feature (40)..(40): n is a, c, g, or t
  misc_feature (387)..(387): n is a, c, g, or t
  misc_feature (447)..(447): n is a, c, g, or t
catctacttttggccttttggaaatggaatcttctgtttnatgcaataagctaatttggggataattatatgtgagttatgtcaatatttaaaaaaatcttttgaagttttggttgaatttcttatttggcattggagggtggctcttatttgaagtttagtgtcaggctgcttatcccaaagtaattcttgcaattcttggacccttagtgagatgttcccatcagtaatactttgcattttttggctgatagattaaacttctttctcagctcctgggagatcctttttctgcttttccttatttttaaataataatttaatgttgttgttttttggatttatctattttaaatattctttactgatttccatataaccagggangaaagttggaggccatttttagacccaggctcccgcccaccccctcccggactgaccccncctccccaatgtaggtccatgac

SEQ ID NO: 428660 - DNA, 234 bp, Homo Sapiens
  misc_feature (31)..(31): n is a, c, g, or t
  misc_feature (143)..(143): n is a, c, g, or t
  misc_feature (159)..(159): n is a, c, g, or t
  misc_feature (187)..(187): n is a, c, g, or t
ttataaaagtttcatagatggttgggagatntgattagtgtttcaaaatgcttatcattctaagaatccaatagctggcaagcaagcagtggaacttatagtaacaacaatcaatcacttgtctcatcccacatttttgccanattcaaaaacaccaantttcccatcaaatgttctgtcagagtanacctttacctaagtgcttgttttgcttttaatatgtgaatttctggg

SEQ ID NO: 428661 - DNA, 334 bp, Homo Sapiens
  misc_feature (23)..(23): n is a, c, g, or t
  misc_feature (43)..(43): n is a, c, g, or t
  misc_feature (64)..(186): n is a, c, g, or t
gtgtggtggacatactgtagctnccaatagctgggctacaggngcgtgcatcacgccagctaannnnnnnnnnnnnnnnnnnnnnnnnnnnnnnnnnnnnnnnnnnnnnnnnnnnnnnnnnnnnnnnnnnnnnnnnnnnnnnnnnnnnnnnnnnnnnnnnnnnnnnnnnnnnnnnnnnnnnnnnnnaccgtgcccggctacctctgtaaattttttatgcaaaattgtaggtgtttgggaaaagattcgattttcagagaaccttatctccaaaatgggtctaatctacttctctaggagcacaaaatggggcttacgtagctgcaaggcaggc

SEQ ID NO: 428662 - DNA, 446 bp, Homo Sapiens
  misc_feature (229)..(229): n is a, c, g, or t
ctagatcactgcaataaaacaagtatcgcaataaaacgagtcacataaatctttggtttcacagtgcatataaaaattatattcacggcatactgtagtctattaagtgtgcaatagattatgtctaatagatactttaattaaaaaatattttattgctgtaaaatgccaacaatcgtttgagccttcagtgatttgtaatcttttttctttgatgagacggagccgncttctgtcatccggtctataatgcaatggtgtgatcatggctcgctgcatttttgaattcctggggcttagggtgatcctcctgcctcagccttcctattgtcactgggtagaggggtcgtgactgcaagttgtccaggattcttgggcgttttgaaattaaagaattgggaccaaaacgcccagccaaagcaaaggaaaggatggaagccaaccaa

SEQ ID NO: 428663 - DNA, 176 bp, Homo Sapiens
  misc_feature (15)..(15): n is a, c, g, or t
  misc_feature (41)..(41): n is a, c, g, or t
  misc_feature (55)..(55): n is a, c, g, or t
  misc_feature (73)..(73): n is a, c, g, or t
  misc_feature (95)..(95): n is a, c, g, or t
  misc_feature (144)..(144): n is a, c, g, or t
gtgccagctccgcgnaggatggtgaaggctcggatgggccnggagaaggtgaccnatggctgcgggccccctncaccggctgcgctcgccatttncactcaggcccgggttcccgccggggctctttctgcctggttcctccgnggttgcggcgactggacgaggacgagccgccg

SEQ ID NO: 428664 - DNA, 558 bp, Homo Sapiens
  misc_feature (36)..(36): n is a, c, g, or t
  misc_feature (56)..(56): n is a, c, g, or t
  misc_feature (443)..(443): n is a, c, g, or t
  misc_feature (540)..(540): n is a, c, g, or t
tctgtctgaggaagtttggactatgtggtgtgagancgtagacattggactaatgncattaacatattttaatatttaaatttcttattaaaaaatagataatgcagtagttactttttgaaggacgaccgaagcaggatatttccctgaccccttcatgggacccacgtcagaggtgtttactcagcctgctgcccacaactcctcacaggagggagcgcacaagtgaacgagggtgaggactggagagcaccagcactggaacaacccggccacttcggcgctactgggatcaaactccatcacttggacacactgtgttccacccctcgtggggagggagcatgcaggtgagaggatgcaggagtcagggtgagcacttttgggctccagcaggacaaaactcttgttgcagggccctgcagccagttgacttgaggggncggcctgttgactcccaaagccccagaggacatgcttacagtgcttcttttagctctaccatccgtaggttggcttaagtgtaaaccagcttcagtngggccctttgcctttttt

SEQ ID NO: 428665 - DNA, 497 bp, Homo Sapiens
  misc_feature (65)..(428): n is a, c, g, or t
  misc_feature (439)..(439): n is a, c, g, or t
  misc_feature (465)..(465): n is a, c, g, or t
gaatggaccttcttttcctaccctcccatgtcctgtcagaggtacagagcctttccaagactgcnnnnnnnnnnnnnnnnnnnnnnnnnnnnnnnnnnnnnnnnnnnnnnnnnnnnnnnnnnnnnnnnnnnnnnnnnnnnnnnnnnnnnnnnnnnnnnnnnnnnnnnnnnnnnnnnnnnnnnnnnnnnnnnnnnnnnnnnnnnnnnnnnnnnnnnnnnnnnnnnnnnnnnnnnnnnnnnnnnnnnnnnnnnnnnnnnnnnnnnnnnnnnnnnnnnnnnnnnnnnnnnnnnnnnnnnnnnnnnnnnnnnnnnnnnnnnnnnnnnnnnnnnnnnnnnnnnnnnnnnnnnnnnnnnnnnnnnnnnnnnnnnnnnnnnnnnnnnnnnnnnnnnnnnnnnnnnnnnnnnnnnnnnnnnnnnnnnnnnnnnnnngccttgggggnatttccttttaacaggcaatggggtnaaaccaaacttaacacaattaaccgtggcctt

SEQ ID NO: 428666 - DNA, 429 bp, Homo Sapiens
  misc_feature (41)..(92): n is a, c, g, or t
  misc_feature (112)..(300): n is a, c, g, or t
  misc_feature (363)..(363): n is a, c, g, or t
  misc_feature (411)..(411): n is a, c, g, or t
gtgaatatataggctttatctgggttatttatttatttaannnnnnnnnnnnnnnnnnnnnnnnnnnnnnnnnnnnnnnnnnnnnnnnnnnncgcctcctaagctcaagccnnnnnnnnnnnnnnnnnnnnnnnnnnnnnnnnnnnnnnnnnnnnnnnnnnnnnnnnnnnnnnnnnnnnnnnnnnnnnnnnnnnnnnnnnnnnnnnnnnnnnnnnnnnnnnnnnnnnnnnnnnnnnnnnnnnnnnnnnnnnnnnnnnnnnnnnnnnnnnnnnnnnnnnnnnnnnnnnnnnnnnnnnnnnngcttggcctatctggattttttaagacagggaataaatgttttccagtatagccagccatttnaaagaccttctggaagaatgtgtttccaggggcctaccctcaggaatntgggcagcttgggttatt

SEQ ID NO: 428667 - DNA, 264 bp, Homo Sapiens
  misc_feature (36)..(36): n is a, c, g, or t
tcccatgaagtcttatcagggcctgggagagccttngtgttttaccaccactgtgtgttgcccagaggcgcatttgtgagtagccagggcaggacttagaaaagtcggtgtgtctggtgaaaggtagctgatctgaagggtagcaagtaatgcaaaagcactaatttgctaagccctgtctgtgatccagtaagactagctatctggcttttggaaaattaatttcctcaacgctggttcacaaaatcaccaattgtaccacat

SEQ ID NO: 428668 - DNA, 444 bp, Homo Sapiens
  misc_feature (11)..(11): n is a, c, g, or t
  misc_feature (61)..(61): n is a, c, g, or t
  misc_feature (78)..(79): n is a, c, g, or t
  misc_feature (95)..(95): n is a, c, g, or t
  misc_feature (211)..(225): n is a, c, g, or t
  misc_feature (230)..(355): n is a, c, g, or t
  misc_feature (432)..(432): n is a, c, g, or t
cttcattgatnattgaattctgaagcgatacgaccagcacatgggtggcgtttgaaagggncatccagagccatgggnncgagaggaattcactncccaaacctttgttgagcagctactgtatgccacgctttgtgctagaggacaggactgatgccacccctgcccccaggacttgacagggtagcagagggaagacacatgagctgcnnnnnnnnnnnnnnnagaannnnnnnnnnnnnnnnnnnnnnnnnnnnnnnnnnnnnnnnnnnnnnnnnnnnnnnnnnnnnnnnnnnnnnnnnnnnnnnnnnnnnnnnnnnnnnnnnnnnnnnnnnnnnnnnnnnnnnnnnnnnnnagccatgaattgattttaaaaccttaaatgaggggccaggtgttgtctttccgtttgcctgagtgacgcgggtcttntccagggcatcc

SEQ ID NO: 428669 - DNA, 305 bp, Homo Sapiens
tggacatagtttagtctataactttcaacccttaacaataattaaattcatctttgtttaatttcataaatttaaaagtagggtccttttcagttagtgattctcagccctcattcacattaaatttttaaacacgggggattctctgcccggctggaagaaaatgactgggatggggacaggggtcactatttgaaacattcctctgtgcggccaaggtcgcaaaatgctgtcctcgcagggggaacaaaaagagtttgatttcccataatttggatgctgtggatttggtttcctcagggtgt

SEQ ID NO: 428670 - DNA, 467 bp, Homo Sapiens
  misc_feature (88)..(88): n is a, c, g, or t
agtaacagtaagagctggctagtaatggcttaaaaagaaaaagggaactctctgaaacaaagatcactttagtgtggcattgtggatnctgttaattctgcatagggaaactttggaacagcatgctaattacatggctgtaagaaagccctgtcctctgtctctgcaccataccttcattggacttcaccaacccatccatactccatgtaaacctcagttctctcatgcctgccctaagtcagttgacatcagtgcagtggcattgaggagaaatgagaggtgtctctgattttactgaaagttattatcattttcacaggtgcctgagatttggtatctactttgtgttcttgattcttaggtgaaaaatctgaaatagttccctgtgcattaaaataaattattttgagaggactcctgctccgtcgattcagcagacctatgctgcagaaggtaactgcggg

SEQ ID NO: 428671 - DNA, 171 bp, Homo Sapiens
ttcaaatccgtggacctacttgatttaaaactgaaattgggaaaggtgtcccttttcctttccaaaaccacatccctttataaagtcgttctctatcttgagcatttacctgcctttcttctggcttcatcctattaacatttaaatatgcttatcctttcttcttaggag

SEQ ID NO: 428672 - DNA, 469 bp, Homo Sapiens
  misc_feature (105)..(243): n is a, c, g, or t
  misc_feature (245)..(259): n is a, c, g, or t
  misc_feature (261)..(318): n is a, c, g, or t
  misc_feature (446)..(446): n is a, c, g, or t
caattcacctaaggtacttagaataatgccggacacagagcaaatgcacataaacattagttgtttttattacatgtaattctcatgagatgaaatcctatacgnnnnnnnnnnnnnnnnnnnnnnnnnnnnnnnnnnnnnnnnnnnnnnnnnnnnnnnnnnnnnnnnnnnnnnnnnnnnnnnnnnnnnnnnnnnnnnnnnnnnnnnnnnnnnnnnnnnnnnnnnnnnnnnnnnnnnnnnnnntnnnnnnnnnnnnnnntnnnnnnnnnnnnnnnnnnnnnnnnnnnnnnnnnnnnnnnnnnnnnnnnnnnnnnnnnngtcatttaagtcagtatgggtgggttgtccccttttacagataagggaaactgaggttccaaagagggtgaaggggatttggcttcaaaattcacatggaccccaaaggaattgggcagttcttgggnttcttttcccccaggggcattcc

SEQ ID NO: 428673 - DNA, 514 bp, Homo Sapiens
  misc_feature (49)..(49): n is a, c, g, or t
  misc_feature (63)..(63): n is a, c, g, or t
  misc_feature (91)..(107): n is a, c, g, or t
  misc_feature (140)..(140): n is a, c, g, or t
  misc_feature (196)..(196): n is a, c, g, or t
  misc_feature (216)..(216): n is a, c, g, or t
  misc_feature (226)..(226): n is a, c, g, or t
  misc_feature (269)..(269): n is a, c, g, or t
  misc_feature (356)..(356): n is a, c, g, or t
  misc_feature (374)..(374): n is a, c, g, or t
  misc_feature (397)..(397): n is a, c, g, or t
  misc_feature (408)..(408): n is a, c, g, or t
  misc_feature (413)..(413): n is a, c, g, or t
  misc_feature (420)..(420): n is a, c, g, or t
  misc_feature (425)..(425): n is a, c, g, or t
  misc_feature (453)..(453): n is a, c, g, or t
  misc_feature (461)..(461): n is a, c, g, or t
  misc_feature (466)..(466): n is a, c, g, or t
  misc_feature (495)..(495): n is a, c, g, or t
tttttttcttactgcgccaactttattacagctagaaacacaaataccnccaagaaggctgcntgatagcttaaccattaaataattcttnnnnnnnnnnnnnnnnngttaacgaagcagcttttattcattaacacagngcctaacacattgttatattgcaaggcagattaaagctacaaagaaaagtaacaancaagaaagaagagaaaactntggctctagntaaagatttcaagtcagaccctgaaacaggcactcagctgaantggcctaaacctaaacaagggttaccactcccccacccccacccagttttcccccaaagtaggtaaaaagggaaacgggtaacaagntcaccattagtttcattntcacccattgttaacaaaggggnaacaatttggnccaanttattantgggngggagggtgcctcagggtttggcattcngtaggggnggggntctctgtttctcggcctttcggtttgttnggtttcactgggccggccg

SEQ ID NO: 428674 - DNA, 135 bp, Homo Sapiens
  misc_feature (56)..(56): n is a, c, g, or t
  misc_feature (71)..(71): n is a, c, g, or t
  misc_feature (74)..(74): n is a, c, g, or t
  misc_feature (81)..(81): n is a, c, g, or t
  misc_feature (95)..(95): n is a, c, g, or t
gctgagatggcgtttatccggcaaaaaaaggttgggtcgccgaggggaaaggggtngggaaagggggtttngtnggggctngggttggggccatngaagctaatacatggtgcactaggtcacacaacggacact

SEQ ID NO: 428675 - DNA, 130 bp, Homo Sapiens
taactcttcttcacaaattcaaaaaaacacaaactgtccattgattcacagcatggccctaatttcttagctgcaggtgtaatttcttattttctggggattctcaacctaaaggagggcaggatcacac

SEQ ID NO: 428676 - DNA, 157 bp, Homo Sapiens
  misc_feature (61)..(61): n is a, c, g, or t
  misc_feature (76)..(76): n is a, c, g, or t
  misc_feature (84)..(84): n is a, c, g, or t
  misc_feature (124)..(124): n is a, c, g, or t
  misc_feature (134)..(134): n is a, c, g, or t
tgggaaaggaggcaggactttgcttggaggtctttcccaggcccacccttctttttctccntgttgctggggtggntttccctnaaggtttcaaaacattcaggattcttaagttctttcaggntgtttgggantcttttggggctttacccccagt

SEQ ID NO: 428677 - DNA, 214 bp, Homo Sapiens
ggcatagaggctcagcgtgcaaaggtatgtgtcaagtgagtgaggccaggggataaggtagagaatgtgagaaaggactcctgctttcagctggctttgtcttgcttgcttaatcctgggcccatgaggttgaagcatcttagccaggaggagttgaggattgacaggatgttactttttgcattcttccttaacatggagttccctcacaaga

SEQ ID NO: 428678 - DNA, 142 bp, Homo Sapiens
  misc_feature (93)..(93): n is a, c, g, or t
tatgggcagtctttaggtactttcatgctgcttaataggcagtgctcactttggtgagagctctggagtgcctgccgagacgctccctgtttntgaacaaagattatgaaggggtctttgtgagaattcagcagcaacactg

SEQ ID NO: 428679 - DNA, 362 bp, Homo Sapiens
  misc_feature (88)..(88): n is a, c, g, or t
  misc_feature (91)..(91): n is a, c, g, or t
gtgcccgaaagaccagcttgaacaatgaagaggacctcggcggttaggtgggaccgcaaccaacaaggactacagttcccagcggcangangccaactccaagtgaaggtccggttgctgggcatgctaggagttgtagtgtcggccgcctttacaatctaggctgtttggaagatttagagcttctatttcttgaagatttattcgaccgttttaaaaaatctcgcaactgaagcagggttcagagtttactatctgcgtccttgagtagcctgggggatcaactgctgcatattaggcaaatttcggaaggcgtcaaggccttcagtgagccctttctgtcatttggggtgggtccaggg

SEQ ID NO: 428680 - DNA, 369 bp, Homo Sapiens
  misc_feature (107)..(107): n is a, c, g, or t
  misc_feature (174)..(174): n is a, c, g, or t
  misc_feature (179)..(179): n is a, c, g, or t
  misc_feature (188)..(188): n is a, c, g, or t
  misc_feature (322)..(322): n is a, c, g, or t
  misc_feature (343)..(343): n is a, c, g, or t
cttgtgcgccaacccacacctctgtactacaacctaagatttggcatcttaggttgcaggactcctccctggagtctccctacccagacctgggggcattggcaggnaagggcagggctccatccagaagtgatggccctgctccttcccactggccaatagacagctgctgtngcctnactccaagncatctcccctacccctggcctgagggtccttacaggcaaaatgaagggtttggaggagatggcccggtgctgacaagctgtgactcaatttaggccttgaaagccagcactgtattctccatgcccctaccctnctgcggggtcggggaagtgtngaccgagatggaagtgccgctggact

SEQ ID NO: 428681 - DNA, 504 bp, Homo Sapiens
  misc_feature (458)..(458): n is a, c, g, or t
  misc_feature (478)..(478): n is a, c, g, or t
ttagactgactcttcttatttctgttaaccaaccagtgatctctggctgctgctcagaagaactaagaaggatgggtaatataaaatccagatcaatattcttattctgggcacatattggaatcagctaacaaccccatatcagtttggttccaacaattgcccagttcatggaaagcctctaattttgtttatttgggatgattttgcttattttgctttactattgtggaatatattgctgttgtactctttgtgtaggaatgtaggatatgcttgctgaatgttttcttaaattgaacccttattcctcttccagggtaccatcttttgttgggaactcagttacaaataaccctcaccataccagtactttctggaatgagctcctcttctaccctggagggcaaaagacccaatagttagggctgggaatattatcacccctatttcagccnggagggaggttacaggaaangggatcttcatctgtctacaaccctt

SEQ ID NO: 428682 - DNA, 462 bp, Homo Sapiens
  misc_feature (346)..(346): n is a, c, g, or t
  misc_feature (391)..(391): n is a, c, g, or t
  misc_feature (406)..(406): n is a, c, g, or t
  misc_feature (411)..(411): n is a, c, g, or t
  misc_feature (423)..(423): n is a, c, g, or t
  misc_feature (430)..(430): n is a, c, g, or t
  misc_feature (445)..(445): n is a, c, g, or t
tttttctccttactgggaattagcacattattggctttccttaagactaattatttctctcttgatttatataatagctcattaagttgttattaatcaaaaacacaaagaggtgattgcttagacaatttttaaagtgactatagtataaacttttaaaagaataatatgaaaatgactgtggaatgcagtgtaaagcagaagcaaacggccctgaataacttacttggaagtaatttatatcaacttaagctgttagctcattgtataacttttcttatgtgaccctcaccaatatccctaagtaatgcctttgggaagcttcagagtaggaaggatgcttccnactgtgttgggctctgagggagataggtagggattaggatagggntcccggattaggggnatggntcccagtttagntttttcncgaaaggggttaacncccgggggctcccgggg

SEQ ID NO: 428683 - DNA, 429 bp, Homo Sapiens
  misc_feature (417)..(417): n is a, c, g, or t
cttagagaatttaaagggtggtgctgataaacaagggaacttcataagtccaggctattagactagtaagatatgttttttttacatttataataccctaaacattagagaattaacatttgataagcccaaggatgttaataatttaaggagtactttgaatatactgaactttccctggatattaatgctttttctgtgttagtgcagaaaaactggagaaggccagggaaaggattttttcagcataattaaggaagaaaaacatgccctctgcagaatggcaaagcagtttggttatttaaactgggaggaagagcaaaggctgggcatactcacttgctttccagcgtctgcaggggttgtttttgccagtccctccagtggctccgttcacacttgtggatgggaggaccntggccagaaaga

SEQ ID NO: 428684 - DNA, 412 bp, Homo Sapiens
  misc_feature (99)..(99): n is a, c, g, or t
  misc_feature (106)..(106): n is a, c, g, or t
tggggagaccggtgaggcccccgcgacatggccctcccatccccaagcctctcgtgcagatctccgctctgtgggacttgattgcgggctgcgggcctnggctccntgcaggcagagagaggacgggagaggagacggctacgaggcttggcgcaaggtagctacggtgctcccccaacaaggaaccggaaaccctcttcgtttgttgatctaaatatacaaaaataaaactagttgctgggttctcagacggatttctgcggcattaggaggcccacccttattttctcttttcttcacgcaggaatcaggtccctgggcctggggggcggcaaaaggagatggcggtgggtcaagtggggcgcgcaggcttcagacctgggggcttcttgagccaacgcccaggcatctt

SEQ ID NO: 428685 - DNA, 441 bp, Homo Sapiens
  misc_feature (286)..(286): n is a, c, g, or t
  misc_feature (413)..(413): n is a, c, g, or t
tacatgcataagtatgagaatatataccccttcctcagcaattagcacagagaattgaattaagcagtacaaaggttttcagttttaggtttacctgattaccccttactatactcaaatgcatcccaatacttctgtactcttaaatcaactgacaacctttaagcatatgctcttttgctaggtcttgaagaggaggcacaactgccttcatatgagtccagtgtgtgttgtcaaaatgtaacttttgaattgttctaaagccacagtaagagaagtaagtggntcaagtttcgtgcctttacatttccaccattgtgctttcctctccctttaccccacatacaaaactgagccgggggaatgcctaggtttttgtgtgctggaacacagctgttactttacatccaccntcctctgggacgtgtttggcttaatggg

SEQ ID NO: 428686 - DNA, 206 bp, Homo Sapiens
  misc_feature (69)..(69): n is a, c, g, or t
  misc_feature (88)..(88): n is a, c, g, or t
  misc_feature (103)..(103): n is a, c, g, or t
  misc_feature (158)..(158): n is a, c, g, or t
  misc_feature (165)..(165): n is a, c, g, or t
  misc_feature (168)..(168): n is a, c, g, or t
  misc_feature (179)..(179): n is a, c, g, or t
tggaaatacaaaggtctgctatactcacgacttgtaccctgattcgtgtgcccaagcttatacaacgtngtgtgggctagaccctggnatgagagtctaaaangtctagctctagaatcagctctcttaaaacctacagtatagtgcttcactaatantactttnggntaatagggggngtgtgaaatccagaccctacttctata

SEQ ID NO: 428687 - DNA, 410 bp, Homo Sapiens
  misc_feature (215)..(215): n is a, c, g, or t
attgaacaagggtaggttccttgaatagtgccttgaaaatcatttacttaaatgctatcattttatggatactgaaagtgtgacatcagtgcccaagattacatggcttaaacttagagggtagggtgggacccagaatcctgacttgtgaatctcccttgctagagttttctgcctcatgccagagcctcctcctgcacagggatttctcacgncctccccaccctgcagcttcaatagggattttccctgggacatactggctgctcttctccatagtagggcatttttccatgaagcaagtgtcattatgcccatgcacaggatggaagaaacttgaaggccatggcatatgggagggaaggcaaacccaatacacatcccaaaggcaattgcacatcccaatggac

SEQ ID NO: 428688 - DNA, 455 bp, Homo Sapiens
  misc_feature (342)..(351): n is a, c, g, or t
ttagaattaaggatgacttcattaaagcacctctagtggtggaagatgtccatcctatcccccacccatagctgggagctatgtttggctcattcttcctgactcactggattacactgtgactcagttcaatttcacacatgctgctgctaaattagggtcttggtgagcctttgggaggacagctctgaggaatgaattgtagcactgcagccctgcctgaggaacatgatagaaacaggtggtaggcccagctcttgccttccacctactaagcagtttttctgtggttagctgtgtgacataaactatcggtgtattaatttgctttcactaggattnnnnnnnnnncaacaacttaggtccaagaacatacctggaattctttggcatttcctttgcctttagtttgctttttgtagggggtgggacagcagggacttgcattgaggaat

SEQ ID NO: 428689 - DNA, 373 bp, Homo Sapiens
  misc_feature (335)..(335): n is a, c, g, or t
  misc_feature (342)..(342): n is a, c, g, or t
gccagaaaaagcatagaaaaattagatccacacacagcacccaaaaaaggccatagtcttttgtttacctagatgtattttaacctctttaccactaagcattttactataatagaacttggggacatacattgtccttttgagtccgttgaatctgcaccatctaccttttggctgattcaccatacaggtggcaaaggcctttaaaaatggggagctaatacgtagggcacattctggtagggccaaaatattcagtgtctgggggggtgctatgcaaatatcaatgactttttactaaaaacagtgggtttcctcatttctttaaggtcccnagtaggnaaattgtaaataaccttaccattctgggtat

SEQ ID NO: 428690 - DNA, 457 bp, Homo Sapiens
  misc_feature (51)..(51): n is a, c, g, or t
  misc_feature (54)..(54): n is a, c, g, or t
  misc_feature (71)..(71): n is a, c, g, or t
  misc_feature (159)..(159): n is a, c, g, or t
  misc_feature (203)..(203): n is a, c, g, or t
  misc_feature (280)..(280): n is a, c, g, or t
  misc_feature (349)..(349): n is a, c, g, or t
  misc_feature (423)..(423): n is a, c, g, or t
  misc_feature (430)..(430): n is a, c, g, or t
  misc_feature (438)..(438): n is a, c, g, or t
ccagccagaagaatagatttgaaagtagtgcagagactggctttcagacgnctnttatcagccttattggntttcatgtttgccaaatacagcctaagcagtgagagatgtattgagttcctcacaacagaacatgttgaaacataagctacacatttnattggaagaaggcaatatagacaggattcagcctttactgcttngcttttaagctcaaataatagtggtatttggaaaacatcacaaagctctgcagttattttccatagatgttgacttntttttttcctagaagtgattataatattgccagttgatcctgaggattacggcatgtgttgagggaaanacttaatcaggaaggtatgtccagtccttcttggctttcacaaaggctttctgtatccacttaagggttttatnactgggnctttatcngctggacttactcctccat

SEQ ID NO: 428691 - DNA, 459 bp, Homo Sapiens
  misc_feature (38)..(38): n is a, c, g, or t
  misc_feature (44)..(44): n is a, c, g, or t
  misc_feature (47)..(47): n is a, c, g, or t
  misc_feature (73)..(73): n is a, c, g, or t
  misc_feature (196)..(196): n is a, c, g, or t
  misc_feature (260)..(260): n is a, c, g, or t
  misc_feature (279)..(279): n is a, c, g, or t
  misc_feature (357)..(357): n is a, c, g, or t
  misc_feature (373)..(373): n is a, c, g, or t
  misc_feature (380)..(380): n is a, c, g, or t
  misc_feature (413)..(413): n is a, c, g, or t
  misc_feature (434)..(434): n is a, c, g, or t
tcagccacgtatggtctggagtgctgcatgtagaacanccagangtntacaccatgtctctgcaccttgaagntcatggaatgtgttggaggagactcaagctccatgtgggaacagtgtggcccaagagccagcatggaggagggctgtgtgagcagactgctatagaatgctaaagttataatcctagctggtntctcgttctgtttaaaaaaatcaaatttctgtatgtaattgacgtattggtccttatagtcagnaccatcaggtcttagattnttaagtcattttgctgccaccagaccagtgagagtcactcacttatttgtaatgattcttggggaagtttagtcaagngaatatccttggaatnaaaggangtacatgttttaaagtattttccatcgtagtcnagatggggctgtcaaaacccnttttccacacgagttttaaaattct

SEQ ID NO: 428692 - DNA, 129 bp, Homo Sapiens
  misc_feature (38)..(38): n is a, c, g, or t
  misc_feature (48)..(48): n is a, c, g, or t
  misc_feature (77)..(77): n is a, c, g, or t
ctgagttttcttcacccatggtcagggaagcgccatcncctggctttnaggctggggctcaggggaggttccggtangggctttgaagaggccgctgtttttgcaaggccgagacgcgggccctgcgca

SEQ ID NO: 428693 - DNA, 384 bp, Homo Sapiens
  misc_feature (205)..(205): n is a, c, g, or t
  misc_feature (340)..(340): n is a, c, g, or t
attgatttaaaaaaatcttgatcaggaatactgatgtgtggtgtttttttcttatagtgtctgtctggttttggtatcagaataatgctggcctcatagaatgcatttggaagtgtcctttcctcttcagttttttggaagagtttgaggagaattgatttaattcttcagatgtttgccagaattcccatatggccctgggctntttctttcttgggaggcttttctttactacttcatgctcttgactagcataggtctgttcagattttccatttcttcatgattcaatcttgataggctgtgtgtttctaaggaatttgtccagttcatctagggntatccaattctttgatatgtaattactcatagtactcttaatcc

SEQ ID NO: 428694 - DNA, 430 bp, Homo Sapiens
  misc_feature (25)..(25): n is a, c, g, or t
  misc_feature (234)..(234): n is a, c, g, or t
  misc_feature (293)..(293): n is a, c, g, or t
  misc_feature (340)..(340): n is a, c, g, or t
  misc_feature (350)..(350): n is a, c, g, or t
  misc_feature (359)..(359): n is a, c, g, or t
ggagatgtgctcagaggctggtgancgtttaattgacctggttgtgagcacaatgggaatgcttttctgaaccttccatttgcctccaatttagaataactgcttagtcagcaacatgtctccaattaacatgacagattttttggaccacagatctctttgggaatcttatgtaagctgtgaaacttctcccttaaaaaacctacatatttaattctgtctgtaattttaggncttcacatatccccaaagaccattcatgatccaccaggggtaaagacttgttttaagtnaagagaatattcgcagcctctgggagtagtagacatctccagagganagtctgggcnttctttggngactcatggcgtttattacattaggctttgggatgggggcaacccccaacccccaagtctgtggcgtgtgg

SEQ ID NO: 428695 - DNA, 482 bp, Homo Sapiens
ctggaatttgctttgtactagtgatttgaaaaataattttctggataacgaatttccatactaaagcatcagtcaccaccaattccttattaagttaattctccttagtaactttggtgttaaagtggtaactatctgaacccaaaataaatttgtgaagagtaatttattcattctaaaaagaaattttcttacattgctagaaaagaatagtatctactaatcttattcccatactttatgaagggtgattatttagagagttttaaaagaaattaacagaacatttaaaagtgtgttctttgttgtttgtttttaaataggcaaatgaatctaacctgacatcttttttccccttgctaggaaatattgagctgaatgaattacattccgaaaatgtaatgaattagtacacattttggaaatggaaaaactccaaagttttcctagtttttaatatccttgtctgggaggagtgtatc

SEQ ID NO: 428696 - DNA, 557 bp, Homo Sapiens
  misc_feature (541)..(541): n is a, c, g, or t
cgttgctctcttgagcagtcctatgtagaaagtggcaaattacacattttttctccccttttagtctctggtggacatcttgtctgtgtcacagtttgatactaccaaattgaaaggattcttcactgcttcagatggggagggtgacagaagctgagctgtttcctgggtcagataatggcctctgtcaaagcaaagaatagttgtagagacacaaactgggcccttgaagctgtgactaacattttggcaacatgcatccctttgccaaataacttcttttcttcttgagtgtgattgttgatctccttctcaaagtaggctcttgttgctactattcttcacacaactcccaagcaaaagttggcagagttccggttgactgactgtgtcttgaggggatatgccccggattaggagtgggatgggggcgttccatgttcaaaatggaggttccattgggcagatcctgaggagctgctttgcaaaggaaataggagggcagtactctttactgaatgttcttgcggtcccttatctntcttctaaattcaagt

SEQ ID NO: 428697 - DNA, 394 bp, Homo Sapiens
  misc_feature (249)..(249): n is a, c, g, or t
cctgcagctctaaggggaaagcatttcctcatggggaaaattatggatgccccgatggaacctattgtctacgtctctgcataacactagctttggtgacctggtctctggggataaaattaaaattagtgccaggcacatacaaccctttcttcttccctgccatctttatagaaaccctcaatagagttctaatgcccacatttgacaatgatgtcttttgggaggtcaggaagcagagagagtaanaaaaattctctcccaatgtgggttttacaaatggggcattagccacaggctgtttccagcttcaaggggtgaaggagttaggcacaaacttcttttttcttttctcttggcaattaaaaaggaatggaaatttactttccttttc

SEQ ID NO: 428698 - DNA, 353 bp, Homo Sapiens
  misc_feature (301)..(301): n is a, c, g, or t
gaaagtcacttgagagaaatgtttagatcttggaaaggaattctcaaagccagatcggtgggctactgttctattgtgaaaaggtcatttaatttataaagtaatgggattagtatttggagaggtggatttactggctataatgccttcaggtgaaatttcccttctgactcgtgttcataacacttatcttctcattcccattgaattttccatctattggctctgaatttcaaatctagtcatagaaaatactagactgaaaccttcagggataaaattgcttccttcattgtcctgnaaatggtttgtttcactactcagccaaaatctttaaattgtggatggattta

SEQ ID NO: 428699 - DNA, 369 bp, Homo Sapiens
  misc_feature (319)..(319): n is a, c, g, or t
atgctagcaatttcataatagatatattcaagaaggaccaaacttttaaaagatcttttagaataggtatgttaacttctcatcctaaccctatcaatatatcagaggctttatgaaggagactctacagataaccacaaatcttatcaagaaaattctccttaaaaaaagttatcctttattttgttgttaaatttcccagtttttaaaagtgttttatcaaaatgacttcataattgaagcaaataccttttggaagtatatatgttacataagactttcactaaatctgtgcgtaaagcttttataatctgagganattgttatgtattaggtttgtgcaaacctaatataaaagggttcatctgt

SEQ ID NO: 428700 - DNA, 451 bp, Homo Sapiens
  misc_feature (40)..(40): n is a, c, g, or t
ataatatagcttaacatagatataacccccaaaggactangtcaaataagtggatgaagaggactgaaaggggctggtctagatgggtttagaatccctagaagactaaccgggctgttggtccttcggtcagttttccatcaatagtgttctcagtggagggtttgatgtgaatctaggaaccaggaggtctaggttattgtcccttagaagggtagctattgggcagaccatccggccaagagacaagtaagaatgacttcagagaaagcaaaacaggttgatgaagtcgtcttcctttgccagtggttggctgggcatatacctgtgaatggggccaacagtttcctccaaacacaacctgggagttgtctctacccacaggagtaattatgccccaaattcttaacccccataaagccagggtgccaaaagttttccattttaggat

SEQ ID NO: 428701 - DNA, 319 bp, Homo Sapiens
tcctcatgacacggtggctaatctccctgcagtattaaacaataagagagaataaagaggaagccacaaagcctgtttgcctcagtctcagaagtcaaacactgtcactttgaccttattctattaggagccactaaatccagtcaagtctcaagggaagtgggaaggggtattgactgaaccccaccttttgaagagactgtcaaaaaatttgtgacatatatttcacctccacagacctttaccatctaaaagtcgatgacacaatttggattattcttcatcatatctaactaaatcaggcatcgagggaaccagg

SEQ ID NO: 428702 - DNA, 426 bp, Homo Sapiens
  misc_feature (363)..(363): n is a, c, g, or t
  misc_feature (388)..(388): n is a, c, g, or t
  misc_feature (395)..(395): n is a, c, g, or t
cctgaaagctctctttcctttataaaaatgttttacaagactactactaatcttcatcacacaaagcgctattattctggttttatagatggatatattgaagactatacaagtttgtaatttttctcttccttcaagatcaggaatgaatgatgagtgcctcaggtcatatgaagctgtacaagatatatgctcccagtaaggtcacagtacgtcaagagttgggtctattctctacttcatcattttccccgggggctcacagacttcactgggaaaaatttacacttaaccaaacttcacaagaggttgggctcattaaaccattaatattcaacttcccaaaatttcaaaccaggaaanatttttaggcggtttcttttggggngggtttntctggcacttaacacatttacagggaagggg

SEQ ID NO: 428703 - DNA, 455 bp, Homo Sapiens
  misc_feature (331)..(331): n is a, c, g, or t
  misc_feature (419)..(419): n is a, c, g, or t
  misc_feature (429)..(429): n is a, c, g, or t
cagtggtcttcatttccgacctaagagtactttgggaaagtgttcttaggtttgatatacttctacagtatcttcattttcattattaaaggtacctattaactttttctttcctgagctttctgcaacttgcctattaattctataatctccattccattctagatctagttctttttcagtatctatttaggaagaaaggtgtaagaactttatggatgcagtgttagaaagcagtccctttaaagtagggaactggggtctgtgggtgagggcatgtaaaaatcttaaggtatgagggagaaaggaaatagcagctaactttgggccntgtaggcaggtgctatttcttcatttaatcaggtttgtttccgtaatggaaactttggtagtacttcccactctcctaataggttaantaagtacctngggagttcgtatttgacttgttttac

SEQ ID NO: 428704 - DNA, 438 bp, Homo Sapiens
  misc_feature (109)..(121): n is a, c, g, or t
  misc_feature (291)..(291): n is a, c, g, or t
  misc_feature (349)..(349): n is a, c, g, or t
  misc_feature (376)..(376): n is a, c, g, or t
  misc_feature (409)..(409): n is a, c, g, or t
  misc_feature (423)..(423): n is a, c, g, or t
aaattgcaagttggggtcagtgatactaagacttctaatttgtttaagacttcacactggattaaatgcttagggagaagtgaagaccgggaaataggagagaccagannnnnnnnnnnnnaaactaatagctctgattcctcttaccagtcacttttaagcagatccgctcaaccttgatccttttctagatctcgcgccacaatctgcccccaatccaccccgaatgactcaactccgaattaacagcggacccggcataaacagacaccacactcttcacggacgtgngatggactaacaaggactttattctaccaaaatgggctagccttgatttcagggttantcctctggttgggaagggcaaattacntcgggcagaggaagttgaaagggaggaattttnaacccagcaggggncacggattttggaca

SEQ ID NO: 428705 - DNA, 458 bp, Homo Sapiens
  misc_feature (398)..(398): n is a, c, g, or t
  misc_feature (415)..(415): n is a, c, g, or t
gttgatatagcaatttaataaatgtgttattgtcaatgtaggcattttgctcatagcttagggcaagtgataaaaaacagagcttaacaaaggactggatgttttagtttgacagcagtgtctaaattacagattagagaactaatgactagccataccgaagacatttatctggaaatgccttccctaagtgccaacagagaatgaaaatatagtcaatagctttaagtgaccccatgcatcttaatgcctttcaagcaacatgtttttctgacttccaaatataaacaacctaagcattgtgcagtagccatgagggactaggtatccaagtgcacattatattgggctttgtaggagccattgggaggggagtaatagtttcagagtccatgganacaaatcataagtagcntgcttctgggtgctctctagggggcggaacttgctggatttgg

SEQ ID NO: 428706 - DNA, 458 bp, Homo Sapiens
gcttattgctaatcacatttctcatggttggtgttttaatgtccccaactcccatttctcctgcctctctgcttgaacaaattaccttatttcctaatttgttagaaagagacctttcactatgactgcatcttcatctttgcatcttcaacttctccccttccctcattaatttgccactatttctggagggggaaaaaagcagctcctatttggtgccaaggaaaaaccctcccactggattctcaatgccctttcctcccacgccctcctagttatcagtatatcccacttttcatgctacagtggtctctcccacaggactaggtccctccctttgcctacagtcatgaacagtccccattacctttgttaaggcacggatataaattcttaaaaatgggtttcataggccatgctccattttcattttttcattaaccatagtgtatggggtt

SEQ ID NO: 428707 - DNA, 516 bp, Homo Sapiens
  misc_feature (132)..(132): n is a, c, g, or t
  misc_feature (463)..(463): n is a, c, g, or t
agatcagccagaagagggcttgagatcagttaccagacactgggggtgactgtcacactaagagcctttggggactcaataatactgggatacagtatttaggactggtatcctgttcctctgcccggtggntcctattgactccctctgggtacagtggagttgcccctctgcccaggtgtggtggagcctagagagagtgcagtggatagggacctcacctcagcttgactgatattttgagctctgcacagtgtcctcaaacctgggacagaaaagatgagacccagacctcccaggagctcttggtcatagaggttactctctgtgtgtccttgccgtctgctgctttcacaatgggatagaattgggcagaattgggcagaattgggcagaatgttatttttggctgtggtgagtacagtgctgcctcactgggacccaagcccaagctgccctttantttccagcagttccagcccaggatttcaggccatgaggatgaggggagagacc

SEQ ID NO: 428708 - DNA, 464 bp, Homo Sapiens
  misc_feature (360)..(360): n is a, c, g, or t
  misc_feature (394)..(394): n is a, c, g, or t
  misc_feature (408)..(408): n is a, c, g, or t
  misc_feature (422)..(422): n is a, c, g, or t
  misc_feature (448)..(448): n is a, c, g, or t
tgttttgattgtgtaaagagtagagtgctgatttgtgtgttacagagggtggtctgtacaagtcataaagctcgacatggccttgcttcctgctaggtgttaggacacccatgatggtggagtctcttggcattctgtgtaattagataaggctgtttatagcattggtccatgagaacttccttgtttctatttaaaatgaaaatcattgtataagtaaaacttcttaaatgtagatagaaatagaattttaactgaaattttatgaagccattggccgcaggatgtgtgtcatgggaggagggctccatacttttttggtatacttatctccaaactttaattccatttggcatactnctttttctcttaagtgcccaactgtcctagtatnttttcttaaggtcnaactttttactttncactttattcccaaggccaggatttncttgggccttcacaga

SEQ ID NO: 428709 - DNA, 231 bp, Homo Sapiens
  misc_feature (146)..(146): n is a, c, g, or t
  misc_feature (174)..(174): n is a, c, g, or t
caacatggtctaaatgagtctaggagtggagtgtccttgaacttggggagaccaccctccactgcatttgcattattgatactatggctggagagggccttttgcctaaaagcttggagtatgttgggtcccccgaggagcaggtnagggccagaggttccagatccagagggntgggaaaaaagggaggttggaggaacagggaaagaaaaacctttttaattaaggaac

SEQ ID NO: 428710 - DNA, 436 bp, Homo Sapiens
  misc_feature (293)..(293): n is a, c, g, or t
  misc_feature (318)..(318): n is a, c, g, or t
  misc_feature (408)..(408): n is a, c, g, or t
  misc_feature (425)..(425): n is a, c, g, or t
tttaaaaaagaatctttgaagggaaggaagagcagaaagaagtattttaagaaaaatggagagaagtagatagtattgaaagtatatttcttgaagagagagtatctaagtgctataccaagattttatagggcttcctgttgccaaatgtgatgttgagataatgcacagctaagatggcaaatccatcaattattaactggctctgccacttctgtcatggaatgcaaggattgagaggtgactctggggagaccctggggtgtgtgagagagctccattcatctggcccnggatatgtttttccaaaagagaggngagaaagcgccagtccctgcaaggtggaacttgacctggggcactgttttcagtgggggagccttcactggcctggcctttttccatggntagggaggacaaagccntcctcttaccc

SEQ ID NO: 428711 - DNA, 305 bp, Homo Sapiens
  misc_feature (241)..(241): n is a, c, g, or t
taagctaaagtaatgaatgtctgaagttccagaaatcacaatggtataaataaagaagaagtgtgactacatttccaagtaggaagtcttgatatgacagaaaagtattaaaatatagggtatatatgggatatatgagacattttctgaaagattcataggactttgtaaattagttgtctgacttcatttttaactgggatagctaggaaagaatgatatccaaggatatgatagatcnttttctctggtctttatgtgtgtctttatggctggatggtgatagacttttaggggtctatcct

SEQ ID NO: 428712 - DNA, 326 bp, Homo Sapiens
  misc_feature (32)..(32): n is a, c, g, or t
  misc_feature (123)..(123): n is a, c, g, or t
  misc_feature (165)..(165): n is a, c, g, or t
  misc_feature (181)..(181): n is a, c, g, or t
  misc_feature (207)..(207): n is a, c, g, or t
tcagagcatgttgtgagcacctctacctgggngtccccctaggctacagctgctctcaaggtcacttcctctcacacagacaggcagtgaaactcatgctgaggactcatcttctgtacacanttttaagaacttctacttccaaagatacaatgaagttaatanatgaagcagagcaganttctagactaggcttcacatagggtngcttgcagcatttagatgcatttctctagacaccacacctattttccaactgtaatattctgtatagaatgcaaatgttcagactttgcttttcaaaaacgttgtatggttcacagctg

SEQ ID NO: 428713 - DNA, 396 bp, Homo Sapiens
  misc_feature (199)..(199): n is a, c, g, or t
  misc_feature (306)..(306): n is a, c, g, or t
  misc_feature (329)..(329): n is a, c, g, or t
  misc_feature (337)..(346): n is a, c, g, or t
  misc_feature (364)..(364): n is a, c, g, or t
  misc_feature (381)..(381): n is a, c, g, or t
gcatcacacacacagtgacttttgtgtttgatcttgaagaatgagcgaaccaggcagggagtcggggaggagaatcgcattccttgaggaaagagcagcatgtgggaaaacataaatgcacgcaataacctggctcacatgttaagagaactttctgactataatgagggatgtgttgctgccccaagctttcattatncttaaggagtttgtttgaacactctctagaggctttttaataataggattgttttagctggtctgtctggactggttagatataacactatttttaaatgaccccantcttcatttacatttgttgaagntttcccannnnnnnnnnagggttaccgtaaggganttttttggggaccccanaaattctttggcatt

SEQ ID NO: 428714 - DNA, 293 bp, Homo Sapiens
  misc_feature (239)..(239): n is a, c, g, or t
  misc_feature (272)..(272): n is a, c, g, or t
gagtctccaaagccttccctcggaacggttccattaaatctctcctgctcagaaccacccaatccaattcatggagcgccacgtggtctacagcacagctggttagggccagcggaggtttatttatagctgggctcctgggctgcctgggtaaccggccattgccacctttaaagagtcttggggatattatcttacctctatttcagctttgaaatcggggcatgcagttgcctttnggcttgggggctgggcgattaatttaaattttntattcattgcacatttatggg

SEQ ID NO: 428715 - DNA, 389 bp, Homo Sapiens
  misc_feature (332)..(332): n is a, c, g, or t
  misc_feature (367)..(367): n is a, c, g, or t
ccttacaggttggagaccctgatggattctgcatcgttttaggatttgcctctgattcttgctagtgttctcttttctgtcattatggggtttgccccgttttctctaatgtgctattcctgtgttttggttttgagttcttggttgcatgtgacctgactgcttctggagacagtacagtgcttgtcgtctctcagctgctgcttctgtgtctcaggagggctgagggctgccctccctcgggagcctccgtgcttcctcagggctttgctctttgttctgtacctcttctttcacgttacctttgggtgggtgggttttcattcctgtgnccgcctgcttctggggccagtgatccagggtgttntggtgaccaacccggggcacaa

SEQ ID NO: 428716 - DNA, 144 bp, Homo Sapiens
gagactccaatactttttccagaagcctaccccactggtaatcagtgatctaacatacacttcttactgtccactccagcctaaggaagattggaaggatgctcagctttacaataagcatcctaaagtctaggaatttcaacc

SEQ ID NO: 428717 - DNA, 195 bp, Homo Sapiens
  misc_feature (116)..(116): n is a, c, g, or t
  misc_feature (141)..(141): n is a, c, g, or t
  misc_feature (150)..(150): n is a, c, g, or t
  misc_feature (161)..(161): n is a, c, g, or t
  misc_feature (168)..(168): n is a, c, g, or t
ttttaaaggtagtgtaacctaagtgtgcaatgttcacacctacagtagtgtgcaacaatgttttaggccttcacattcactcactgttcacacacagactcatccacgacaacttncagccatgttaagtgccctatatancacattttnactctccctgntactatnttttgatatgtttagggtacacagata

SEQ ID NO: 428718 - DNA, 439 bp, Homo Sapiens
  misc_feature (351)..(351): n is a, c, g, or t
  misc_feature (375)..(375): n is a, c, g, or t
  misc_feature (377)..(377): n is a, c, g, or t
  misc_feature (405)..(405): n is a, c, g, or t
aaatgtacaaggtctcatcatagaaaacctgaccctgctttaaaggaccatttcaaggaatgtgatcagcaagaaggcagggtggaactaaatatttctcagccctgtcagcattcccaggaccacttcctttatgggaatctcatcatcatctgatgcattctcttcaccctttctggcccagcttggatactatcctttcttgaagttttgaagggagcccaatgtagagcatttctttttcccacctgaattccaaatgaattaagaaacttcgctgttcttcattttaaaaaaggactaaggtgggaagatggagcttggcaagtgaagtccccaattagggcaganttattttacccagttcatagggcntntagggaggggcctgctttgatggagganttaccgcgtgggattaggcaggagcacttgttcc

SEQ ID NO: 428719 - DNA, 389 bp, Homo Sapiens
  misc_feature (313)..(313): n is a, c, g, or t
  misc_feature (375)..(375): n is a, c, g, or t
gagcagaggaatcaggagccgccttccgcctttctgctcttcatcctagcaggcttttcctgctggccttgtttctgatgggccaattacagtgcaaaactgttccagacctgacctttcatcccggttccagtggcccgccaagaatcagccttgccttgttacacctccatcagcagcacagcccaaccgcagcttcatcacattaggatgtggcttcatcacattatgattttctctgagttggggagcaaaggtgagttggggagaccagggcagggttccttcacaaagttggcccagggaagggagngaaggacggggcagtgttttgaggaggcagcttggcccagggggttcaggttgcggaggccntgggagccaaattg

SEQ ID NO: 428720 - DNA, 147 bp, Homo Sapiens
  misc_feature (24)..(24): n is a, c, g, or t
acatccaggcaattgcatactctnttactatttggcctcaaatacccatgtgatttccttctctgtgtgatgaacaaggttaactagtgtttgagcctgaggactccttttgttaagtccagagtcaccctctgtttttgcctttgt

SEQ ID NO: 428721 - DNA, 460 bp, Homo Sapiens
  misc_feature (415)..(415): n is a, c, g, or t
tcttgtctgtggtcgcatgggggctcagtgggaaagccgggactaaaagctggccccaggctagctttgtgccaggccatcctgctcttacacaggggctgagaaccaggggcagcccaggagtcctggatggggcagcagtcatgttggatggggctggggtgttggctctccctttctgggctctcaggagtggtcagggctagccccagatctcccagaccaagaagaggagcagcctgtggggagacactcatgccctgacatgagtcagtgcatcaagagaggccatcagccagtgggattcagcaagcatgcctgggcgctgcctgggtagggtgctgcccatgggaggaagagaagaggagctgccacccattttggggccctccttcttttgggtcctcagattttncccttcaagcccagagtgttaagtttccacaagggcccctttcat

SEQ ID NO: 428722 - DNA, 448 bp, Homo Sapiens
  misc_feature (362)..(362): n is a, c, g, or t
  misc_feature (412)..(412): n is a, c, g, or t
  misc_feature (438)..(438): n is a, c, g, or t
tattccaaactttgtactcgaggggagtggaaagcttgaagacctggcaaaggatttatctatttagcattctctttgtcattggtggtgccctaggtttgaggtttgtgagatctgaaagtaacattccaatgaagaactaaagcacatctctgccacacagaaggtgaggtttgtggcaatcaatggaactaacaaatccattctgttttttattatgactaaacctaagttgagggtgtggggtattagagcagctgaaattcagttgcctctttggggggtaagctgtacacatcacttcaaggaaacagctgggatgcaagcttaaaacctgcttcttcattctcccctctttgccntgctagtgtgttaggtcccctgggaggacagtttcttttcaggccttcanccttttggccatttggaccgtttgcntttctacccc

SEQ ID NO: 428723 - DNA, 445 bp, Homo Sapiens
  misc_feature (271)..(271): n is a, c, g, or t
  misc_feature (282)..(282): n is a, c, g, or t
  misc_feature (340)..(340): n is a, c, g, or t
  misc_feature (357)..(357): n is a, c, g, or t
cacaatggttgaataatttgcactgtcaccaacagtgtaaaagaattcctattttctccatatccctcttccagcatcttgtttgttttctgactttttaagggatcgccattctaactgggtgaggagatgctatctcattgtgggtttgaattgcatttctctaatgaccagtgatgatgagcttttttcatatatgtttgttgggcacataaatgtcttcttttgaggagtgtctgttcatatccttcacccactgtttgatagaagncaacctgaccntttcttgcccttctagtacattccttatttagggaaaatgttatctttgtcataaggncagccttgattcatagnaggatttattcttcattatttttatagccttcttgaaatatatttctaacaccatggaattcacccctttaaatgatatacagttggg

SEQ ID NO: 428724 - DNA, 380 bp, Homo Sapiens
  misc_feature (211)..(211): n is a, c, g, or t
  misc_feature (225)..(225): n is a, c, g, or t
  misc_feature (230)..(230): n is a, c, g, or t
  misc_feature (252)..(252): n is a, c, g, or t
  misc_feature (275)..(275): n is a, c, g, or t
  misc_feature (290)..(290): n is a, c, g, or t
  misc_feature (321)..(321): n is a, c, g, or t
  misc_feature (340)..(340): n is a, c, g, or t
ttttagctgaaagggcagatgtcagctggtttgagcctgcctaggtgagctcaacagctttcaatggggagaagacttcgagtttctaggtgacagctgaatcctcactgggtgaatccttactggtggcccatgcccgaggcaccttgagggacaacatgggaaagcaacccagggagtaaggggcgaattaggttttctcttctgggtnctgagaagatgttnggctnttgggaagcagagggaagtgantcaggatcatattggctgtgganttgccatttttcttnagggcagtttaagtaccagacagaaggacanttttttaaccacagggatntttcattcccttcccggggtgtctttttggtcatctttgg

SEQ ID NO: 428725 - DNA, 414 bp, Homo Sapiens
  misc_feature (156)..(156): n is a, c, g, or t
  misc_feature (174)..(174): n is a, c, g, or t
  misc_feature (224)..(224): n is a, c, g, or t
  misc_feature (230)..(230): n is a, c, g, or t
  misc_feature (268)..(268): n is a, c, g, or t
  misc_feature (273)..(273): n is a, c, g, or t
  misc_feature (293)..(293): n is a, c, g, or t
  misc_feature (307)..(307): n is a, c, g, or t
  misc_feature (332)..(332): n is a, c, g, or t
  misc_feature (358)..(358): n is a, c, g, or t
  misc_feature (367)..(367): n is a, c, g, or t
  misc_feature (384)..(384): n is a, c, g, or t
cacacaaatttaaatctatttctacatctatctttatatattttttagtctaacttttattttagatacagggcatacatgtacaggttttgtacatgggcatattgcatccaggtagtaagcctagtacccagtaggtagtttttcaacccacantccccatcctccctccantctctagtagtctgcagtgtctgttattctcatgttttagtccatgtgtnctcagngtatagctcccacttataaatgaggaatatgcaggtgnctggntttcttttcctgcattaatncactcagggttatnggtctccaggctctactatgtctcngtgaaggggcatgaattcatcctccnatatggggngccataggtattctgtngggggtattatattattaaccacactttgc

SEQ ID NO: 428726 - DNA, 113 bp, Homo Sapiens
ccaataattacatattttatatcattaaaaatggggcgctacttttgttcagcatttatattgatttaccttaatctgaattttggcaacccgcagttcttaagaatttgtgg

SEQ ID NO: 428727 - DNA, 341 bp, Homo Sapiens
tgaaactcctgagatataagaaaatgaggatgtgggatttgtattatcaaaaaactaaggcagttcatcaaagctttttatttctggcagccacctcccatgccgtcattccttagtctgccccttatgctaccatatgttaaagagcgtggtactccccaatgtatggtgtgtgagttttggcggggtgaaggtgtggggaaagggtataaatagaacaaaagatccaagttcccacagcagtaattgtcactgacctaaggctaaggcataggaagctgactaggggttcttttatttgggatctttacatctcaggaaagctcttttattttaaggta

SEQ ID NO: 428728 - DNA, 518 bp, Homo Sapiens
  misc_feature (177)..(177): n is a, c, g, or t
  misc_feature (180)..(180): n is a, c, g, or t
  misc_feature (283)..(283): n is a, c, g, or t
  misc_feature (396)..(396): n is a, c, g, or t
  misc_feature (435)..(435): n is a, c, g, or t
  misc_feature (452)..(452): n is a, c, g, or t
  misc_feature (464)..(464): n is a, c, g, or t
  misc_feature (475)..(475): n is a, c, g, or t
  misc_feature (486)..(486): n is a, c, g, or t
gtttagtcaactttgtcttttctgttctaagttggacacctataagccttcccagtaggacctcttctagctcctttttatcgcatttgtcccccccctctggctgctctccagacactgcagaagtcaggcaccccatccccagcacattcccatgacagccaaatgggcctttgnaanccagacattactctccgtgccctgttcctgcacctcaccccctcggcttggtcctgggcaggcgtccaagtgactacttagtctcagggcaggttgccctggntggccatctggcaattttttctccaccaaaaataactgatcctgaaacacaacacccttcccccaacaatggggttaattctccagccattttgggtgccaatttacaccccnacgtaccagaaggggagggttgccagttggattacaagnttttaattaacagaggntgtttttgggtnacaagttattngttgggggccnggggtttgaggtttggatttccgttaagaggc

SEQ ID NO: 428729 - DNA, 432 bp, Homo Sapiens
  misc_feature (95)..(195): n is a, c, g, or t
  misc_feature (272)..(272): n is a, c, g, or t
  misc_feature (380)..(380): n is a, c, g, or t
  misc_feature (389)..(389): n is a, c, g, or t
  misc_feature (404)..(404): n is a, c, g, or t
  misc_feature (420)..(420): n is a, c, g, or t
aatctctttcttacctaccccccatcatcgcggggagacctgaaggcatgacagatgtggcggtcctttataaaatgctgtatcacctcactagnnnnnnnnnnnnnnnnnnnnnnnnnnnnnnnnnnnnnnnnnnnnnnnnnnnnnnnnnnnnnnnnnnnnnnnnnnnnnnnnnnnnnnnnnnnnnnnnnnnnncatgttaatacgattcccagggcgatttcgtgttgcacattttatgttttgaggaaggcacgtctattcataaggantgttaaaattgtttggacattttacttcaggcagctgttctcttccagcacttggggggagcttttgcccgggggtttaaaggggagcaggaattttgttgattcccnggcaaagtncctcccttttgggtncccacttttttggggnaagaggagaggc

SEQ ID NO: 428730 - DNA, 412 bp, Homo Sapiens
aaacacttctgtcctgatgacttgctgatgttaggtttatagttaaccataagtgggtaaacggtttgctgatagtcatacagggagaaagtaccatggctccatgccttgagttccagggtgaggacagaggccaggacatcagttgtttatatcccttactatccttgtactaatgttcgtgccatagtgcaaagaggactcacaacgtgcaccatttttatgcctaaataatgcatagaaactctacttcttcttctcttgaggtattctctgcaactcttgcttatctgttttattgtctgtaacactgggggttaggtgaggagctttttctttggggaggaaaagtctctacattaggatttgtatttcagagatgagggcttgtttttttgttttgtggtgttcc

SEQ ID NO: 428731 - DNA, 392 bp, Homo Sapiens
ttcttctctcattgccttgagcaagggcttataaccagagccacattaagaactcagatcatgctccctaattgaggacacatagcaagcttcaccaagccctccactacaactataccaatttgtcttcctgtagacttacaaggtaccactagggttcctttggagaactcaggagtccagtataacttggagtgataataccacattgggaactcacaactcttctaactccaggggatttgaatgtgatttcttctttttaattcagagtaggcgtaatgatcctacacttggggcatatttgtcttgggccccactcccaaaggcaaataggattttccatgttaactggggaaatctggcttggcaaaccccaggaatttttatcc

SEQ ID NO: 428732 - DNA, 392 bp, Homo Sapiens
  misc_feature (169)..(169): n is a, c, g, or t
gctgttgtcaggtgttggtaggaacaaacactaaatgattttgacggccttgagctttttcagacaggaactcaaagggtggccaggtggtcccagggatgccgctttgggctgccagaagccatgctagggttggtccagtctcttggtgcaggggtttggacgcagnactatgtacccaacttctgttagagttatcagtttcaaaccccacccgtgcccccaacaccatccccagtgtggggaggcacatcagtaaatatcagcctcttgacacagatgctcacggacctacacggtggcaaaaaagctcttaaaaatggggccgtgactttaggagcaggggcagcccttgaaccattacccaagttgggcagagcagggaagttggc

SEQ ID NO: 428733 - DNA, 382 bp, Homo Sapiens
  misc_feature (317)..(317): n is a, c, g, or t
  misc_feature (329)..(329): n is a, c, g, or t
  misc_feature (346)..(346): n is a, c, g, or t
  misc_feature (352)..(352): n is a, c, g, or t
aagtatgttcttttagaagatcacaaatctcatttgaaaagctttatattgcatttagcagaagatgatatctgatgagatcaacttctctgatgattgaactttttaaatgtcttttgaaatgcaatcttcaacataagatttgaattttgtctttttattaaaatttctttttgagaatacaaataggagcaacaatgcattaatatactgcagtttttagtgttgcactaggaaggcattgaaagttactttctaactaggtattctgggaaactttcaggatcattaatatgcttttgttctactatggaacncttatggtctgngggccttttcacaggtntggggnaaacctaaataaaccgtttttagggggttt

SEQ ID NO: 428734 - DNA, 479 bp, Homo Sapiens
  misc_feature (408)..(408): n is a, c, g, or t
  misc_feature (427)..(427): n is a, c, g, or t
tttaagaactacctgaagaacttgttaaagcagtaggcctggggtaggaccgattaattttcattttttacagacccatagatgatgctgatgctgttggtttagaatcacacttggggaatcacttatctagacaagggcttctgatatttaatctgtacaaatccccctaatcttgttatattgaagatactgattccataggcctcaggtgggtgggagtatttgcatttcaaacaagctcaaaggtgatgcttatgctactctccgcagacccattgtggggaagcaaggatttaggatgatccactatttataaggcccaagtcatatttgcatgggtttgggtgattttcaggaaaataatagggttcaaataagggcttcgagttttatttccccgacccnaataaggattgttattccnttaccccaccaaggtccgccggtttccttgttgtaccagtttgggatatata

SEQ ID NO: 428735 - DNA, 451 bp, Homo Sapiens
  misc_feature (210)..(210): n is a, c, g, or t
  misc_feature (330)..(330): n is a, c, g, or t
  misc_feature (336)..(336): n is a, c, g, or t
  misc_feature (358)..(358): n is a, c, g, or t
  misc_feature (373)..(373): n is a, c, g, or t
  misc_feature (407)..(407): n is a, c, g, or t
  misc_feature (422)..(422): n is a, c, g, or t
aatctcttctcctatccttgaaagctttaactgctttctctatgctatctcaagcttcattgtatcttggacaatgtttcagacaacagaacttgtattatacaacatttaactcaatatttgaataatcatagaatattgtattctatcttgattctacaatccttcttaatgatggccaatatttcactagctgaatgggcaggcagnacattaccacttaaccaattaaactattcctttctaggaaccacctaaataaggcacattaaaggaaaattcattatggaggtaaaagggggggtggcacatggaactgggttaaatttncatttnctttggtttaaaggtaggcccntagggggatatttgntaattttccaggttttcattgtttgtttggctgntacccaactttttcnggggtggccaaaaacccaaaaaaggtttt

SEQ ID NO: 428736 - DNA, 438 bp, Homo Sapiens
  misc_feature (293)..(293): n is a, c, g, or t
  misc_feature (394)..(394): n is a, c, g, or t
  misc_feature (408)..(408): n is a, c, g, or t
  misc_feature (415)..(415): n is a, c, g, or t
taagaccttgtactagatttttgtgaacacagcaaggtattacatcatgatgtctggagtaagtggcctaggagaagaagtaaaagctagaaaagagatgactttttattagattaggtaggcagaaataatagaaccattttaacagatgctcaaagctccaaagatgtgaatgagaaaacttacaggaatatagatttttaagaaagtgtattttctgctttaatttttgattcagaaattaattttgggaaaaaagcagtgttggaatctgcacatgctttattttaccngttaaaacaataggggccgagttggaccaatgtaaaatctcgtaggagggtatccgggacccttccactctttgggggatcctgtttgttgagcccggggnctttgttgggactnttcaccngccgaggccctgggggcccgggg

SEQ ID NO: 428737 - DNA, 427 bp, Homo Sapiens
  misc_feature (336)..(336): n is a, c, g, or t
  misc_feature (342)..(342): n is a, c, g, or t
  misc_feature (374)..(374): n is a, c, g, or t
  misc_feature (388)..(388): n is a, c, g, or t
  misc_feature (413)..(413): n is a, c, g, or t
agaaagaaatgttcaaaagcatttagcaaagaaagtacatgaagtgcagtcagattgctctgggaattcagggatgagagtaactaatttacattttaaaatggtagttcttagaggcccagcaaggaaaggaccatgaaggcagaatgtttcagtgtgtcttgaacagtgagtaggacttataactgatggaaataggggcatttcaggcagaaagaataacttgaagaaaatgaatagggcatgtgcagggaccatgaataggggaatgtcgctgtgtagcacataatacgtgaacaagactgttgtgtactgcagtcccacagggattaaggnataagncttaaaacttatacagtttgactctttgaacnacctggggactttngggggtcccctttggagttttttcntattacctttgggg

SEQ ID NO: 428738 - DNA, 118 bp, Homo Sapiens
  misc_feature (79)..(79): n is a, c, g, or t
tgcactttttcccacagtcttttacaacctggcagatggagggagatccctttttggtggcctaaccccaccagggccnggggttttcagggcacaaaattgggttggccttttagga

SEQ ID NO: 428739 - DNA, 422 bp, Homo Sapiens
  misc_feature (108)..(109): n is a, c, g, or t
  misc_feature (406)..(406): n is a, c, g, or t
cttggttcaactccagccgaggagccttaggagtcctaactcattcaaccctggggctcatctaggcgtggctgcacactagcatgggtcaaggagtctagtttgtannaatattagccatctaactgaaaacttaaagggtgacccaaatcagatcagctttaaagaggtaggtaggtatttagccaaagagattcatttggctttgatcccacaactaggcactctaagaattccactataaggagattgctgctctgaagttggaaggttaatttgtgacaaatacctggggagcaggagctttaatcacaaagcctgctcttgagtaaccatcctcctcccactcctaggtgcctttgggtggtttttcaaaaggggaaaaaggaaatcgccagggaagctnggagttttgatgggcc

SEQ ID NO: 428740 - DNA, 370 bp, Homo Sapiens
  misc_feature (79)..(79): n is a, c, g, or t
  misc_feature (110)..(110): n is a, c, g, or t
  misc_feature (173)..(173): n is a, c, g, or t
  misc_feature (187)..(187): n is a, c, g, or t
  misc_feature (286)..(286): n is a, c, g, or t
  misc_feature (332)..(332): n is a, c, g, or t
  misc_feature (337)..(337): n is a, c, g, or t
  misc_feature (359)..(359): n is a, c, g, or t
aagaaaataggtgactttttcactatgtgcttaggtgactgcagatgcccggcaatgttccctcccaggccctcctggntgagcccgcctcccaggcaggggtcagcatngccggggtccctctgtctgagcccaggattcgtgcaacaccaggaagacaacagttgaaggtnccttagtgagctangggaagtatacacaaacttactacataaacattagaaagtgctgtccgtaaaaaacacgtcttcacagagccaacaagcagagaaatagctgcccagtnttaggaagtgcatcatgatccagaggttcagcccgtgtgcagcgcnagtancctgaggccccagagagaccgnggacgtcagac

SEQ ID NO: 428741 - DNA, 418 bp, Homo Sapiens
aggagtaggaggcccacccagtcccaccacacataccgggacatctttgaccacatgggtcctctgccgttcgtattttagcttagatgttcttaactgaactaacttccaattttcatatacactgatcatcttgtccctagcattttccctccaagatcctgctaacaggcaaactagccctttcaaacagttggtacctgagatttctcagagctctcttatcaagagtaaggagtgagattgcagaaggggcagtaatgtcaataccaagttattggaaactacttaaccagccactgcattacatactggagcccgttctaggacacttgcccttggaaatggtggaaagactttgttttatttctatttcatcaacagaactttttgtaggcttggaatctaaggcaaaggg

SEQ ID NO: 428742 - DNA, 329 bp, Homo Sapiens
caaacctcaattttatatttctttatatcttgtttctctcctttattcaatcaacaagcagtttttgaagtgttgtcctgtatcaaggggtcacagatttgctggctatggtctgacaatctaatggagagagagaagtattgtcaaataaagacagtaaaatgtgatttcgcagtctataaatatatacaaataatatttcattcatgagtattcttttaatgtccttcttaaaataacttaatttggggatttgtctttaaaactctcgcaaaaatttgaagccaaattaagttactcatgagataactagtttgaattaccatcca

SEQ ID NO: 428743 - DNA, 275 bp, Homo Sapiens
  misc_feature (18)..(18): n is a, c, g, or t
  misc_feature (226)..(226): n is a, c, g, or t
gcagccgtgcaggtgatnggagcactgctttccagggaggcccacatctgtcactccagaagcacccaagtttactctgccacgtgaggacgctcatccctcggtcacatgaacctagaccttgcttcctttggaagctgcagtcgggtgtcctgaggcaaggtggccccacttccagctgctgtgcctggcacggccttctgaggcagatgggctgcgcagcctntgggtgcagtcggtcctctgttccctgcacctgtcgtggcctagactcc

SEQ ID NO: 428744 - DNA, 115 bp, Homo Sapiens
  misc_feature (47)..(47): n is a, c, g, or t
ttaatcccagtctcacagatacaaaacagccagtatgaaatcacttncacacatcagaatgtggtatgacacacagagacaaaagcaaaaggctggatatggctaactccatcaa

SEQ ID NO: 428745 - DNA, 387 bp, Homo Sapiens
  misc_feature (94)..(94): n is a, c, g, or t
  misc_feature (282)..(282): n is a, c, g, or t
  misc_feature (306)..(306): n is a, c, g, or t
  misc_feature (343)..(343): n is a, c, g, or t
  misc_feature (355)..(355): n is a, c, g, or t
ttctttgcatagtcagatgtcaaatatgacttcaaataatccaagaatattgggcaaggaacttcaaaagagtttggctcagtatcgtatctgnagcaaaattagagtttagtacatagctatctcttttgttgcttaaaaccaatctctctctcttccccccacacacaaaaaatccagtatcttaaattttaaagttatcctcctaagtgctcataaaccaatatatggggaatatagttcttgaaatctgaatgggctggttgatgtatggaaaatttngataactcattaaaaaataacttntttacaaaatattttctgtatggtacaatctccatgntaatttctacangggccttgttcatacatcttatatgggtgggg

SEQ ID NO: 428746 - DNA, 161 bp, Homo Sapiens
aactacttaaaaatcctgttccaacaatgtgaaatctgagttttttttacatccaaattttttgtttaagtcatagacaaaacatatgtgaacagactggttacgcaagtagaacgtagtaaatttttatatgggaacagttgcatcctcactactagtac

SEQ ID NO: 428747 - DNA, 701 bp, Homo Sapiens
  misc_feature (643)..(643): n is a, c, g, or t
atccctccaccaatcataccttctgttggcctctgcagtagagtggcctcttctgggcccttccacatgccaggggatatggccaccagcagttctggggaaaccattagtaatttgtgatcgtagagatttgtctcccagtattccctagggcaaaaatattgggagttcctagtcacctaaatgaagaaccttatttttagcagtttccctttcagggctctaacaggactgtggagtaatgtacggggttatgtaggagcaatgcagagccacttttgaaaaacagtagccaaggttctactggctgccttcttaggacattattaaatatcataaacacaagtggaatttaacacccagccagtttgtgttcaaccagacagcgtcattatgaacaaagattatataacgatagctgatattaagtaagttttaaaagttgacatcccaagagtgaagcctacttattcagtacagatttgttgaatgaaattcgtagttttattttacggcataatgaaacagagttccagacatgtacctgccaaatttggttctggttgtcttatcgtatgcaggctggatacctgctactgtgcttctacaggatgttaacagtgtcccctgagtaaaacagttncacggtcagtacatttgggaaccactgagttaaatgggttttatcactgcagaacaga

SEQ ID NO: 428748 - DNA, 565 bp, Homo Sapiens
  misc_feature (25)..(25): n is a, c, g, or t
aataagtgtatttaacatcccaagngtatagagtatggtatcatagccataaaataagtataggttattataaaagaaccaatccaatcttagatattgcaattatggttgttaaagttgttttaaaagctaaatagagggatacagctgaagagtaaagctgtcagaataatcacaaggtgtctctcattcaaccaaaaagtactaacagagaaagtatcaaggaaagctcaatgatacagggatatgtcccaaaattccagtatctaaataggagataaaagatgggacatagggagaaaaatatagactagaatagctttctttggtttgaaaaggcacaagtttaggactataaaacgatctttcccttttaaataagaatcattgaccaaaagtgtcagaatatctcaacaggagtgattgtaggtgtatttttaccatagtgcactaaaatgtacatttttaaatgcaaggcttgccgaaaagaaagttttcaaatccccttctaaataactcagggcaaaaggaaatttaaaaattaaataatttagtaattaataca

SEQ ID NO: 428749 - DNA, 756 bp, Homo Sapiens
atttttatttccttatttaaatttgctaaatgattctctcataatgaagtaaaaactcctgagcagggccagagttggaatgaggatcagaaagggaatttagttcaatagggataatgatgttcattttagacatgtggacttgtgattctggggaatcagagaggaggggtttcaaagttcacagctggcattgtggctaaagttagttctgaaggtacagatttggagaccatcaatgctgagtccaaggggaaagaagagcccttgaaatgggatacaagtagagatatgctgaggatgttggagaataatctagaaactctcagggctccagggtcttggcatggccacctcatatcctttctgcatgaggccacttggttcctttgcttttgaagaaaatggcaaaattaatacaaatgctcccctgacttacaatggggttatgtcccagtaaatccatcagaaattgaaaatattgtaagttgagaatgcacttaatatacttagcctacagaacataattgcttggcctagtctaccttaaacatgctcagaacacttacattagcctactgttgggcaaaattaccagcacaaagcctgttttatcataaagtgttaaacatctcgtgtaattcattgaatactgcactgaaagtgaacaccagaatggttgtatgggtactcaaagtacagcttctactgaatgcgtattgcttttgcaccattgtaaattgtgaacaattgtga

SEQ ID NO: 428750 - DNA, 793 bp, Homo Sapiens
  misc_feature (781)..(781): n is a, c, g, or t
tgagtttacaaaaatatgtaggggatcagataactctttcatagcctaattttaggcctgaattttattcttcatgttccttttcaatgtagcactgacatttagtcagtctagggaaagcatagaggaaaaaatgctctaagaagtactttgtaattgagaaagcctttcgtttaaaagtccaaaatctctgtactaagcatatttatacagaaacattttccatttaaatttccacattgtttttaaacatctaggataaatgtttacaggaaaaaaagtcaacacctagctagctttcaaaaagtagacattctttactttcatctctaagctcaaaaataactagattatttttgccaacatttctcaatagtcttacatgggagctaagataaatcatggaagatttaatctcaaaagattcttttgtgatttaggagtggagaagagatttatttatgaaccatgagtaacataaatgcaaatggctcttcggacataatcatccactttaaataataggatatggttacatggcaataaaaacacaggatttgcttacgtaaacatgaaaacttcagtatatttggagtttttctacctgaatatgtattatattaatttatagactttttaaatattagaaggtaacttggattggaatgattctcaaaaatggtaacagttgaattatggaaaatattaagcactttaattaaggaaacttattgatcaacttcaaactgggttttggctttagcataataattttttatgntaaataaataat

SEQ ID NO: 428751 - DNA, 663 bp, Homo Sapiens
ttttaacagaagtatgtatgaaggaaatattttaagtataatctacccaaagaaaataactgctacagccaacattaaaggttttattccctgttttgttaagtaacttcactccaaattgtgacattctttagagaaaatattttccttaagagtagttatttacgtgttttattgggggagcatattttcaggggggcaacatcttgctaagaacatttgattagcctcactttgtactgaccccaaaaagttggacagttaaacacgaggcatataggtctgattccgatattcaattggagtcagaccttttaatttcaggctaattcttctgctgttgtagtattcaatatattccgtaacagcatccttcagttcgcttatattactgaactcatcaagataaaaacactccgactttaaggttccaaagaaacactccaccacagcattatccagacaattgccttttctggacatgctttgtttaataccatgttctttaaggatattttgatatcttctcatacgatactgccatccctggtcagagtgcagaacaggatgctcgtgaggattaagctttttgaatgcctgatcgagcatattctcaaccatgttcatcactggtctttccgaaaggctgtaagaaataacttt

SEQ ID NO: 428752 - DNA, 560 bp, Homo Sapiens
  misc_feature (454)..(501): n is a, c, g, or t
  misc_feature (510)..(510): n is a, c, g, or t
tcactattttagagcatacagtagatttttaattgcattgttcaaaatcctttactctttccctatcaatataaaataaattaatagtccatagtatagcattcaaggcctcttactttgtggccccaaactatctttgcagagttatatctcaccacttcttttcacctacttcatgctccagaaaaatgtgagtattacctgtgctttctaaactcccctaacatttgatcccattgcttcagaaacctggcctccatggcttcacatctttcttccaccaaatcttcatatgcagctcaaatgcagtctcttctaaaaagtcttcctgagatacttcttccttccctgtccctatggaagtcttctctcccagctctatgctcccatataacttcacttgtatctctaatactatatgcatcctatcttctagtgcatttgtttgtgtatnnnnnnnnnnnnnnnnnnnnnnnnnnnnnnnnnnnnnnnnnnnnnnnnggggtctgnttcctctctgtatctctagggactcataccatgttttacacacagtcggc

SEQ ID NO: 428753 - DNA, 652 bp, Homo Sapiens
  misc_feature (537)..(538): n is a, c, g, or t
  misc_feature (555)..(555): n is a, c, g, or t
  misc_feature (577)..(577): n is a, c, g, or t
ctgtttttatgccagtactatggtgttttggctactatagctctctgtgattgaatttgaagtcaggtaatgtgattcctccagtttttgttgttgttgttgtttatatcccgcccccccaccacactcaggatagctttggctattctgggtcttctgtggttccatataaattttaggattgttttctctatttctgtgaagaatgtaattagttattttgatatggattgcgttgagtctgtagaatgctttgggtattatggacagtttaacaatattgtttcttccaatcaatgaacatggactatctttccattttttgtgtccctttcaatttttttcattaatgttttatagttttcattgtagagatctttcacttttttggttaattcttggcattctattttattcatagctattataaatgggattactttttattttgtttctttttctgattgttgttggcatatagaaatgctactgcttttgtatgtcgatgttgtatcctgaaactttactgaatttgtnnttcagttctgatagttntttggtggagtttttaggtttntccaaatataacattatatcatcctacaaagataatttgacttcctcctttccaatttggatgtccctttattta

SEQ ID NO: 428754 - DNA, 560 bp, Homo Sapiens
  misc_feature (487)..(487): n is a, c, g, or t
  misc_feature (496)..(496): n is a, c, g, or t
  misc_feature (547)..(547): n is a, c, g, or t
tcccactatacttgtacctttcagtatatagaaattgttcagactagttcaaacaccaccatctggctttagaggtgattaacagctttcttccagttacttaaccagccttaacatttattgagcacgttcaaagatagaaagctcttatggaattaaacttggcggaaaaggatggttatagatacactcacagcacattcagtaagactttaaggagccaccgtgacagatctgacttcaggaagttctgccaaactgtcagttgctgcttgtaaactgtgcagcttggaacaagaaaaacatgtattaccttgtcaggaggatgcaaaacttgactgaaactcttctgggcttatccatctcacctgatgttaaaaatgagcaattgatttccctcataccatacaatctgttgaggaaactagcaaaggtacaatctcaggaagaagtaggccaatgttactatgttatagaaatgagatgntggaaaagntttgacaacacatagaactaattagaaagcaccactcaaaaaacaaagcangctaccattatat

SEQ ID NO: 428755 - DNA, 723 bp, Homo Sapiens
agccctaccctaaaccccagtgctctactgcttgttgtcaggatggctgggtcaggtgagaaagaagcctagacatccctagagccacctgctgtgcagccaccttttgagaaagtgtccccagtgatcttttcccaggttagcctttgtggcttgggcatccagcctttcagagatatgaaaccacacacgtcttcagagtgaacagctgctcaccccgatgtgctcaaggggtgcaggatgtggacacatcctactgaatgagccagacaacgtaactggatctgtccagaacaccacgatgggtgacattgccatctgcagcagtgctgtacttcctcccgccaatttgtaaagtgcagacaggatgctggatcaactggctgctgctgaggccagtgacctctagggcgtattcccacgttcctttgcagtagctgctcacctttgtaagcatgtgagttattcgtgctgtctgttgtgatcctaaggaatccaatggtcaggaccagaacttctgaagtacagcccagcattgccgtctggcatccccagaaagcagattttgagattggcatgatggccgttaagcagggcgttctctctggagcaatgtctagccggggtcggagtggggagagagagaggggggctgctgagaatatcacagagagatggcagcctttctgcagcataggcctaagtgcacactcacctggctat

SEQ ID NO: 428756 - DNA, 464 bp, Homo Sapiens
  misc_feature (12)..(12): n is a, c, g, or t
  misc_feature (35)..(35): n is a, c, g, or t
tctcagacaagnagccactatttctgattcagatnacctgtcatcgaagtttaaagaaggggaaacaggagacagaaatacactgaaccaaaaagattcaaaagagcaagtggaatctctaagaatggcttccagccactggaatgaaaccactacctctgtttatcagtaccttggttttcaagttcaaaaaatttaccctttccatgacaactggaacactgcctgctttgtcatcctgcttttatttatatttacagtggtatctttagtggtgctggctttcctttatgaagtgcttgactgctgctgctgtgtaaaaaacaaaaccgtgaaagacttgaaaagtgaacccaaccctcttagaagtatgatggacaacatcagaaaacgtgaaactgaagtggtctaacactctatagaagatgaacaaaatctctgaaagcagctcaacctcttctgag

SEQ ID NO: 428757 - DNA, 708 bp, Homo Sapiens
  misc_feature (102)..(112): n is a, c, g, or t
  misc_feature (149)..(159): n is a, c, g, or t
  misc_feature (352)..(360): n is a, c, g, or t
  misc_feature (395)..(404): n is a, c, g, or t
  misc_feature (533)..(541): n is a, c, g, or t
tgtaaattttctggttatgtaatcagagcttaattggccatttatagttagttggttaagcttaaattttgttttccccaatgcaatttacaaaaatttacnnnnnnnnnnntatacgtttgaggatacacacttcacaagagactgannnnnnnnnnncccctgaattttttaaatgtgtcccaagtgcggtctcaagtctagccctcatcccccattcctccagcctaactcaggcttgaagtaaaatactaaatttccagttccttctgacaatcccaaatgccagcctcgtttccctagttcacattgtcatctatttgtcctttagtgtatattttcaatactgtannnnnnnnnacaaaccactggatggcacattttaaaagattcannnnnnnnnngtaaatatttcccatgagaagaaagcaaagaataacccctgacactgtgttgtgtaaaatctctgtgcctcttttccttttaccttccctaggcagagagatcttaccagaatgctttggggtaaaggnnnnnnnnnggcggggggaagctttattgggtgatgtgtcctcaaccaccctttagttttttcttggtcatcggtttcagtactgtctgtgaataaaccattatatcagccatggctatgtctgctagagtgtctagggaatctcaggtcctgggtcattttctttcataggacag

SEQ ID NO: 428758 - DNA, 759 bp, Homo Sapiens
  misc_feature (124)..(193): n is a, c, g, or t
aaagtgttaaaaatgggtatgtcctttgagtctagcagttctatcaccaaaacattttttaaggaaataatgagaaatatacaaagatctatgtatataaatgatgttcaacaaagtctcttannnnnnnnnnnnnnnnnnnnnnnnnnnnnnnnnnnnnnnnnnnnnnnnnnnnnnnnnnnnnnnnnnnnnntagtggccagctttacagcagctattaaaaaacatttggagttatggagaatatagtggcacctgcctgatatttaattgccctgcacaccttcctacctcctccacccccccaagaaaatcccgtgaaatcaataagtaaataaatccatgcattcagcattactaagagatagaaattgcaatgaccttcaaattaacagtaaatagagaaataagccaaattccagtggagctcccactgctctcagtctttgcagatatattgagtagggggcaggaaaagaaaaagagccaagagatacagaagacttagatgaaacacaaagtcaccccagaaagagagagcctaacactacatgccaaaacactgaacacaggtagggtttgctagttcacagcacttgccacagggaagggacttgaatgtaaacagggctagaaatggagccttggagaaaatcagatatacaaagaaggagtggatgggaatgatgagaaaaaggaaataagaggggaaaattaaggatcttgcggaaatgaaagaaaaacaagacaaccagcctc

SEQ ID NO: 428759 - DNA, 441 bp, Homo Sapiens
  misc_feature (89)..(118): n is a, c, g, or t
actaaagatcttaaatattccttggccacatcattcattatctgatgctatttataaaagcatagaacaatcagacaagaatacctatnnnnnnnnnnnnnnnnnnnnnnnnnnnnnncatagaacaagaagtttctaatctgcagaactgatgtggctatcacagggccagctgaagatcttaggagtgttagcaaacctagatgatggtttgtttaaccctgggtttggggtataccaattgcttactaagattaatatttcattctttacctttcaaccaaattaggctttctttgttttcatttgttgctacttgtgcctaggctcacattccctggtgggagatgcatagcgggagctttgcttagctactgatataaggaaatttatgaaatgaattgtactatgctgtttcgtgtggttatattttttcagttc

SEQ ID NO: 428760 - DNA, 661 bp, Homo Sapiens
  misc_feature (185)..(286): n is a, c, g, or t
cccagctgaaatggcagatatgacccaccttcccacccagctcccaaccttcctcctcaggaagagctgggctctctgactgtgttgtttcctcggcaccatccctgtttctaatacagcccttattgatttgaaaggtaggtggtgtgcttaaaagtctcctcccccactaactgtaagtcccnnnnnnnnnnnnnnnnnnnnnnnnnnnnnnnnnnnnnnnnnnnnnnnnnnnnnnnnnnnnnnnnnnnnnnnnnnnnnnnnnnnnnnnnnnnnnnnnnnnnnngagggagagagggaacgggagaaggagggatggaagtaggaatgaagggaggcagagaaccaatgtaaaaattttttttgaactctgaagcacactgagaaaaaggctctagaatgaaaagtaaattaagatgacttaaaaaataataccagagatgtttctataaatttaactagaatccaactgattactgtggtcactgggattctatcaagccataaatcaaactgaaagttcacctatgtctcaagggtggcaaccttccgaaagtaggagtggcttggcttcgttcttttaagttcatgtgttttcgatattttacatgtttggtggcttcgattacaagaatgcaagcctaaatctactttctgtata

SEQ ID NO: 428761 - DNA, 758 bp, Homo Sapiens
  misc_feature (704)..(704): n is a, c, g, or t
  misc_feature (733)..(733): n is a, c, g, or t
aaataggactcttagttcactaggatcgatatgaacagcaaacaagttaaagtacaaggagaaatgctactttttcagttctttccattcatttttatgctgtgagcatatcagtcatatatgtttgaagtgtgctgttttattccccttcctttgaaaaactcctaagggttctcgtgaaaggtcagaaccgggaacacctgcatcaggggagctgaggacctttttgaaaacaaagggtaaataatcagctctcttggggcctctactgggcagaactaccaaaggaagcagtgcagcccacaagggattcctagtgccattttcaggagctacgaaccctaagtagacctagaagtaactagggcagggaagcagtgacagaattgaggatgtgtacttgatcttctctcttgaaatcgtcatcagtcttgcaacctgtaagagaaagcaaatcagaaacactacaacaggaggctgaaggcagaagtgtcaccttgcttataggcatatgaaatatcaagtgtttccacgaggtgtgtgggggagcttgagcacagggcacgtgtgcaggtgagattaggcacctcaggagagggcagttatccagcatccattatcttaagtttagactgagtttccaccaccataagagttacttcactgtcaaacaccactcacatgttttactatagaacagaaantttgaaaagtatcagtatttttctgcttncaaacaaacattatggaaaggtaag

SEQ ID NO: 428762 - DNA, 302 bp, Homo Sapiens
cctggaggcattgggctcagggtacaaatagtaacccaaggaggcagagcaggtgttcagggacctgaacgggggccaaccaggggagagcaacgaggagaagactctcgctcccatctctgccttcagctctcaaaccacagcagggctcagagccccgcccggggggactcagctctcaccccactgtgagcagctgcaggaagatgctgcggaatcccggtgtggggccagggtctttgccgctgcctgtccccgcgccacctccctctttgctccctgtccctgtgccctgtccttgt

SEQ ID NO: 428763 - DNA, 475 bp, Homo Sapiens
  misc_feature (27)..(27): n is a, c, g, or t
  misc_feature (39)..(40): n is a, c, g, or t
  misc_feature (44)..(44): n is a, c, g, or t
  misc_feature (46)..(46): n is a, c, g, or t
  misc_feature (57)..(57): n is a, c, g, or t
  misc_feature (60)..(60): n is a, c, g, or t
  misc_feature (62)..(62): n is a, c, g, or t
  misc_feature (87)..(87): n is a, c, g, or t
  misc_feature (109)..(109): n is a, c, g, or t
  misc_feature (126)..(126): n is a, c, g, or t
  misc_feature (137)..(137): n is a, c, g, or t
  misc_feature (154)..(154): n is a, c, g, or t
  misc_feature (164)..(164): n is a, c, g, or t
  misc_feature (176)..(176): n is a, c, g, or t
  misc_feature (197)..(197): n is a, c, g, or t
  misc_feature (206)..(206): n is a, c, g, or t
  misc_feature (215)..(215): n is a, c, g, or t
  misc_feature (224)..(224): n is a, c, g, or t
  misc_feature (232)..(232): n is a, c, g, or t
  misc_feature (239)..(239): n is a, c, g, or t
  misc_feature (254)..(254): n is a, c, g, or t
  misc_feature (301)..(302): n is a, c, g, or t
  misc_feature (307)..(307): n is a, c, g, or t
  misc_feature (312)..(312): n is a, c, g, or t
  misc_feature (381)..(381): n is a, c, g, or t
  misc_feature (390)..(390): n is a, c, g, or t
  misc_feature (393)..(393): n is a, c, g, or t
  misc_feature (399)..(401): n is a, c, g, or t
  misc_feature (412)..(412): n is a, c, g, or t
  misc_feature (438)..(438): n is a, c, g, or t
  misc_feature (451)..(451): n is a, c, g, or t
aagtttttctaaaaaggttggttgccnacttgaaggtgnnaaantnttaatataggngananaatcagatgtatatttaaaatattnattcatttacatgttcctaaancacatatatacagaatngggattgtttnccacattcttaacattntacgggacanttttattccagnttttttacatacatctttganatcagtagntattgaagncacttttanatcatcancataatntcccatatattatantaattttcatgaataaattgtgatacagtgcttttttaaatttgcgnnagatngctgncactggaagtcacgtggaagttttatctcaagccatgcatactgatctacataacattaggatagtttntcttactgnttnatatgnnngatctttacantataactactcactctcctgcctcanagtattctttaanaagcatattattggctgggcgctg

SEQ ID NO: 428764 - DNA, 283 bp, Homo Sapiens
  misc_feature (59)..(59): n is a, c, g, or t
  misc_feature (64)..(64): n is a, c, g, or t
  misc_feature (94)..(94): n is a, c, g, or t
  misc_feature (99)..(99): n is a, c, g, or t
  misc_feature (119)..(119): n is a, c, g, or t
  misc_feature (134)..(134): n is a, c, g, or t
  misc_feature (186)..(186): n is a, c, g, or t
  misc_feature (224)..(224): n is a, c, g, or t
  misc_feature (261)..(261): n is a, c, g, or t
taaaaggggtctttgaatacacatactattttgaatagtcaatttgtacaattttatgnctgangggtaaataatttttaatggcccacccctnctaanggggaagtggttaggactgnataaataaaagacantgcttttggaaaaaattttcaataaatcagatggaagcactacctagtaagnctactttcaaatcaaatcataattaatgacaggtgccnattataatgccatacagatattttaatgctcacaagntatttttcgacggagatcaaca

SEQ ID NO: 428765 - DNA, 721 bp, Homo Sapiens
  misc_feature (272)..(281): n is a, c, g, or t
  misc_feature (647)..(647): n is a, c, g, or t
caggattaagtgaaaaaccgcaaaagctttctacaaaataaggtatcattaacaatgttatcctaacactgctttggagaacacaaggttttctctctcagacatctggcagaaagtgttccaagaaatatttgctagaaacaacatcacaatgtactactgactagatttaagcaacttttagtccagcaaaatcaggcctattttgtttcttaacctacacaggttacaattagcatgttgtttggtagggacttagtaaaagccctagnnnnnnnnnncaagaaaatagtcctctcaaggtggggaatattgaatacacttctctcacattgctccctcaactttcttcccaaaggggaagtagggctcagagagatgagacaaacatgccccaccccaaatagtgaagaggtctccgaagcatcctacaccatctgttaacgttcctgtttataagagcgaacgatatggacacacaccctttagggaggttattcaccacccacctgctttgcaagcgtttaagaactcacacaggggcgttacttacgaaaagaacgcttgttatgtgactaaaccaacaaccatcacagaaaccctttccatccactgcccccccaaatctcaacatttcatcttcctgnttcccttcctacgttacaagtgccaaggtaacaatgttttgaactaacgtcataccccccactttccgacaaag

SEQ ID NO: 428766 - DNA, 589 bp, Homo Sapiens
ctgcgcccggccaactttattcttaaataattaacctttggaattaaccaaccccaaacatgttgagccatctttagcttttcatctaggtaaccaaaataataagttcttcaagtctttttccaagtcatagaagcataaacttcactacagacccttagagattagttccaccacccatagaaatcttaaatacctagtgcttcttcactaaggagtcctccaacttacacttgactgtctccctcaaagcacattcccatctctccttgcagcattcacctattggaggccacgaagaataaatccaactctacataattcacccgcaaccatcttaaacattgaaagagaatttatactctttaatctgagataagaaaaagtctggctttggtatttcaactctcttaatttcacaaaatttttgttccaaatttgcaagatttgagaagtatccaaaattatatttcttaaaccagagctttatagaatagaattaattggtaaatttgcttccaataaacctaatctagtaatctatcacttctaaaatcactggcaaacttcatacaattacattaagctg

SEQ ID NO: 428767 - DNA, 605 bp, Homo Sapiens
  misc_feature (354)..(398): n is a, c, g, or t
  misc_feature (535)..(535): n is a, c, g, or t
  misc_feature (586)..(586): n is a, c, g, or t
aaccgtagtgtcctgctgtttgacagaggtttagtagtgtttctatcaggattccttatataagaaaaccttttttcttacattgtgtccaaggtggttttttcctcaatggacttcaggggattcttttcctactacttctttaggtatattttttcccttgctgttttcatcacttcattctgcaggccaaatctttaccaaatattcatgtcactgaaatctttctggcaaatctgctaaaatgaatcatttattttcctttgcaaaaatctgttaaaaagaaagcagtattcctgaaaagaggtttgaggaggttcaatttttccatcacttcaccataatacatgcagnnnnnnnnnnnnnnnnnnnnnnnnnnnnnnnnnnnnnnnnnnnnnacttctatgtgtacatgcatgaaactaaaggcacaccatagcgattgtcacagtcctcattcttgagtctctcttgtgactttggtaagatcaaaggagaaattcagccctgaaactgtagagacatcacacaattnggggcatttgtcctgatttatttattgtccattatatgtgttataattacnggggaggaaaaaaataatg

SEQ ID NO: 428768 - DNA, 663 bp, Homo Sapiens
  misc_feature (116)..(133): n is a, c, g, or t
  misc_feature (148)..(262): n is a, c, g, or t
  misc_feature (295)..(303): n is a, c, g, or t
  misc_feature (316)..(428): n is a, c, g, or t
ttaagtgaaactccattttctgtttggtgtaaataaatgtttccattgattgctattgaaaggtggcactgtccttccatagtagtgggttagtgaaagaaattaatactcttgannnnnnnnnnnnnnnnnnatgagagaggatctnnnnnnnnnnnnnnnnnnnnnnnnnnnnnnnnnnnnnnnnnnnnnnnnnnnnnnnnnnnnnnnnnnnnnnnnnnnnnnnnnnnnnnnnnnnnnnnnnnnnnnnnnnnnnnnnnnnatgtgacaataccgcttggctaattaaaaacannnnnnnnnagccaggattttnnnnnnnnnnnnnnnnnnnnnnnnnnnnnnnnnnnnnnnnnnnnnnnnnnnnnnnnnnnnnnnnnnnnnnnnnnnnnnnnnnnnnnnnnnnnnnnnnnnnnnnnnnnnnnnnnccctcttgatttttctgattagcagtttcaggtggtgatggctacctaactagtatagcattatagaatttatcatttctgagtaccttttttattcttagactttcatgtgtagcaattttatgtttaacttttcattgactatgtttgtaaaagtaaaatttctctaatttgctagaatttacttgtggggaaggagaggttggagtggaacatagcataacccatatataag

SEQ ID NO: 428769 - DNA, 693 bp, Homo Sapiens
  misc_feature (433)..(457): n is a, c, g, or t
  misc_feature (640)..(640): n is a, c, g, or t
aaattctattactgtttaattgagctactatctagttttaagttgttattttcctaccaagtacaatcattatgctaaattgatggctggtgcatttggaacatgaaatgcatttcaaattaatatattccctagagttaaggaagcatattagtctctcttctggagagagagctcggggaactgttttcttaaccttcaaatatactaatttaaaagatggattttgttttttattgcatctaagcactatcatcagacaacaattagaaattccattctctccaacatatcaagacaaccactctatcacttttcttttctacctactccccttcctcatccaagaacttttcctctctgaccatatgacagcttttaatgcaatctgtacaggtattatgttattgcttattctgtttactttcagaannnnnnnnnnnnnnnnnnnnnnnnnccattctgttcatactaattgctgaggccaagtcacatgatatttcaggagaccttgtttcccagatgtctcttactctggagaaaacacatatatctctaataaatgctgtgacaatgaggaactggatagctccacaaaatatagggaaatacgttactgggtttcagcttctttgaaagntaatatattacacatagaacaggaaaaaattggtcccattacatattttggtt

SEQ ID NO: 428770 - DNA, 427 bp, Homo Sapiens
  misc_feature (331)..(331): n is a, c, g, or t
  misc_feature (407)..(407): n is a, c, g, or t
ttgttttgctttactttggagacaagagttttccttcaaaattgggtttatgtttatagttatcacccaaggactgtaaacttttccaaacattacaattgtttgctatagaacactgcatctgtcattagcatgtttctcggataaaactgtgcttctttacttgaagttataaactatgtttgtcacaggtcaaattttctcactgaccttgagataatgaacattttgaccatgaccactgatctcgttataatgaactgaagcagtatataagtgatgtgaattctgttgctaacttagggaggaaaaatctctttagatctttccntcctacaagggtttatcagttttttaaaggttaattttccaataggaaattttaattcccaaacccataccaaaantgggatccttaaagggccaa

SEQ ID NO: 428771 - DNA, 486 bp, Homo Sapiens
ttctttctagagatagggtctcattctgttgcccaggctgaagtgtaatgacgcatcacagctcactgcagtctcaaactcctgggctcaagcgatcatcctgtttcagcttcctgggtagctggaaccacaggcacgcaccaccacacctggcggggtttttgtttttgtagagatggggtctcactacgctgcccagggtggtctctgatctttcaagtgctcagtagctgcaatgaggcgattgaacctggcctcctatctggtctccctgtctccaatctctagtttttgataaattgacaagtctgaggatgtgctgctgccttgagaagggggtgctctctctcaagaaagtcagatggcagagcagcaatagttgtcaaggcagaagggccacaatcctggtgaccctctcagtgggggggctgtcctggcctggtggtttctgaagcccccactaaggatcccccattccctcggtta

SEQ ID NO: 428772 - DNA, 272 bp, Homo Sapiens
tcagattttcgaaggggtctatgaacttttagggcaatcttttgacagttggtaaaactgagacctcaggtgggagatggacttgtcccagtatacacaaggagtgacagaactaggttcagaccccagatcacctgaccccaatcccactgctctttaactacatcacactgagctaactcatccctgcaacatgcaccaagagtcttccaggattaaactgctgggtataacatgcacagctcatagggtttggggatgggcttgggaaa

SEQ ID NO: 428773 - DNA, 353 bp, Homo Sapiens
  misc_feature (302)..(302): n is a, c, g, or t
  misc_feature (307)..(307): n is a, c, g, or t
cttctataaattggaaggaaaaagtctttggtgacactctctataaaacaatctatcttggatggcgaaacccagacataaagttacacaggtcagtgaagtaaatcaatatctatggctttgtattttctcacacgcgctctctcacacatacttgagggcttaattacgctaagtcattaatactctataacaaatgggaaaaacacttcagaaaagacctgtggtgacacctacaaaaacattggcaacatattagaaaactctggccccaagtggtacatccgtataccaaataaggnatacntttggtttttggcggtaccaatttggcccacctaaaaataagttcc

SEQ ID NO: 428774 - DNA, 452 bp, Homo Sapiens
  misc_feature (434)..(434): n is a, c, g, or t
tgcataaagtattgctgccttcattagagtatgtgaatgtagaattttttacatggggaataatttgaaatagtctttttaaaaactggaatcatagatctttatacctaattgatctcagaagtaagataatgttaactgatgaaatgtttatggctgtgtctgtatgaattgaaaaagaaatacacacctctgccctttccttaaaaatgtatctcaaatttcttaaactagaaaatacatttagagcaggcatttacagttcggttcttttcagctgttgaattgatgaaacatttcatctatcaaagcaggtctatttaaaatgcatattgtgaattgggaaacaatttgacagcagttggattacatagccgtttttttctcttttgagcaataacctctatcagtaaggaaaaatattaatggacacnggagggcagaaacctagc

SEQ ID NO: 428775 - DNA, 485 bp, Homo Sapiens
  misc_feature (419)..(419): n is a, c, g, or t
  misc_feature (445)..(445): n is a, c, g, or t
cccccagcattttcactggtatcattcgggtatagactcagtcagtagggtacctagcagtctgagcttgaaaacttgagaattaatttcaacacacctttgactattccctaatgttctccacttaaatgtgtcatagtgaagccaagggtaactagtgttttgtgatgaagaactgtcctttcctgtacccacctgcaaacttgagtatacatgttgggtgctgagtgctagagagagagaaatgatttacccctctttagagataccccatattgatgagagtgatgtgcttgggcatggcttggagaaccagtggggtgtttggaatgatggcttttgtccatttcaacattggaaccctgatcctatattataataagaaaggtagacacatgggcagaatcaagtataaattngcttatccataatgtttgtaagttcnttgagatataaaaaagcctcccaattgtcctatagaactg

SEQ ID NO: 428776 - DNA, 490 bp, Homo Sapiens
agggtagcaaattcaaaatattttaaaatgctacaccacttaccatttaatcattaataatacactatgttaataaaaatgatatatcttcatgtgacaattacagttgcaaatcaatacagaggtgttgtcttggtgactcaaatatcacaaaatgttgttgccttgggtgggtataatattccaaaattgggaataaattttggtaagtttataaaccaaataaagtataatctttcctcaatttacatcatagttgcatccctcaaacatttagtacaaattaaaacattgtaaaaactacatctttttgtacaagttaaattctgtgttctcataattataaactgaacttgtacttctgtggatttcttgggaatgctcagagtgacctagaactcaaagaaattttttggttatttgagactaccccatgcaatacagtttatctagccccttagttctgactaaatgtcctttctgttcctcc

SEQ ID NO: 428777 - DNA, 407 bp, Homo Sapiens
  misc_feature (96)..(96): n is a, c, g, or t
  misc_feature (174)..(188): n is a, c, g, or t
  misc_feature (387)..(387): n is a, c, g, or t
  misc_feature (395)..(395): n is a, c, g, or t
aggattaaggcacaaatgtctcttttcttttaaaaaggcagtaaaataaacagattgtagttagatcataataacatctaaattttgacctaattngagggggagatggggaaaaaattaaactctttaaaagaagattaaggtaaagttctaactttatccttgattctgaannnnnnnnnnnnnnnggaaatattgcatacattttatactgcaagttacaatgtgaagggcctttgaagcactctaaagagacttagctgctttgttttgagcaattaaggtttgttattgagtgaattaagcagctctgctgtggctcatctgtaaatagtggtcttcagcgagtttcttgatccgcttttcccaggaacagaagccaagtcnggcttccntaggagctgctc

SEQ ID NO: 428778 - DNA, 199 bp, Homo Sapiens
  misc_feature (160)..(160): n is a, c, g, or t
  misc_feature (169)..(169): n is a, c, g, or t
  misc_feature (180)..(180): n is a, c, g, or t
aatactacctgttaccggttccttctccacacgcaggtacttcactcttgctgctctgcagagaatgagttggaggagcagaagccagatgctcccctaaaacagctttctgtgtttccctggtcctgagagttttgtaggaaaacaattctggcagcancacggagancaggctggggntctctgagactctccctgg

SEQ ID NO: 428779 - DNA, 482 bp, Homo Sapiens
  misc_feature (282)..(394): n is a, c, g, or t
ttaaatgttttaatggaaaatgtctatgtttaaggtatacagtgtgatgtcttgatacacacatagataatggcctgattatcacagtcaagctaatgaacatatccgtctcttttcatagttacctttctgtgtatggtgagaactactctcttagcaaatttcaagtatacagtgcagtcttatgaactacagtctccttgctgtgcattactctagagcttgttcattctccatagctgaaactctatacgctttggccaacatctcccgttattcatnnnnnnnnnnnnnnnnnnnnnnnnnnnnnnnnnnnnnnnnnnnnnnnnnnnnnnnnnnnnnnnnnnnnnnnnnnnnnnnnnnnnnnnnnnnnnnnnnnnnnnnnnnnnnnnnntccattgggagttgagaggttgagctggcagatgaggaacctgaggcctggggaaggcacccagcaagccagacgcagagctggcctt

SEQ ID NO: 428780 - DNA, 442 bp, Homo Sapiens
acgtaaagaaagcaaatcaatttatttagaattccactagtaaattattctctttgtgtgcagtctgtaaaaatataaacttacatttaagtacttccttgctagtttgagaatcatctttttctaatgggaatgacaggcatatattttgatattcacagaaagaacaaatccaacagtagtaataacttgttttaaaaataagtattcaattatttcattttaacttatagaattgtatttctttccactaaaaaataagcatgttaggctttttgtggattgtgttgccttactcaaacttttctggagccagtgaatgaacatattttatactcagttgagagatttctatcagtatacttaaaggcagcagggtgcataattaggtatgcctgccatctggcatagccctcccaggtggcaaaagggcattagcttt

SEQ ID NO: 428781 - DNA, 279 bp, Homo Sapiens
  misc_feature (68)..(181): n is a, c, g, or t
aaattgagagtattgtatctttatttgtaaaattgtgtgcagtgtatcttttatttcaatatttaaannnnnnnnnnnnnnnnnnnnnnnnnnnnnnnnnnnnnnnnnnnnnnnnnnnnnnnnnnnnnnnnnnnnnnnnnnnnnnnnnnnnnnnnnnnnnnnnnnnnnnnnnnnnnnnnnnttttccctggagaggtgagtgttgagtatctaccagctcgcaactgctctagtacatatgaaaatgaaggcatgccctcaaagctgcatgttgagtgc

SEQ ID NO: 428782 - DNA, 450 bp, Homo Sapiens
  misc_feature (380)..(380): n is a, c, g, or t
  misc_feature (410)..(410): n is a, c, g, or t
  misc_feature (425)..(425): n is a, c, g, or t
ctttgttactcaatttatttgttgacataccatgagccacattgtttattgatgtacaaaaatcatttaatcttagtgcattagttatacaacatagtacagcacagctgcagctagctgtcagctttccaaattttccagttggttccggcacagttgttcttcctccttctataatcagaattgtctgagaatgcttgttttggagggaacttgaagggaaaaggaaccagaaccttaagaagtgagatccattgggagctcaagaattatcagactttccaggaaaatgcatggggtgggggggcagtgacacgggtgtggagacatgaagaggaacggtcaggagcaaaggataggcaataggccagaaaaaaatnttagccaaaaaaatatcctgcagagatgtnaaaagggaactttcnaataaagggcttactctataaaccc

SEQ ID NO: 428783 - DNA, 429 bp, Homo Sapiens
  misc_feature (383)..(383): n is a, c, g, or t
aacagaagttgaaaggcgtttaagatcttatatacatccttattacaaaagcaatgcaaatataaacactaaggatcacaaaaactaacctgactataaagtaaactgcccgcctacaaattatccaataggaaatacatgaatttgaatttctgaattaagcacagtaacaaaatacacttttatttatcattaccttgcaaattagctaggctgtataaaggctcatgcgtcccacaaaaaagtactatttagatgttctttcctatctctcattctaaaacatttacccagttgttacataggattcttgttacataatggttttcttcccaaaagtttcatatctcaatcagactaccagagacattggtttaaaaaanatcactcagcttagtatcagaagaaccaaatactaataacctagga

SEQ ID NO: 428784 - DNA, 425 bp, Homo Sapiens
accatgccaaaagatttattaatccttctacataggcaatcaatgcatgcatattcttttctttacaaagacaaaagccatttaatcctccttataatttagtttaattctgtttcaaatgtttgaccttgatggcctgcagtgctctatctcttttatgtattttacatattgttataactgacaattaatataaagtccctttcacttagggatacgatctccttgtttcggttttgtagccagtcccccaaattttgcatgaggacaaattcacgattcttatgagtgtgtctttgaatcccttacgtcaaggtttggtgccatgaaggatgaagctgctgagccctgaagtcgtggggctaagggtacacggacaattaagcaacttaagtgactaagcccgtgtctgattcccctgcagg

SEQ ID NO: 428785 - DNA, 409 bp, Homo Sapiens
  misc_feature (177)..(177): n is a, c, g, or t
ggaattaggacaacctcttcattccgtggggttgattctaagatttcagcctcgcttcagtcctgctctaaggtcgacaccacgcttgcttgatagttgaccgtgccttagttttcccgtcagtcaagtgggaagagcagcccatttcctgccgctccccgggccctgtcccgcctnggacgcctccctccaggagcctgcgccccggccccggggtcaagggttgggatgcgggctctgcaggcgccccggcgaacaagctctacctggaggctgtccctgccccgcttaagtccaagggccttggtgtgggggcctccgctgtcaaggcgggggaaccggttctctcggtttctctcccctttccccagcggctttcaacgcagacgtgagcccgagccgtgtacta

SEQ ID NO: 428786 - DNA, 283 bp, Homo Sapiens
agaaaattacttttatgtacacaaccatgaattctgatttttatggaagaatgacaaatagttgcaaatatttaaaaaacaacacaaaatttcaaccacattccattccattctcgcagaaacaccagttgcctcagctctgcgatttgtatcactttggtgcaaaagtgtgagaaacaatgttgtaatttttaccgtgtttccatccaagcctccacatgctgtcagaatgttgcatttttaagagagaagtttggaaggggtgatcagattgcatatgcca

SEQ ID NO: 428787 - DNA, 459 bp, Homo Sapiens
  misc_feature (449)..(449): n is a, c, g, or t
gtcagtcagataacatttattgttataaatgaagctaacatttattgttataaatgaagctaacatttaacaaatatttactagtgtgtgaccctcagctaagtgcttcacatgggttatcctgtttcaaccttataattacccaatgaaatactactattactgttattttagagttgagaaaaacgaggcagtactatctatcaattttgaaatgggcatttgttacactgtaatggctgatatacctccactctgcccaacatgaacttggatttaagtactgctttatatgtctaaaagcaccttttaattttacttggatatataaataaacccttccctgaaatacttaactatacctcctcctccattaaactctcttttggctttttttactggacactatcttcaccttctttttcctttttactctgaccattcctttncttgactgag

SEQ ID NO: 428788 - DNA, 456 bp, Homo Sapiens
gtacagcacactgttgcattattccatcttctaacttcatgatggtgacatttctgacccagcagctgaattcatgtccttttccaaatcctgccaatgtcttagaaacagtgaactgagcaatttcagagtgaaccccgcccttacaaagcacataaagaataccaagaagcttggtatcaagcctatgaaatacaaaataaatgtgaaaaataaatgctggccagctcaacatttgaatttagtttttgcaaatgcaaaatttcctctaaaaatttatgattagtacctggtaaactatttcatcaaatagaaaagcaggagacttacaaacatttctcacacttctaacagtaacaatttcctacttatcattgataatatgtcaaaagctaaggaaatccagaatgacatggaccatgtagaaccataaggttggaataatttcccttaggg

SEQ ID NO: 428789 - DNA, 384 bp, Homo Sapiens
  misc_feature (295)..(295): n is a, c, g, or t
aagtccccaaaccctcacacttttttttactcaagctatttatgtagcacaattcatccgatttttaaaaaatatattatgaaacatttgttatgcagaaaagtatggataacataacaaagacctttgaactcaccattcagtataagaaataaaacatgacccatccagttgaagtcccctctatacctaccccatccccagataactacttttttaaatttgatatcattcccatgctcttcttattttactatggttttgttttgcatgttttaaaacttcatattaaatnataatacatattatatgcattcatctgtcgttttctttttccccttgactttgtaatcatgagattcatctatgtggttatatatacac

SEQ ID NO: 428790 - DNA, 422 bp, Homo Sapiens
agcagatacatcttaagctttattagatatttcttattttcttcatcagtgtagatataaagcaggctgtctattaaaaaaaggcttaggagtttggttctttgattaagaaaaataatcatggtctgttagtctatttattaccaagagaagaagaatttgctatatggcaatgttaaggattgcggccccacctggagaccttcctaagggtctctcttaacaggtcccatctgttcaggtcacttccaatttgctttgcctaaagtgctcacagaaagactgacagaaatacctgacttcacagtgccgcctttaaatgaaaccccattcccctacattcatggttttgggtccctgggtggggtcagaagataaatctcctagatgggaaccacaacattttaaagaagaggttactc

SEQ ID NO: 428791 - DNA, 436 bp, Homo Sapiens
  misc_feature (416)..(416): n is a, c, g, or t
gtcaatcaatcagtaaatatttattattttctgtaactaaagtactgggctgtggtaggggagacaacaatcaaagacatagccttgtcttccagaagctcacaatctagttgggaattcaagaataccccttagaaaagttcattgacaatttacgaggtgctattagacagtaggagagaaaggcatacataccagggcccagggaagaagagctttgtgaatgaagaaggaaaaagtgtaagttgactttcaaaagtctctggaaacactggactttagctggtccaggaaatatagggaagaattggataggcaggaataaatggagaaagtgttcctacaggaaaagacatgtggaaaaggggagaggtaggcaagatcaaggagtgtttagaaggcaagactgagtatcnagaaagtgaatttctaagcc

SEQ ID NO: 428792 - DNA, 158 bp, Homo Sapiens
  misc_feature (86)..(86): n is a, c, g, or t
atgagcactgcgcccggctggaaaggttcttttaagagttccacaaagtggccaaaagtttattcttgcattttatcatgcgtatncttggagttatgtttttggaatatgacttaagaaaacaaactttccaggtaacacgtagccggttcccatct

SEQ ID NO: 428793 - DNA, 465 bp, Homo Sapiens
tggcttatgattttaccaccttcattttttattaggtcatcagaaggcccattatcctgaaccttcccacacatgttaagtgtttatttgggaattatggcaatatctttctgatgtttaaatcacagattagtaaaaggaactaaattccagatggcactgctgtagcccatgggaatttgtgagagttagaatttactagcattaaggaaacactcaagaaagcactgatagactgttaaatatagttatgagaactttggtcaaatctagtaatgatctttagaaaagaacatactgataaaggcctgcttatttcttccttctgtcctatgcatacacaaacaccaaaatgcctctggaatgcagaaatctgctggcagttgcagcttgcaggtgctgaattaaacgctcccttcccatcccactcaacaatcagggcagtaatggttttatggaagttta

SEQ ID NO: 428794 - DNA, 484 bp, Homo Sapiens
  misc_feature (66)..(95): n is a, c, g, or t
  misc_feature (330)..(330): n is a, c, g, or t
  misc_feature (437)..(437): n is a, c, g, or t
tcctaatcttaaacattctttattgaaatctaaccacaatatgataggattctgcaactagcactnnnnnnnnnnnnnnnnnnnnnnnnnnnnnncctgtcatttttgaagattatttgtagtatccaaaggctcaaatgatgcttgtctataatctcctgctttccatgttaaccctgctagctacttctttccttcccccacatataactcctaaaaagaaatgtagtcactgagatcataattcacggcttatcaaaggttctttaagtttaagaataaagtatgttttaccctcaaagagaatattgtaagagcatatgagccatngggttaaaattctaaattatttatccaagtatgtatatgtttgttacaagctgctaaaaatctttccttatttttgcaaatctgataggtaaactattatcagttcnacattccatatttataaggatatacatacacattctgataccaaacg

SEQ ID NO: 428795 - DNA, 466 bp, Homo Sapiens
  misc_feature (97)..(178): n is a, c, g, or t
cttgctgatttatttgtatattccgcatatcagtcctttgttgggttcataatttgcaaatattttctcccattctacaggttgtctattctgatgnnnnnnnnnnnnnnnnnnnnnnnnnnnnnnnnnnnnnnnnnnnnnnnnnnnnnnnnnnnnnnnnnnnnnnnnnnnnnnnnnngagtctttatcataaattctttacctagatcaatgtccagaagagtttttcttaggttttcttctagaatttttatagtttcaggtcttggatttaaatctttaatccattttgagttaacttttgtaatatagtgagagaaagggatccagtttcattcttctacatgtggctatccaattttcccagcgccatttatcaaatagggtgtctatttcccaatttatgtttttgtattctttgtcgaagatcagttagttttaagtgtctgtctttatttagaggttc

SEQ ID NO: 428796 - DNA, 258 bp, Homo Sapiens
  misc_feature (94)..(94): n is a, c, g, or t
  misc_feature (207)..(207): n is a, c, g, or t
  misc_feature (215)..(215): n is a, c, g, or t
aacggctggcgctattgtttatttcttcatgtttccaaaagttaggtttatactccacccctacagttacagaaataaacacaacattaactgnactccactagaccgttagaaatcaaaacaagactagttagcaaatacagagatcctagcgacaccttgtccctgaaaccacccatcccaaagccacccgcagtgtcctaaccncatggagngaacatgcgaccaggcgaatgagccaatggacagaagccatgg

SEQ ID NO: 428797 - DNA, 453 bp, Homo Sapiens
  misc_feature (335)..(335): n is a, c, g, or t
  misc_feature (442)..(442): n is a, c, g, or t
ccttctggtctagctatttgctaatttgatgttctaacaatgactcagtatctgagagaactgcccggagagggtaattcagttctcttattatactgggtgcattttaaagaaacatttcttacatgcaagaaccacactacccatatccttgagggatttagagatagaaaagcaccatttccaactagcaaaagactctcagaagtaaataatctgtgttccaccagaactcatatatagggagggaagcttttagttatctccaagcactggagaagtgaattaaaaccatcaggctgattcctgaaacaaaaattcattcattcaaaaanagatggtagaatcagccaggtaaagtatgaaaggctggggggctggagatcagaaagggcaacacctggcatcattcaccatccacatgggcaaaggcatgaggacnaagtcataagc

SEQ ID NO: 428798 - DNA, 457 bp, Homo Sapiens
taaacttatttatagagcagaataatcggcccccctgctagtttggcatttgctcaagtttctgtccatgcaaatcaaatctgttactggaaatttttctcaaaatataaaggcacatcatccacaagataaaaagatatactgctgatattataaagcacagggcaggtggataatgttttcaggacaaatatgtgataaggattcccaggaggtgaagtggcagggtagagggtgcacactgtttaaacagaagtgagttgctctcatcataatcttgtgacaacttttctttctaaccaaacatcagctgcttaacatcgctttagagttacttggacaataatactaaggttagacttgggaagtaagagggaggggatcacatgaaaggaaattacttcaacccttagtgttcctaagggtagatcaaaaggtggttaaacaatctatgacc

SEQ ID NO: 428799 - DNA, 439 bp, Homo Sapiens
  misc_feature (130)..(189): n is a, c, g, or t
  misc_feature (357)..(357): n is a, c, g, or t
  misc_feature (379)..(379): n is a, c, g, or t
  misc_feature (415)..(415): n is a, c, g, or t
  misc_feature (427)..(427): n is a, c, g, or t
catgtaatttaatatttttatttaaaaatcaccaaaatcagaataattttatcttaattaacataatcatcagaagttaactaatttttactttataatactacgtttaaaaatctttatatttttaatnnnnnnnnnnnnnnnnnnnnnnnnnnnnnnnnnnnnnnnnnnnnnnnnnnnnnnnnnnnntgcaattgttcctatggatgtggtttttcaatagaattaagtacttttaaaaagtttcaatctcaatgatatatatgtttgatttttctttgacaaagcatacatatattgataggtaataatatgtaaatcttctaaagacattacaggaacatgaaaatgtaattnaatactcactaatttgtaatgntttatgtaagcggaacacatttaactgaaaattgcntttatataatanacgagactagaa

SEQ ID NO: 428800 - DNA, 126 bp, Homo Sapiens
atgagccatgggcacctggccagagcaattttcaaaaagagctaagttagaggacttaaattaccaggttttaagccttattataaagctataatatacagacatgtgctattgtcaaaaagacag

SEQ ID NO: 428801 - DNA, 204 bp, Homo Sapiens
gatttagagggaggcagcttgattaaatttaaatcaagacaagaaaaactgttactggcagtagaaaataaaaggtaggctaacatctaatatatcagtatttatgtatataaataaaattagtttgttccagactatctggcttagaagtattctttctcaactcatgctgcaagttttcttccactttagaataggaacata

SEQ ID NO: 428802 - DNA, 262 bp, Homo Sapiens
ctcgcatcccgggtaggaataggaaaggcaaagagtatgttgaaaacatctctcactcttttctggcccacgtgggtgatttcagtcactcagccgtttcccaagacatgggaggtccctggtttgcctaggatgcaatgagggagatttaagctcagccctgataaacagcaaagccaaataaaagcaaaaccacccatcatttgttgaatccttaatttgacacaagccctacactaaacacttttaagtgcgttacttt

SEQ ID NO: 428803 - DNA, 132 bp, Homo Sapiens
tgaaccactatgccacagttgagtttagaatgtttatttaaaatcttgtgacactgaactcaatgactagttctcggaaaacttactttttaatagtgtattgtggtgtaaggcctgaaaattaggattcat

SEQ ID NO: 428804 - DNA, 286 bp, Homo Sapiens
cacaaagccgattttctatagcagatacctaaaggccagtgccactgctagcagcctgcctagttcagtgatggagttagacgcataccctttctagtcttctgggaggagcacccccatgtccacagctgctgtcacacctcaaagtgaccagggacttcggatgccattggaccctagacaagccagggccactctgagccctccctatctatcacaggaagggttagactgaggttcctaaccctgtgtaagggtaaaaagctgtgaggcccctagagtgggt

SEQ ID NO: 428805 - DNA, 349 bp, Homo Sapiens
  misc_feature (25)..(25): n is a, c, g, or t
ctcaagatctcagagctcgtgagangcagccagcatgtggatccaaacttgtgctttaaccactcagttatcttccttccatctttcatcaaatactggggcttcaagttaatcctctggtaatttcaaaagttttaatctaaataaataaccttgttcatgatgtctgtatgtcttcctactgttttgcctgaaatgacgtgttctagaggttgcttgatctatgacatctgcaggctaaaaaaagtccagaatctaccagggtgtacaatagccttgtcctttgaacctctggactgtcgtgatgtcctgggctctacagctccagggagcgtaaactagtggcact

SEQ ID NO: 428806 - DNA, 218 bp, Homo Sapiens
  misc_feature (47)..(48): n is a, c, g, or t
acctacatcctctattcattatttctaaatggggaactactgttatnngaggtagggtaattatttgtgctacactcttggcagcttccaagatggtttgcattcctggcctttggattctaaatgccagtaacacctcagtcatactgacaaacaaaatgcctctgtacatttccaaatgtgagcagctgtcagcagggggcttaagctaggtgcag

SEQ ID NO: 428807 - DNA, 259 bp, Homo Sapiens
  misc_feature (29)..(30): n is a, c, g, or t
  misc_feature (51)..(51): n is a, c, g, or t
  misc_feature (210)..(211): n is a, c, g, or t
  misc_feature (216)..(216): n is a, c, g, or t
  misc_feature (218)..(218): n is a, c, g, or t
  misc_feature (220)..(220): n is a, c, g, or t
aggccatggttcaaagcatgttgtccttnngggggacatccttttgtatancctccatggtggaggggagagtgttttgtaagccataaagctctgagctaacaggtgatcttaataatattatctttttggggtggctttgactcttggagattgttaaggtcatctaagccacttgtgttggattaagttcacgtgaagctcggcagnntcaantngngttttgggtcgagttgctggtctccggttcccaggctag

SEQ ID NO: 428808 - DNA, 259 bp, Homo Sapiens
tctctgaggggctcacagaacctttagcttctctttcttcatccccttccacactcattgttgaagggagaggatggggcagggagggtccttctgggagcccagctctttttctctcactctaaatttcacctgtgtctatccttgcctgccctggagctgtaattcagacccactacttttcttgttcacttttctcacctgcatggcacacaaagacagacagaaccatccatagacacctgagcacacaactagg

SEQ ID NO: 428809 - DNA, 200 bp, Homo Sapiens
acattttagaacactgaataaatgcatcaactggagtcaaaatatcctatactcaattcttatcttcctttactgactgtgtcccgttagctgataatggaatgggggattggaatccttatgtatgtactatacataagctaacttttgttctgctgggtataaataacagccaaagattctgcttcatagacctgtta

SEQ ID NO: 428810 - DNA, 299 bp, Homo Sapiens
  misc_feature (284)..(284): n is a, c, g, or t
gcaaagtcatattgcactgggcatgagtccagggaaggcattggctggggcatcagtgcaatctgtctacctcaccaggattcaaaggactcctgtttgactctaaaacccatactcttgtttccatactgtactaactataaacactcacacagccaaccttggtcactctcacacacttccccagtgcctattcgctgctctagtcagactcaccatgaggtgaacaaaacataattgtttccaactccaagcctttgacctattaaagaatcaatttttgnattgggtttgggaat

SEQ ID NO: 428811 - DNA, 313 bp, Homo Sapiens
  misc_feature (285)..(285): n is a, c, g, or t
  misc_feature (300)..(300): n is a, c, g, or t
gtctagttaaaaataattcaacttatcgtggaaatgctataaattgctgtgaagtgagttgctggctatggcttgtcagagcaaatatattgtacaaatcttaggggagaattagtgcttatgcattcaaatcaaatcatcttgcagcacactgagaaaaaggttagatttttaagataatttcaaagtcatgaaaagagcaaatatgctccacaaagagcctagcaaccctcaatgacccaattccccttttatatagtttggtatctgaattagaatcccagnatctacaaatcctcngggttgtgggtgc

SEQ ID NO: 428812 - DNA, 375 bp, Homo Sapiens
  misc_feature (268)..(268): n is a, c, g, or t
  misc_feature (275)..(275): n is a, c, g, or t
  misc_feature (331)..(331): n is a, c, g, or t
  misc_feature (360)..(360): n is a, c, g, or t
ctttattggccagtggtgcaaagaaatagtaaaaattcaataaaaatattgcttgaaccaggaagcctcctcatagagttgtggactcctcagagaggttttaccaaagtaagggcagaatgtgtataccgtctttcagggattcaagaaatgtaggcaacaatgtctattattagccctcctctctttccatgagcaaaacccaaattacttgtttttaattggcacaaaagcacatttcaatcattacattatcagacattggttncatggtncctatcatatggccaggctgttgtggctaagaagctggggggatcttgaagaatgnaattaaaaatggtacccctggccacaatncagggatttggcaac

SEQ ID NO: 428813 - DNA, 590 bp, Homo Sapiens
  misc_feature (488)..(488): n is a, c, g, or t
  misc_feature (551)..(551): n is a, c, g, or t
  misc_feature (562)..(562): n is a, c, g, or t
tgcctggtgttaaattttttaatcacctggatgtgcctgcagtctatttcctgtactgtttattttaatcaagatgtgggaactctaagaatgaatccttgtgtccttggggcagttccctcataatctccctccctcacttcagcaatctggagagatgctcgctcccttgagttacaccgcactggtggaccagagatactggtgacagggtggtcgaggttaccagaacagaggctcacagactcagtgggaattttccaaacagctagggacagactggtcattgttgcaaggcgggaaaggggttaggacagtggcagagaatccttaaggtcacaaggaggtggagcatagaaaggagcccgggaaacctcagttcaacaattttggggatttaagagccaagatgaggagccagttaaatgatttcccagccaattggagcagctgctcttctagtttctggccagtgcatttatctctgntctccaaactggtaaagttgaaggctatgagactcagctgtgatgagtgaggcctttcatgtnggtttaagggnccccattgtccagctgcctggaacctac

SEQ ID NO: 428814 - DNA, 305 bp, Homo Sapiens
atgttaatcaaaccaacattaacttatcattctatagctaccatattagcactaaaagtgatccatttaataactaatcatttattcactgttttgttaattataaactgaaacaaatcttttatatagcattatggagatatgtttcaaaagccatgaaaatattttatccaatggctcaataataagtaaataattcagaaaaaacatatacatggattttgttcaccaaatactttgtacttttttcattcttgctaaagcaaaacattgaagactctgatcaccaaattaatctcacattt

SEQ ID NO: 428815 - DNA, 676 bp, Homo Sapiens
  misc_feature (442)..(442): n is a, c, g, or t
  misc_feature (621)..(621): n is a, c, g, or t
  misc_feature (646)..(646): n is a, c, g, or t
tgtctttccacaatgtcaggcttttattgaaggtatttcaatcacaaaagccatgagctacatggagttcccaagaaggcaattctccatcacacttcccatgcactagggagtcacgggcacatagtcctgagcacacaggctcaagtcaccccacaagccagtcagtattgcacaccatacatcatagtatacttaatcaatatatgaattttataggctaaacattctacaacaaacaaagtaacatttaacatcaaagggcaaaacagatagaagaaaaagtgaacaaaccagtccaggggtagctaaaggagcccttgtctaggcgaggtggtccactggttctgcaatgcagagtatttgatgctgcagagcctttggaagcagatgcccagctcttatcacaagtgactgcaagatgggtgtcagttaggatggncaattccaggctgctgaagggctaatcttttctagtcagagtcctcctaagatgtagaaagcatttcagaaagtgctgtgtaagtggtgattaagcatagctgggattctatcttgcgtcaaaggttctgggaatgaaggcccttggataatcatgtctcagcttcatcagccttttcngtggtgcaaatcccccaagaaggtngaagaggactgccccagtgggagcatttat

SEQ ID NO: 428816 - DNA, 110 bp, Homo Sapiens
cacgcccggccaactgggagcatttcaataagctcataccctctgaccctgtggatatgagcgtactgaaattcacaacttctaaaagtttatctgaaggaggcaatcag

SEQ ID NO: 428817 - DNA, 300 bp, Homo Sapiens
  misc_feature (101)..(101): n is a, c, g, or t
  misc_feature (193)..(193): n is a, c, g, or t
  misc_feature (196)..(196): n is a, c, g, or t
  misc_feature (226)..(226): n is a, c, g, or t
  misc_feature (290)..(290): n is a, c, g, or t
cttactcagtttggataaacccctctttcttcttcagtcacaccctagctatactgcctacctagcacctttggatttgcatcttattctctgcctgttangctctttgagcctctatgactccctttctcacctcatatctgttcaaatgttaaattctcattgaggggttccctaattacctataagatanttnttcaactcccctactccttctctctgattntctccctgatttcttctaccatgatatataaattggttatttattctattgcaagataaacttnatgaagacaa

SEQ ID NO: 428818 - DNA, 244 bp, Homo Sapiens
  misc_feature (231)..(231): n is a, c, g, or t
gtataatgtttttacttgtttatgggtataagtttctaaaaattgagagagccattgatagtgaaaaactgtgctctagtaatcagcaagcttctcactcctcacctcacaaatgggattgacttccttcagaataggagaaggtgaatgtttgtctccaggggcatgtctttcagtcttccagcttcttcacaagaaccccacatctcttagctgcagtccatatcatgncttgcagtagaat

SEQ ID NO: 428819 - DNA, 160 bp, Homo Sapiens
tttcacaaccttctaaaaatgagcttttctaataattccggacctaactgtacaggaataaaacatcctagccatgaaagaccagacaaaaacctgagaccagagactcattttcttctaagatgctttctccaaaagattttaaaaaagaaaaggggga

SEQ ID NO: 428820 - DNA, 213 bp, Homo Sapiens
  misc_feature (21)..(21): n is a, c, g, or t
tgagtgtagagtttcttttgnctgtctgtttccattttttccattcgacatagttcttttcagtgctcggaattttttgaaagattgaatttcccaaatgtaagaaagaaaattttatccatatttccacaccagtgttactgtccagcatacattttgaaatgatttctagtctatagtgtaggcaaacatgaacatagtactatgtagctg

SEQ ID NO: 428821 - DNA, 417 bp, Homo Sapiens
cacatttctggactggtgcacaggtatgtctcattttcctgattcatgaactgtgccatctaccctgtatgggtacctaggaatattaaatgagttctaaatctcccaggcaagcatttattttgattattttgtctgttctaccatgtttagtcttgctcttcatttgttttactaacctttccttagaattttctctcctaaagtactgaattaagccctggattttcctaaatggagtctgtagccattgagatacctgaggctgtgatgggtggaaaggccttacaggacaatgagactagaaagaagagagaaggatacagaactcacaggccccaatctccaggggtttgcagtcctgggttgggataatgggagcaatctcagcaagtgttttgaattaaaattatggat

SEQ ID NO: 428822 - DNA, 146 bp, Homo Sapiens
  misc_feature (51)..(51): n is a, c, g, or t
ttactttatgttaaatacagaagtattccacattttatccacttacactancaaacagctatcaaagtctttgttttcaaggataaccagtctactaatagacaacatacaggacaacaaatattaacataaaactgtttttcagt

SEQ ID NO: 428823 - DNA, 131 bp, Homo Sapiens
tcccattttaatgtataacatgcaaaaagttcccctttcatttctctgtaaggttaaactttattgacgggcaagacttgctctgtgcttttgctttgcaaatgtttgaaattattcttcagcagtaaaga

SEQ ID NO: 428824 - DNA, 143 bp, Homo Sapiens
ccatggaattactgtattttcagaattcaggcagatgaagccttgattatttaattccttccataaaaatacagctggccttgcagattgctatcttatctgtaattgccaatatgctaacattgcatttctttctcccttag

SEQ ID NO: 428825 - DNA, 256 bp, Homo Sapiens
gcttgttcacgtgcaacatttatttcatgtaataataagcaagataattacttttacgaagattagtggaatataactcataaacttgataaacacgttctccaatgtgtggattaggtaagaatatggccacaatggtcacagtcatctgtccaaggactcttgaaaaaaagttatcaaaggccagcatcatgacatgctgtggattaaaaccttatatgaatataaagtttagtgacttgaatagaagacttaa

SEQ ID NO: 428826 - DNA, 580 bp, Homo Sapiens
  misc_feature (427)..(427): n is a, c, g, or t
  misc_feature (502)..(502): n is a, c, g, or t
  misc_feature (508)..(508): n is a, c, g, or t
  misc_feature (552)..(552): n is a, c, g, or t
ttattataatatttatttcatggtttttcttaaacccagacatttgccacaaacacttacaggagtatcaataaaagcttagaaaggctgaaaaacacagaaaagaacaaagtaatccaaatcttgaaaaaagataacctaagaaaagattataaacactcgaaaaataactaaggaggtcagtgtacaatattagaagcagtatgacaaagggaattcaaacttaatcacaagagaactttttgaagagatattaattttttttgctgggatacattaaaaaccctgttttatttttaaagaagtggtcaattagaaacttctcctcttgaaaatgaggtactcttccaaagaaaaataagattatagaaaacccctatattcttatatttaatgatttagcagatgcttgaacatgtattattcnggcttaactagaaagatcagcctttattggtacctaccatggcctggggtttaggtccccaatttttaccttaanattaangccatggtagtgccaataatggtccctaattttaaggtggatantggtccaaccttcccggtacccatggta

SEQ ID NO: 428827 - DNA, 222 bp, Homo Sapiens
  misc_feature (44)..(44): n is a, c, g, or t
caatctccctctaagatacatacttaaaattatattttatagtntaatgtataaagttgttctcaatacttccaacatttaccacataatttttactcttggtttctgacacttcagtcacaatattgcatcatttcagcataacagctttcagtgcctaatccatccagtggggctgcatttggacattgaattgtttgttgactaatatttgccaaaacc

SEQ ID NO: 428828 - DNA, 295 bp, Homo Sapiens
  misc_feature (52)..(52): n is a, c, g, or t
  misc_feature (73)..(73): n is a, c, g, or t
  misc_feature (88)..(88): n is a, c, g, or t
  misc_feature (104)..(104): n is a, c, g, or t
  misc_feature (107)..(107): n is a, c, g, or t
  misc_feature (126)..(126): n is a, c, g, or t
  misc_feature (144)..(144): n is a, c, g, or t
  misc_feature (186)..(186): n is a, c, g, or t
  misc_feature (188)..(188): n is a, c, g, or t
  misc_feature (211)..(211): n is a, c, g, or t
  misc_feature (222)..(222): n is a, c, g, or t
  misc_feature (225)..(225): n is a, c, g, or t
  misc_feature (258)..(258): n is a, c, g, or t
  misc_feature (265)..(265): n is a, c, g, or t
aaaaaatgtatttttaatgttagtgagttacataataggtatatatatttanggggtacatgagatgtttganacaggcacgcaatgngaagttatgacatcanggngaatggggtatccatcccncaagcatttatcctttgngttacaaacaatccagttacattcttttagttattttaaaangngcaattaagttgttattgactanagtcaccctgnggngctatcagatagtaggccttgttcattctttcnatttaanacccattaactttccccatcttcccctcaa

SEQ ID NO: 428829 - DNA, 416 bp, Homo Sapiens
  misc_feature (77)..(77): n is a, c, g, or t
  misc_feature (161)..(161): n is a, c, g, or t
caagcgtggtacaaacatttattctatgagtaaattacacatatgcttataacaaatgaaaaagcagaaagcttcancaaagaaatagaagatattaacaagaaccaaatgggcacttcagagctgaaaaatagaactgaaataaaatgctcagtcgaatngggctaaatatcagaatggaagagacacaggaacaaatcattgaattggaggataaatcaatagatattatccatctgaacacggagaaaatagactgaaaaacatgaatagagcctcagggacatgtggaactataataaaagatctaacattccgtgtcatcagagtttcaggaaagagagaagaaagagggaagagctgaaaatgtacctggaagaaatactggctaacatttccccaaattccctaaaatt

SEQ ID NO: 428830 - DNA, 501 bp, Homo Sapiens
  misc_feature (70)..(403): n is a, c, g, or t
  misc_feature (410)..(410): n is a, c, g, or t
  misc_feature (434)..(434): n is a, c, g, or t
  misc_feature (445)..(445): n is a, c, g, or t
  misc_feature (452)..(452): n is a, c, g, or t
  misc_feature (484)..(484): n is a, c, g, or t
tggaaatattaatattattaaaatatttattcttgccaaagcaatctacagagtccatggaatccatatnnnnnnnnnnnnnnnnnnnnnnnnnnnnnnnnnnnnnnnnnnnnnnnnnnnnnnnnnnnnnnnnnnnnnnnnnnnnnnnnnnnnnnnnnnnnnnnnnnnnnnnnnnnnnnnnnnnnnnnnnnnnnnnnnnnnnnnnnnnnnnnnnnnnnnnnnnnnnnnnnnnnnnnnnnnnnnnnnnnnnnnnnnnnnnnnnnnnnnnnnnnnnnnnnnnnnnnnnnnnnnnnnnnnnnnnnnnnnnnnnnnnnnnnnnnnnnnnnnnnnnnnnnnnnnnnnnnnnnnnnnnnnnnnnnnnnnnnnnnnnnnnnnnnnnnnnnnnnnnnnnnnnnnnnnnnnncttttanttcctaaagatattttccctgggntatcagattgntagttcncctttcagcactttggaaaaaatggtagagcnccttccctctgggcttc

SEQ ID NO: 428831 - DNA, 138 bp, Homo Sapiens
aactactgtatactctcctaagaactttatgtgcaccaatttatctaatcctcacaatagacttgtgtggtattgtaggtagtgatattatcctgttataggtaacaagacagaagcatgtggtgatttgctcaaggg

SEQ ID NO: 428832 - DNA, 262 bp, Homo Sapiens
  misc_feature (23)..(23): n is a, c, g, or t
  misc_feature (48)..(50): n is a, c, g, or t
aggaattgggaggaaccgagggntcatcaaaggctggtagggcttagnnngctctagcaaacatcctagtctgtggggttccagagctctggtgctacagctcccaaccctttgattggcccaggaactggctgttgagtgggcatccgtgttcatagctctgccccttgcaaccctaaagcagataaaatgcaggaggcagaaattgctggcagacagcatccaattaatccccactacccaattcagtttcttcccctga

SEQ ID NO: 428833 - DNA, 128 bp, Homo Sapiens
  misc_feature (72)..(72): n is a, c, g, or t
cattcactaaatatgtgcaaaggaagtttcaattctgagctgacttcgttcatttttttcagggaaaatatnatctctattgttttatgtctatgacaaacagcctttactgtagctcttccttttaa

SEQ ID NO: 428834 - DNA, 217 bp, Homo Sapiens
tctaccacatacctgggagacagagagccagaagaatgtggggaaggacactaatgactgccaataaatgttgccaatttcaattttgaggctctctctaaagagattttaccagtttatgctcccatacttacaaatgggtaacatttttggtaacatttataagaatattctttcctccttcctttccccactcatcatattttgtaggtggttg

SEQ ID NO: 428835 - DNA, 196 bp, Homo Sapiens
  misc_feature (61)..(62): n is a, c, g, or t
  misc_feature (165)..(165): n is a, c, g, or t
ttggtaaagcacattgtaatgccagtatataccaccccaactccaaattctgttgcaatcnngggaggcgggcagtgtcattctatgcagtaagcatttagtgctggcttatattagtgatactgagatttattgaagttagttcctattacatagtagctttancataatgggcacacacagaattatgagaata

SEQ ID NO: 428836 - DNA, 202 bp, Homo Sapiens
taattgatttctgatgtgcttggccaacaaccatttaagcttttagaatcttcaagttattcttaaagaatcttaagcaaatctttaagcttttagaagaggaagaaaggacagggagatgagccttgaggtcactgcagcaataggcaggcatcaggtaatgagtcaccaggacagtaggaatggcagtgggggaataagc

SEQ ID NO: 428837 - DNA, 191 bp, Homo Sapiens
  misc_feature (59)..(101): n is a, c, g, or t
  misc_feature (127)..(127): n is a, c, g, or t
taaaggtcaagttggtacaaggcacatcaggcacagtagagacaaagaagtataaggcnnnnnnnnnnnnnnnnnnnnnnnnnnnnnnnnnnnnnnnnnnnaagtaaagaggtatgtgtgtcatttnttatgacgttttttgcttttgttttggacatgcatagatgggagtacatgcatgtccaaaaaaa

SEQ ID NO: 428838 - DNA, 122 bp, Homo Sapiens
atttttaaaaggtgattctgattaccagccaggcttgcaaatcactggtttgtattgaaataaaagatattttcttgtagcagggctaaaatgtgggatgaaacattaaatctactagcctg

SEQ ID NO: 428839 - DNA, 468 bp, Homo Sapiens
  misc_feature (50)..(50): n is a, c, g, or t
  misc_feature (342)..(342): n is a, c, g, or t
  misc_feature (350)..(358): n is a, c, g, or t
  misc_feature (426)..(426): n is a, c, g, or t
  misc_feature (433)..(433): n is a, c, g, or t
ttttctgcaaaaacatcatttaaaacaactgttatacacggtagtttttnaaaaatcataatgtgtgatgtcttttgtcctggtgtctatgtttagtagcagctcatcagatacagtgtgtgtttgggcttgtcactctgtcccttgtcgccagttgagtttcttgcttacagtacagtattataatttattatttgagataaaaatttttgtattatacacacatctgctacaaatgagctttttttggttcacaaacacagttcctccaccaattctaaaatcatttaatattgactttaataatggtacctttttctagaaaagcactaattgtttttntttttgtnnnnnnnnntcttttttagggaaagcttcccaacgacagggaatgacaatccacaaagccttggagggaccagtggnaaatccntagaaatgcatttggaaatatccggggggtagggc

SEQ ID NO: 428840 - DNA, 397 bp, Homo Sapiens
  misc_feature (158)..(158): n is a, c, g, or t
  misc_feature (160)..(160): n is a, c, g, or t
  misc_feature (237)..(315): n is a, c, g, or t
  misc_feature (363)..(363): n is a, c, g, or t
caggagaatatcggtattttcagaactgccaaatctaagactttgggttcatttttgacctgaccagaatgtattttctggattcagacaggtagtagacaccctcaaacagccataaattctaaaatctttgccattgtcatgagataataaaaaanangcaggaggagtcaccaggtgtcagtggatcttgtttctggctcccatgtctttgacagtaagactggtgacccagcnnnnnnnnnnnnnnnnnnnnnnnnnnnnnnnnnnnnnnnnnnnnnnnnnnnnnnnnnnnnnnnnnnnnnnnnnnnnnnntatacactattttgggtctcatgtgcctacttgtaaactaaaggatgnatatattcttaaggctccatggagcttgtttagg

SEQ ID NO: 428841 - DNA, 119 bp, Homo Sapiens
  misc_feature (47)..(47): n is a, c, g, or t
atacggctgaaatatggtgacatgtcaggcactcagttttttggagntgtcttaaaggtgaggtggaaagtgagagatgattttgctctaattacccacacattctccctaaccctcca

SEQ ID NO: 428842 - DNA, 450 bp, Homo Sapiens
  misc_feature (21)..(21): n is a, c, g, or t
  misc_feature (46)..(46): n is a, c, g, or t
  misc_feature (182)..(182): n is a, c, g, or t
  misc_feature (234)..(234): n is a, c, g, or t
  misc_feature (251)..(252): n is a, c, g, or t
  misc_feature (276)..(276): n is a, c, g, or t
ggaaaggggctgatctagaantctatggaatgtattagttctccantaaacactgcctctgtgaatctgccgctaagggtctgagggtgggcttgcatcactgctggtcagcagggtcggggagagctagatacagagcagggaagatggaggacaaactggaagctgctggcccctctgtntctggccacccctcactgcttctaaccaatgatgaccttcagagtgtaacgnctgctgcttcccatgannctccctggtcttgcacaacctcantttggggcaactctaacctaggaacatacaggaaaaggaggtctgagaaatgtggttcccagcataaccaagttgtcaacagaataatccggtagatgtagtctctgtactcaaagaacaggaaaaaagagcagagaaggccaaaaagagggtactgggggcagtttttcctgg

SEQ ID NO: 428843 - DNA, 301 bp, Homo Sapiens
  misc_feature (47)..(47): n is a, c, g, or t
  misc_feature (205)..(205): n is a, c, g, or t
  misc_feature (282)..(282): n is a, c, g, or t
acatttaaaatttgcatatgagtgtgttgtcatatggagtgtctgantctgttgctgggacataccattccatgtattcattagagccatagaagttattattcattagttcatagtgtttgagttctttatgtcactctgttagaaacaagaactgagtcgtgaagaaataagaattggatttttataaaaacctctgaagganatttacctatgaaaaagttgttaagaataaaaattagaagtccatggttaacttttccttcaatttatattattccngaatcataggggatccttc

SEQ ID NO: 428844 - DNA, 166 bp, Homo Sapiens
  misc_feature (101)..(101): n is a, c, g, or t
acagttgtgctgtgtaaccttcagatttcccacacattacagcaaatgcaaatacacatagaaatcagtggttccatttgtggtttagagacacatggtgncatcttcatcttccgctccacagctcgcttctggcacccagcagtgggttgcagagctccccatg

SEQ ID NO: 428845 - DNA, 528 bp, Homo Sapiens
  misc_feature (334)..(334): n is a, c, g, or t
  misc_feature (443)..(443): n is a, c, g, or t
gaatttcataaataccaaccaaattcaaacaaaactgatttagatttcacctcgtcacttaaaatatattttgtcgagtacagtctgtgcagtaatcctctgctatactttaatttggttttaattttataggccctgttttaactgcatatttccagacctttatttctctcacagctcttagcaaaatggtagctcataaacacaagctctgctgtatagactttgcatttcatcccaaagtatttccttttttatagccgtggtctttccatcttagtgctgtgagcttgggtcacaaatctctctgctattccagtgtgtgacatcttcngctcgttttgccgctgctcattaacaaacaatactgctgtgaaattggtttaatgacaaagtaataaaattgctattctgctcacagattgcctgaggcactttgagcncctacaaggcttaccgtgggtgccaagatacatttaagctgcctattcgtaaaaactggcatcatccgtttttcacagggttttt

SEQ ID NO: 428846 - DNA, 331 bp, Homo Sapiens
  misc_feature (161)..(205): n is a, c, g, or t
gcaatttaaaagcatttgaaaggaaatcatttttaatagaggaattgcaaaccagagaataataagctcctggaagataagggtaaagagttttgtgtttgttattacttctcctatagcaagaaattcttattcaaattgaaacggtctaacagttgttnnnnnnnnnnnnnnnnnnnnnnnnnnnnnnnnnnnnnnnnnnnnnctaattaaaaagtccttgttacatcaagggactcataaccattccctattggcccctggatactttgcatatcctgaaacaaccagcactgatcagaaagcattcagtccagtcagaattcaaggt

SEQ ID NO: 428847 - DNA, 266 bp, Homo Sapiens
  misc_feature (19)..(19): n is a, c, g, or t
gttaccaatctgaagtggncgtgtccaagtcaggtcatgttgaccagaagcacccagcctgtgaggaagtattggtcctgtcttctaaccccaattgtatggaagatttctagccatatatattcatttacacataaattagaaacagtgtggtgaaacattccctagggcaacacagtataatattgaaattgtgtttttagatgaccattactgaacccatataaacagatacttttaatttccaacagttcatctttaacccc

SEQ ID NO: 428848 - DNA, 425 bp, Homo Sapiens
  misc_feature (299)..(299): n is a, c, g, or t
  misc_feature (375)..(375): n is a, c, g, or t
gtaagaaaatgcttcatagtttattcacatacacaaaaataatctcatatgattcttaaaaagaacaggacaatgaaattctgaacataacttaaaagtgaagatattgtctgatcagactaaataatgataagctccctacttctctcatctctaaaatgtttacaccaaaagataaatggaaaatatcaccaggagaagaaagccagtgctgagcctgaggtcagtgggagagcaagggcatgaggagcctcaagcatcaaaaagctcactgggcctgggccttgtctttttattcngtttctcgactcctacaatctgtgatccatgatattaaatatcagaagtcatggtgttccttatggttgatgttcnttgttgtactttcctttctttttctcatcctgctatgggctgaatgtttc

SEQ ID NO: 428849 - DNA, 370 bp, Homo Sapiens
  misc_feature (60)..(166): n is a, c, g, or t
aatgattaccagtttgcaagagtttgaaggttgggggcaggactgactccaaaaaaacannnnnnnnnnnnnnnnnnnnnnnnnnnnnnnnnnnnnnnnnnnnnnnnnnnnnnnnnnnnnnnnnnnnnnnnnnnnnnnnnnnnnnnnnnnnnnnnnnnnnnnnnnnataaatattagtaaacataaatttaaacgtaatttttttaaattaaaaatcatagcatatgaagaaatggagcctctgtacatctgttttgtcttcttttttatttcacctgctcaaacactgcatccctccatacaagcataatctgtatagtcacacatgactgtatttgttacttcagtttttcaattccagtgacctttt

SEQ ID NO: 428850 - DNA, 301 bp, Homo Sapiens
ctacataaggatataaaatttagaagagcaaattaagagtgcttgttggtattgtttaattattttatttaatatatggcacaatttaatgttctaaagctgcattcaactaaaaaatcgggaaaaatatgagaacactcaagtgagttaatttatttacagacaatatgggcattcatcaagttaaattcgtcactaccagctaataatcacaaatactcaaagataatgcaaattgtccgtttagatttcctttaataatttacttggtaaaaattaatccagtgccattatttgacca

SEQ ID NO: 428851 - DNA, 391 bp, Homo Sapiens
aggttcgggggtacatgtgaaggtttgttacataggcaaactcatgtcacggggttttgttatacagattattttatcacccaggtattaagcccagtacccaatagtgatctcttctgctcctctccctgctcccaccctatatcctcaaggagatgccactgtctgtggtttcctactttgtgctcataagttcttatcatttagctcccacttatacgtaagaatatgcagtatttggctttctcttcctgcgttagtttgctaaggataactgtctccggctccatgcatgttcctgcaaaagatcggatctcattctttttatggctgcatactattccatggtgtccatgttccacattttctttacacaatctgtcagtgatga

SEQ ID NO: 428852 - DNA, 425 bp, Homo Sapiens
  misc_feature (38)..(38): n is a, c, g, or t
tccggtgtggccgcgacaaagagccgcagcccctgtgnttctgcgaggaggcgtgaggcgtgtgcgctccgcggcgtctccacggagcgagcgggacgcacactcctcctcggtgggagggaggggggtcacctgcggggaccaggtatccgagggccacccctagacagtcagcctggcccgaagatgaccagcccccggtaaatagaagggggcgaacagctccgaaaccttacgttcgctgtcccttgtaaagaccctagaggcagtgatcggggaacgccaaaggagaaagcggcagaggggaaaccacagtagaagaagttttggtgtgcagagggttgaagttgttgcttttccaaggttaaaggtttttaaacctttgtggctttaatggggaacgtagttttgccctcttgcttcct

SEQ ID NO: 428853 - DNA, 443 bp, Homo Sapiens
  misc_feature (429)..(429): n is a, c, g, or t
gtaaaatatttgaagagttttattttgagccaaatatgagtgaccatggcccacagcactgtctcaagaggtcctgagaacatgtgcccaaggtggttgggttgcagcttggttttatatgtcttagggagacaaaagacatcaatcaatacatgtgaggtatacattggttaagtcccaaaaggcaggacaatttgaagggtggggacttacaggtcacaggtggattcaaagattttctgattggctgagagttaagttattatctaaaaacctgggatcaatagaaaggagtgtctgggttaagataaggggttgtggctccaaggttcttactatgtagtgaagcaggcagtttccagttagtctataggtggcaggcctttcagaccatagatggcaaatgtttcctattcaatcctttaagangtgcgagactctcc

SEQ ID NO: 428854 - DNA, 183 bp, Homo Sapiens
ggcaatcaacattactgcatttaataagtaatgatgaacagcaaaacaacacacaatatactctttaaatgtttcactgaagctcttcaccattttgacttcatgtaatgaggtgtttgttcacattttatatgccatttaaactgacagagttgttttagaaggagatggtagtgagtgttt

SEQ ID NO: 428855 - DNA, 207 bp, Homo Sapiens
ggtcagagttttacactgtatttattattatttgagttttattaccacagcaaatggagcatggtcatctaaaattggacagaacaggtgctcatttagaactgtgaaaatgtgtaatttaatcaacacaattctttaggatgtgtttttagcttaacagatgttacaacaaacctgtgtttgcatagtttcatctcctcacatcac

SEQ ID NO: 428856 - DNA, 314 bp, Homo Sapiens
cttaaaatctcaagttcgctttgtggcccctctcttggggtagaaattccttcactggaatagacatgattttacatttgaggctatgaatttcatttctgaccctcatcccaattactccatcttactcatttccaggcaattattcccatggacataaatctgacctttggtgacagtcacccaggataacgcactatacactcattggtgcagtgggctggcagtgccaggatgaggagtaacatggagtgagttaaagaaagcctgccagacaccacatgccaccaactgctgtgaatggtgttcacaca

SEQ ID NO: 428857 - DNA, 200 bp, Homo Sapiens
  misc_feature (48)..(48): n is a, c, g, or t
  misc_feature (88)..(88): n is a, c, g, or t
ttggttcattctctggtttgataggatttaaactcataacattgaaangtcaatataacattcattcttaggacatttgaaatataanattgttgaagacctttaaagtgagataaaatgggcccatgacttgcttgattgcattgtgctgagtcattctttgtgccttaatgagtaagcagttaaggccaaagtaaatg

SEQ ID NO: 428858 - DNA, 112 bp, Homo Sapiens
  misc_feature (30)..(30): n is a, c, g, or t
  misc_feature (36)..(36): n is a, c, g, or t
  misc_feature (42)..(42): n is a, c, g, or t
  misc_feature (70)..(70): n is a, c, g, or t
cgcgttcggcctgtggggcgccgctccggngtgcanagcagngttccatcagccctggcgcccaggcatnctgactcggcaccccctgcaggcaccatggcccagagccggg

SEQ ID NO: 428859 - DNA, 161 bp, Homo Sapiens
ataatgtcctaaaaatcaaacagctaccaaacattgaattgaagttctgacttatataaatcatttgcataaaaactgatcattaaaaacagtatctaatgaacattttggccccaatattaattaaaactgaaatgatagcattacaagctaaagattaa

SEQ ID NO: 428860 - DNA, 169 bp, Homo Sapiens
gctgcatttcaacccctttaattcctttccactctcatcgctggattccttaatatcagggcttcccttaggggatagtaggtggtaagttcacaggattatttttgtattcaagaggtagattgtcatataaatatatctgcagcattgaacatgaaaataaaaaagg

SEQ ID NO: 428861 - DNA, 194 bp, Homo Sapiens
gtgtttcaaactcacagtgtcttagtttgatttctgttccttataacaatacctgaaactgggtaattaataaagaaaaggaatttatttctttgttatggaggctgggaagtctaaggtcaaagggtggcatctgtgagagccttcttgctggtggggactctgcagtgtcctggggcagcgcaggcactaca

SEQ ID NO: 428862 - DNA, 261 bp, Homo Sapiens
  misc_feature (41)..(41): n is a, c, g, or t
  misc_feature (46)..(47): n is a, c, g, or t
  misc_feature (50)..(50): n is a, c, g, or t
  misc_feature (68)..(68): n is a, c, g, or t
  misc_feature (103)..(103): n is a, c, g, or t
  misc_feature (119)..(119): n is a, c, g, or t
cttgatgtagatcttgatatatgtcatgatatagttagatntttgnnttncattttggaggatacttntgctggatatagtattcttgcttagagttttgttnttccagtgctttaacnatgtcatcctgttcccttcttgcctgaaagatttatgttcttaaatttactcgtaatcttgcagaagcatgcatataaataacacgtctctttcttcttcctgaattccagattctcttcttgtctgcgacttttaaaacaa

SEQ ID NO: 428863 - DNA, 157 bp, Homo Sapiens
tgtgggaaagtcttacttttaaagagacattccctaaagaggggtaagaagttctgaaacagtgacgtaccagtgaccatgaatgtttcagagaaggtcagatttgcagtgtgtgtcttagagaaaggctaaatctcaacccagaggaagcatgtct

SEQ ID NO: 428864 - DNA, 324 bp, Homo Sapiens
  misc_feature (52)..(52): n is a, c, g, or t
  misc_feature (309)..(309): n is a, c, g, or t
gtgctaatctctcaatagatttggaaccaaaatgacctttttgattactatnagaagacaatgttatcaagagagtagcgtgtaataaaaaatgacaagaaatgactttacctcattataatcaccttagctcagacaaatctttgtaacagtctgtttgcatattacattcactatccttaggagccatttttggaaactgttttagaatccatgagtcaagtcgattcattttgcctgaaatacattaagttatggccaaagttccctaaatgtaatatcagtacttagtgaaagtatggtcccggnaaaattgccggatta

SEQ ID NO: 428865 - DNA, 132 bp, Homo Sapiens
  misc_feature (46)..(46): n is a, c, g, or t
  misc_feature (53)..(53): n is a, c, g, or t
  misc_feature (85)..(85): n is a, c, g, or t
  misc_feature (97)..(97): n is a, c, g, or t
  misc_feature (102)..(102): n is a, c, g, or t
cccattgggagtgagaagttaccatggggttccccaacctggtacnattagcntggccttaaatggttgatgtattgccaaatcntaccctccaatnaaacngggttttaaaatctcccccattcctggcaa

SEQ ID NO: 428866 - DNA, 366 bp, Homo Sapiens
  misc_feature (98)..(183): n is a, c, g, or t
  misc_feature (250)..(250): n is a, c, g, or t
  misc_feature (322)..(322): n is a, c, g, or t
  misc_feature (336)..(336): n is a, c, g, or t
gttcaagcaaatctccctacctcagcctccctagtagctgggatcagagacactcaccaccaaattccagctaatttttgtatttttagtaaagacannnnnnnnnnnnnnnnnnnnnnnnnnnnnnnnnnnnnnnnnnnnnnnnnnnnnnnnnnnnnnnnnnnnnnnnnnnnnnnnnnnnnngcgtgcaaccaccgcctggcctggggatgataatatttctgaagtttgttgtaagggtaaaaaatgnaatatataactgaaagtaattttgcagggaagtgggtcacatgatacatttttaataaccttttaataaatnataataatatttanccagtaaccagtgccggcttaaggtttaca

SEQ ID NO: 428867 - DNA, 212 bp, Homo Sapiens
  misc_feature (179)..(179): n is a, c, g, or t
  misc_feature (189)..(189): n is a, c, g, or t
  misc_feature (195)..(195): n is a, c, g, or t
gtgttgatgggaccaaaataagtctggttaataaataaaaattttttctacactaattatatataaaccatattcacatgtacctttattaatatatatataccactatgtaaagaacttcattgctcttttaatttagcttctctttcactgactaatattttggatcaaagtgagcncttctttttnggcacnaacttataatcctatta

SEQ ID NO: 428868 - DNA, 422 bp, Homo Sapiens
  misc_feature (407)..(407): n is a, c, g, or t
gcagacttcgaagctcaaagcttttccttttccttagaccccaggttaatgtataaatgttcccttatttctactttctcatctaccatctactttattgcaaaaaaatagttctgttttgttcaccagaaggctgaaaaggaagactcttgtgaactgtttctgtggtttctgaataaagtagagaacttggattaactaagccctttccctgtgctataagctttaaccgaccttatctcagtcaatcagcccaacagcttgtgaagcaggggatgagtttcatagagagaaactggggcttacagaattcagtgtcttagtccagtgtccagcctggaagtggagaggctgggaggggtcccagttctgcactctggaagcctgagtctttcactcctgtgggnagcgcaagaatcatg

SEQ ID NO: 428869 - DNA, 185 bp, Homo Sapiens
  misc_feature (44)..(44): n is a, c, g, or t
  misc_feature (71)..(71): n is a, c, g, or t
  misc_feature (109)..(109): n is a, c, g, or t
  misc_feature (128)..(128): n is a, c, g, or t
  misc_feature (151)..(151): n is a, c, g, or t
ttaaaataaaatggggagggattaaaatttacagtagaaaatcngtggcatgagctatcgcactggtaatnaaataaacttacaaaagtagaaggggaagacaactatnccaggctacaatctaatgnctgttgagaagacagagcatctntcgttgaggtccaagttaactaatattccctgag

SEQ ID NO: 428870 - DNA, 147 bp, Homo Sapiens
  misc_feature (20)..(20): n is a, c, g, or t
  misc_feature (25)..(25): n is a, c, g, or t
  misc_feature (92)..(92): n is a, c, g, or t
  misc_feature (100)..(100): n is a, c, g, or t
  misc_feature (135)..(135): n is a, c, g, or t
ataaattggccatttactgnttacntcccatgctttgagcctgcagaagttgttgactgagcaaccttttctgtgtctgtatatgtcatttncaatgtcnctctcctctacaggatagttttgctcattcttttnctccctttgaaa

SEQ ID NO: 428871 - DNA, 468 bp, Homo Sapiens
  misc_feature (31)..(31): n is a, c, g, or t
  misc_feature (218)..(218): n is a, c, g, or t
  misc_feature (395)..(395): n is a, c, g, or t
gggaatccttcctcgtgaagctcactgctanggtgttaatctagcattttacttttgtggtaagattctgggtggaaagggaaaatgaaatgatacagcatctcaaacataggcatcaagattatttccgttgacctggtgaccaagattagggtttgcctaacccagagatgataatacgtattaatgatgaagggtaacggccggcccttggcaanggagaactcttctgaaggggtgggccatttgctcacatttataaagttggtctcagggcgttgaggggtgggggtgcaaacgaggtgcttttacctctggcttttggggcaatgacagcagttttctttcttggcccttctaaagggttctctgcattctgtcccccttccctggtntcccatcccattaaaggagaacgaataaactgatttttactggttttccaagaagaaggcataacacatttta

SEQ ID NO: 428872 - DNA, 148 bp, Homo Sapiens
  misc_feature (52)..(52): n is a, c, g, or t
tctgaccaactgaacatgaaacacaggttggaataaaaatatttttttattngatggtcttccatatagacagaatttcatcaggaatcaaagaaaggtggttaccacatataaacaccaactaaactctgagctttctggcaacctg

SEQ ID NO: 428873 - DNA, 504 bp, Homo Sapiens
  misc_feature (478)..(478): n is a, c, g, or t
aacaagtgtcaaagaccaaatatgataagaaaagatgctcttagcacccttatccctcaggaattctccaaggtttggggagctctctgctagtcattgaggatgaagaccagatacatatttatcatgatatcacaaggcttattatacaaaatttgagtatttcttgcagaagtgaataaaatagaacataagaatcatctccagtaaagcaagtgtggttgtcctttccaggtcctgtgaaaatgaagggaagagagtgtctgctcagctccactaggggctcccaccatcacggtcaggagaccactctctccctgatgtaggtgagctggggcacgtgtaatagaggcctctgcttgaaggaatatcatcaggaaacagcagtcagggcactagtggccccctggacaaacacagggcagaaccccggggttctagtcctggggtgtagggtggcttctggggtgatagtggnttctccttccctctagggaactgttt

SEQ ID NO: 428874 - DNA, 405 bp, Homo Sapiens
  misc_feature (66)..(104): n is a, c, g, or t
  misc_feature (264)..(312): n is a, c, g, or t
  misc_feature (374)..(374): n is a, c, g, or t
gcttttatcctacctgagcattggctgtctaactatggtcttgatacttcggtgtgttgttgttgnnnnnnnnnnnnnnnnnnnnnnnnnnnnnnnnnnnnnnnctagttttgatgtagttttagatccatgggaagttgcaacaaaagtactcagagtcccatgaaattttcactagtttcgctctaggaaattgacatttgcacactgttaaatagataactgacattattcactgttcaccatttttacctgagtccattnnnnnnnnnnnnnnnnnnnnnnnnnnnnnnnnnnnnnnnnnnnnnnnnngtgctatgcagttttcagcctaacttccattcatgttactaaccactgcaatcaggaatgcnagaacaagtgtcaacctagggaaagaacccc

SEQ ID NO: 428875 - DNA, 464 bp, Homo Sapiens
  misc_feature (440)..(440): n is a, c, g, or t
ctcttttttaaagaaggttttatttttgcaataacattactagcgctattgacaagtatcaaatgcacactgtataactacagcaaacccatccacaacgtattcgactgttcagagccctgaatgacatcttgataaagagccaaaagttcgtttccataaagatcttcaaggtgtttgagcacatcttgtcagacgcccgtaaaggaagctgactctcactgggttccaggaattacgtggttacgtccataacagcccatctgacaagtggcaaatacccgtggaaaaccaattaactgtgctcctcggtttaccctggaggatggtggcggatgacgcgactaagtttgctttgagcctgcttcaagtttccaacttccttggagttagtcggcatttaccatttaaaacatggcaaaatccacgcttgtgtatgnaattcggggtttccttcagaacaa

SEQ ID NO: 428876 - DNA, 470 bp, Homo Sapiens
  misc_feature (86)..(128): n is a, c, g, or t
  misc_feature (327)..(327): n is a, c, g, or t
tctactaagtctttcggatgccagcatatattttatacatatggcctatcttgattggggctagctagccacgcttcccgggctcnnnnnnnnnnnnnnnnnnnnnnnnnnnnnnnnnnnnnnnnnnngactagaagcatttcaagatcctggcctggaagagtttctgtgtggtaagggaaactgacactttacatactgtcatcacttcccatgcttgaattgggattgcagagtatggagccaaggaacggtgctaggaaaggagtatcaggaagcacagagtttccttgaaatgttcctactgctttctctacatgtggcctngcagtgtgtataaattgaaagttgcaagcaatgaatccatacgtgtacatgggggatatgtgtaaacacctatgggacccacatatctataagttccacagctgatattcattctgtcacctgttcaagataacagtaaggaa

SEQ ID NO: 428877 - DNA, 367 bp, Homo Sapiens
  misc_feature (326)..(326): n is a, c, g, or t
  misc_feature (343)..(343): n is a, c, g, or t
  misc_feature (354)..(354): n is a, c, g, or t
tgtatggttctaagggcaagagagatggaacgtggttggctcactcattcctctcctttcccttacttctccaacattctaagtaccgtccctatcactgcctactcttgcccattccagtttccaccttcaacttctccaacacaacctattccataatttggtcctggtacatatagagaagggaactggtccacttcaagcagacatgtttcaactcccatctcttagagctaaatgatctaagagcctgcagacagaaaagaattgagaccatgcacaggctaaatgtcagtgaacaggaggtaagacaacctggcaatggnaatttctgagtctgtcnttctaagttgngatccagcacaag

SEQ ID NO: 428878 - DNA, 367 bp, Homo Sapiens
  misc_feature (108)..(108): n is a, c, g, or t
  misc_feature (220)..(220): n is a, c, g, or t
  misc_feature (228)..(228): n is a, c, g, or t
  misc_feature (239)..(239): n is a, c, g, or t
aacaccaccttgcctgctgaccgtggcgacactgacctaccgcaaggtccatgacgtgctgatcgaagcgctggcgaactccaccgacctggcatggcgtacgtactnggtggggagtttagagcgtgatcccgctgtcgtgcggcgggtgcaggatttgatcgcgcaacaccgcctgcaggatcgtgtcaccattgccggtgagatgggcagcgatgcntttgaacngcggcttacgnaacccgccgatgtgttcgtactgccgtcgcgccacgagggcttatgggcatggtgttcgcggaacccttggctcagcgggctgccgattgtcgcctgcgcggcgggttgcggtgaaggacacagtgcc

SEQ ID NO: 428879 - DNA, 441 bp, Homo Sapiens
  misc_feature (389)..(389): n is a, c, g, or t
gttgagaaataaaaatgtttgctttaatttcttccctataaagtccagcttgttcagtaaatcagttatatgaactaacaaaacaaagaagaggtttcgagtgcaagatgaatccaggctgtacttacagcgaattggcaaaaaccaagataaaaatcgagaagatatctaagatgtttcagaaatttcaggcttgaagattcagagtagattgcatgagagatagacatttgggagttaaaagcataataggcttgttaaggttatgatcatagataaaatcctttagacagagaaacatagtctattcaacagggcacaggcaggcaacttaaccattaatcctactaagaggcacgcactatgctaggaagttttaaatatgttgnctcacacatggcatccaaaaccaactctaccaaggtagatcctatacccgtc

SEQ ID NO: 428880 - DNA, 427 bp, Homo Sapiens
  misc_feature (317)..(317): n is a, c, g, or t
tgacagagtaaagtctattaacagatggtaagtagtagatgatactggggttatttcggtaaaagaatatcagatttttatgaatgtcttaaatattacctataaccacagcagccacatgccccaggtttctcagaaccaatctcagtaccaaatattcgtcatgttctttgtccacatactaggtttttggttttaaaaataaggtcgctgcagtttacatgcccactgctactgggaggcatacactgggccacttggataggctgtcattttctgcaaatcaagagacccatatcacctcctcaggagctctnggcctatttttgtcctattcttgtctaccctaattgatatccttgggctacatttatgataaatgtttcctggaccatcctttccttcttttaagataccgatcagatta

SEQ ID NO: 428881 - DNA, 386 bp, Homo Sapiens
  misc_feature (347)..(347): n is a, c, g, or t
  misc_feature (358)..(358): n is a, c, g, or t
taaagattcaatgacaaagttttattaaataccaatactggcggcacaattagacacattattatctcatttgctgtatctggtatcaaacaacaaagcctgaaagattaccatagattttgatggcctcattaacataattaatccgtagtgacattccctcggataataaatacagttttatgtccgtgtgtcttctgtgtcttccaagttgctacagggctctatttgatctgagaaactgactgctgtttacatccaggtatgcaatgtgacattagaattgaagcagaaaggaagcaaaacaaaacaggggttcatggagggaaataatcctcctaaggacntaacatgggcngggagggaaaattgccaatatatccggg

SEQ ID NO: 428882 - DNA, 425 bp, Homo Sapiens
  misc_feature (337)..(337): n is a, c, g, or t
  misc_feature (387)..(387): n is a, c, g, or t
  misc_feature (413)..(413): n is a, c, g, or t
aagtttgggaacagctttaatgactaatttctaatgagagtttcaaaacactaattttccagaacagagaatcaagttgtgctcatttataacccgtcatctgcaatgagacagaggatatttctttctgtgttgtcagttaactttctgagctggacagaatacaaactagaagaggtgggccgtaaatcagctcctttggaactgataaatggatattgtacaaatcctgcatttgcattggctctgaggacataaatcaattctcatgatcttactttggaaaaaaatttccctttgaagtcagactggagcgatttatgtagcattctttccnggactttatttttctccagcttttttaatggattggcctttcactttctngcacttacacaacattgtaaagtgtngcattttcatat

SEQ ID NO: 428883 - DNA, 150 bp, Homo Sapiens
taaagaaaaaatagaaatttaatctgtcacattatcacatatgcaaagggtgtaaatacattaaacatattcaatataattaccacaacttgaaaatactttattcactacaaactttatatacatttacttcttatataaacagatttt

SEQ ID NO: 428884 - DNA, 243 bp, Homo Sapiens
  misc_feature (68)..(68): n is a, c, g, or t
  misc_feature (163)..(163): n is a, c, g, or t
gtgagtgcccgatgatgccagattcttcatcacctgaagtgaacccacacaacagggctgggcatggnatcataaaccccattttgcaagctcaggaggagctttagggaaatcagaagactggcccagtctctaccaagtggtggatttagagccggcatgnttcgttccaaatctcacccttgtcccaccattccatgggacctcccattcctgagggagcctggatacgggcaagtgcac

SEQ ID NO: 428885 - DNA, 141 bp, Homo Sapiens
atttatctgtaattctcaaccttttgtcagacagttgaacttaaggcctgcattttgagtaccctttccaaactaacaaatgttcctgtgtccttccagggagtgtcttacctttatttccctaagaatcaagtgccatct

SEQ ID NO: 428886 - DNA, 270 bp, Homo Sapiens
  misc_feature (37)..(37): n is a, c, g, or t
ttttagtcaggcagcacaaagctgtcaattattccanaggaagctgctgccagctgttttgtattgttgcttcctcttggggaacaaagacagatttggtatcattgattgctcagctagcctctttttaaaagaacgtttctgggaatcagatgtctagggaaggattccactgaggagtgatacacgtgtacattgtttaagagcatagtctagtgtgagtaggccattaaggggaaggatattcatgaaagaatttaggcaacctgt

SEQ ID NO: 428887 - DNA, 172 bp, Homo Sapiens
gaaccattaaaacataggaaaggatttagaatcttaactactccctcaaagatggctagtgcgagcctgaatgtcctgttcaggagacagagaacaattaacctgagtgctgagttcagggaagaggtttttactttctgctttatacacttctgcattgttgtaatttttt

SEQ ID NO: 428888 - DNA, 127 bp, Homo Sapiens
ctggaaatggagaagctgtgttttagcatctggcataaattcagttgcttttctaccatttcaatctgttagcgtatttcttagctatttgtacccattgacattttagataagagctaagagagag

SEQ ID NO: 428889 - DNA, 278 bp, Homo Sapiens
ctcaacatttcaggatcatgctaggcacactgcccccttgactgagacattatatgcacagttgcaagtcagccaatgtttttattcagaagtatttccccccattatagtgcctgcctatcagagatacaaaaagcatccaacacactaccgtaataggcttctttggggatgagaaatttgagtctcaacaactcagagtttgagatgtcagcttttttggtaaacgtaggtgttagaggtatattttgccttcctacaacaattgttggcccctg

SEQ ID NO: 428890 - DNA, 208 bp, Homo Sapiens
  misc_feature (129)..(129): n is a, c, g, or t
aacacagtcttcatcaacatcgcaacaaaattaaaggaatgcaaggaaaacctattctgaaagaatgggcacagataatagctagagaaattctgaaaaaatgaatgcaggtgtttaactgtgtttttnaactataataaaatgatctggcactggtgctggaatagaccgatcaagggaacagtacggatagtccgttaataaagcc

SEQ ID NO: 428891 - DNA, 259 bp, Homo Sapiens
ttttacattgacaggtttattcttaaagcttgaacaaatacatctttacacacacacaagttggtaaaaagtaagcccttactgctttgttaaaaataaaacccatacataaagctttccggtcaaattcccgaaacatgaaaacatcacatttctacaatacatctgcttttttgattcatgtgtgttttcaacacaactcaacaactcattccgatctacccaaacaaagagaaaactaacttccagaccatgaagg

SEQ ID NO: 428892 - DNA, 432 bp, Homo Sapiens
  misc_feature (392)..(392): n is a, c, g, or t
  misc_feature (422)..(422): n is a, c, g, or t
ttcagagaaaaaccctgagatgttttattgcttcagattcactgataaaggcttacagcttgagtacagaagagacagtggattacggagtggatgcgggtggttcctaaacactggacacaataaatgctaataccatgactagtgtgagatgcaggagtaagttaagtacaacaaaaaatatccttttcaaggatcccaaatgggcattatttttcaggttcaggatataaagcccacctgtatcctagaattaggcattgaaggataggccttaagaaaggatgctccaaaataccagtttggctacagagcagagtcagtgactgtttagaacaggtttggttccacctccagatcagggaatggcaggaatgggtgggatgtgtctncccgtgggtttgcttacaccttctaccccnggacatgaaa

SEQ ID NO: 428893 - DNA, 426 bp, Homo Sapiens
  misc_feature (35)..(35): n is a, c, g, or t
  misc_feature (49)..(50): n is a, c, g, or t
  misc_feature (52)..(52): n is a, c, g, or t
  misc_feature (163)..(179): n is a, c, g, or t
agcttaaggtgcttattttttctattaaaatcccnttaacaaaagccannantagaaatagaagacatagtatggtacatgcaaacggtgtctttcctgcttttttctagcactagatttatagttgagtagtctttcttgagtagaagggcagaataaaagnnnnnnnnnnnnnnnnncaaaaataactttttccttcagcaatatacctcatctgccttaaattttttacagctctttacagggaaaggggagaagggatgggaaagacacacagcacaataggaagtgtatgattacatcactatctcgtttgtaagtttcttttcctaatcaacattatgatttcgaaatacatgtatgtgaaacaaatattaagagaaaaagaattaacattgtaatgctgattgtaatactctcttccag

SEQ ID NO: 428894 - DNA, 352 bp, Homo Sapiens
  misc_feature (252)..(252): n is a, c, g, or t
  misc_feature (277)..(277): n is a, c, g, or t
  misc_feature (317)..(317): n is a, c, g, or t
  misc_feature (335)..(335): n is a, c, g, or t
tagagtttgtactgtgtctattttccatatatggtcattcaaacagtaaagaagcatttttgaaatacaaagacaaccatgaaaagaatgagccatagtacatcaaatattttgtgaatgatcctagttttccatttcattttgtaacagaacacaatatttaacctgtcctttcgtggtcaaaacagtagaatgcaacacagcaagacagtctgtctaagtactctgaaaccagatttaataatcaatagnaagcaacagaacatggaatcaaggnatgcatggtggaattaaaatggaggccttaccaaaggacntgatttttccttgggganggcaaaggtgggaaggt

SEQ ID NO: 428895 - DNA, 219 bp, Homo Sapiens
caaaatatgctagtatgggaggccacctttgggctaaagctcatggaatcccaactaaaaccaaaggccttccagcagagaacccttccgacagaatgcacttgagatgggcatctcagccccagagcaactccgtatctaatggaggcaggcaactgggccaactgcagcccaggggagcagaggacaggctgggaccaggcaccacaccttggtcct

SEQ ID NO: 428896 - DNA, 364 bp, Homo Sapiens
  misc_feature (97)..(97): n is a, c, g, or t
  misc_feature (202)..(202): n is a, c, g, or t
  misc_feature (207)..(207): n is a, c, g, or t
  misc_feature (230)..(230): n is a, c, g, or t
  misc_feature (278)..(278): n is a, c, g, or t
  misc_feature (291)..(291): n is a, c, g, or t
  misc_feature (332)..(332): n is a, c, g, or t
tttccttgtgagggcccggatcccatgacccctatcaccccattgaagcttaatcacctcccagagacctcctcataccatcacgtcgggcctaggnttccacatgggaatttcagagtgaccattcagcccgtagcagaagctcctctgggtctgtcctggcccacagaccctgtgtaggaaaagcacttgcccctgcgcngaggnccccctggcagagcccggttgangcagtgagggccctgcaggataagtggaaatctccccagggggattantgggggtgccttnctcttacagagtccaaggctgggtaaaaagcgcatgtgtgntttcgtgtcctggtttggtcccctgccccagc

SEQ ID NO: 428897 - DNA, 207 bp, Homo Sapiens
cctctgagaaaatcagcagggtgaagaaaagggagtttttatggtgctataagccagagaccccaaaaattgccatcaaatactcatccattctgagtgcaaaactcagcaagccactgtgaaaacaactcccaaaactagaagattcacaggcttccatttacaagtgagcccagaaacactaaggggagaccttccacttctgca

SEQ ID NO: 428898 - DNA, 414 bp, Homo Sapiens
taaactagtgatagaatttagctttattgtgctatggttactcagttaatgggcaaaccctctgcaacacttgtcagttacagactcctcatagcaaataagtggctgtagggaagaaagtcacagaagcacttgcaaaaattttaattagaaaaatcgtgtataaaaaataggtttagcagagttatgctttatgggccaaacaggtttcagttcagtttaatttaaccaggcttcctaaatttgttttttacctctttccattcaacagagcataaatattaaactgttatataaaatatatttcacttgaatcgctttaaatacaatgcaaaaatttgagcacaaaacaatgcattatggcctcatggaggaatttacaaaacattgtaatggaaaaattaacaggcttca

SEQ ID NO: 428899 - DNA, 123 bp, Homo Sapiens
aaactagaagtatctttaatcccaatttggagtatacagccaatagacataaaattagtatcaccaagcgtacctgcactcctctgatacaaataaataggtaaactgtgagaaagagataat

SEQ ID NO: 428900 - DNA, 334 bp, Homo Sapiens
  misc_feature (16)..(16): n is a, c, g, or t
  misc_feature (21)..(21): n is a, c, g, or t
  misc_feature (46)..(48): n is a, c, g, or t
  misc_feature (79)..(80): n is a, c, g, or t
  misc_feature (108)..(108): n is a, c, g, or t
  misc_feature (255)..(255): n is a, c, g, or t
  misc_feature (293)..(293): n is a, c, g, or t
aaaataatgatatggngcacnttttctggagtgaatttcccacgcnnntggttgcctaagaacggagaaaactgcgtgnnctgcgcggggccacataaaccgaatganaggcggggctcaggacgggtctcagccgccggtctgcgtcatgcaaaggaaaggcctggctcgtggaaagagtaaggcattcacctgtggttatcattcttaaacctcaaaagtggctttgattttggggaacgtgaaaagaagatnttcaatacgcagtcctcaagtagcatagcgctcaacanctaccgtttccaccagaactggatctgaaaagtggtcccaa

SEQ ID NO: 428901 - DNA, 436 bp, Homo Sapiens
taacttttaagcttttttccttttcatggcatttgtctgacttccaaaggggaagctaaagcctttgtaaagaaacaatatatatgacaaatacctaaaaataaaaccaccgcactattaatatattaaatgtcactatggatacacagatacaatatatcttaacaataccactaaaccaaactcttacaaaacaaaaatggtaagatgaaaaaggagtcttagataactgcctgcttgtttcaagtaatactagattcgacaaataccaatgtaactagagaaaccagctaagctactgaaactggaataacagtatatgatcttcaaactgcccttcaaaagacatttccaaagtacagggaccactgttacgctagtagcaataattaccatgtaataatttcctagtatgtggctacatgctatgctacat

SEQ ID NO: 428902 - DNA, 437 bp, Homo Sapiens
  misc_feature (342)..(342): n is a, c, g, or t
taagtcaatgatactagacaacagcattttatccctgggatcactagacacagggccagtaccattctgctggcaaattaggaacttggggatgagagtcagtggacaggtcacttccaatgagactagagcagcaacactggactaaagacgggaatcgattcctggaagttcagcaacataccctgagaagtaagaacaactggatctttgagagcttgaaaatacatatggagaacataaaaaagcaaccatgtacttcatttatttacaacttacttgatttacaaccatttatttgatttaattcattttacacattacatacacatgctctcattnggttaagattcatctacatatgattcgtgttgctataccattttaaagaaactcatcacaattttatttttaaaaaaacctctttggaaactact

SEQ ID NO: 428903 - DNA, 362 bp, Homo Sapiens
  misc_feature (321)..(321): n is a, c, g, or t
aagaagttaggaagtattccctccttcagtttttcggaagagtgtgagaaggcttggcagtaattctttaaatgttcggtaacatgccctaatgttaccatctgcatgtttctttgttgggagatttttgattactgattcactctctataacagactagttgtatgtctgttcagattttctgtttcttcacgattcagtcttggtaggttgtatgtttctaggaatttatccatttcttctatgttatctaatttgttggcatatgatttttcatagtagtctgttataattatttttaatttaatttttctgtttttntcttactctagataaaggttggatgaacttggttgatcttt

SEQ ID NO: 428904 - DNA, 169 bp, Homo Sapiens
ccatttattctcattttaatacatgaaagtggcacgaagtcggagatcaaaagccagccagacattaatctcatggctgctcaaacagaactgcgtctattcccagagaaatttctaaacgaagaagcaaatatgaccacgggttcccggcctcgtgtgggatgagaac

SEQ ID NO: 428905 - DNA, 189 bp, Homo Sapiens
cagtgcatccacatgcacacacattcaagcaggacataaggcggccggccggtccacttcagatcataaccaaaagtcttggcccctcaccactcacctgtcagcctcaggagccagggacccagcatggaaggcacacctcatgagaactaccccaatgctcaagtgcccgcaaatgcccacaaaccc

SEQ ID NO: 428906 - DNA, 394 bp, Homo Sapiens
  misc_feature (129)..(129): n is a, c, g, or t
  misc_feature (366)..(366): n is a, c, g, or t
tttgctttaaatactcatattttaatgccatataaatacatactaacaaaattagatctaaactattatgcatataactcctttataactattaaattaatataaattcacaaattaaatatatttaanaattacaaaaacattgacattcaaattaataacattaatttcataagaaagatgatgtttagctgaaatggtattgatgttgcatgcaaataatatcaagttcacatataaatttaattattttctgaatttttgtttcaataataagagtattcctgttcaagccttccagagtaacaatgtgccacaatgagtagctgatgttatcccactactaatatatacagaatgctgggntaaaatatagtccacaaatactaagtac

SEQ ID NO: 428907 - DNA, 417 bp, Homo Sapiens
  misc_feature (397)..(397): n is a, c, g, or t
agcttctagaagctgcatgcattccttgactcctggcctgctttcttctatcttcaaagacagcaattgcatcactccagcctctgcttcactggtcacatattctctaagtctcctgccttcctctttcacttcaaaagactcttgtaattacattgagttcctttggataatccaggataatctctcccatctcaagacctttaacttaatcacatctataaagtctcttttgccatataaggtaacatattcacaggttctggaaattacaatgtagacatctttgggaggcccttattcttcctatcacatcttccttagcatgagctgggcctgggtatctcatctccagatattatgggaaatatggctaacagtcattcaattgcagacnattggctaacattggtctac

SEQ ID NO: 428908 - DNA, 411 bp, Homo Sapiens
tttcgagaaaagcaaaacttttaatagttttacaaaaataatcctctttatgaacatgctgacatcttagatatgatcatgtatcatgtatggtggaaaaattcctatacaacttcatcaacgcaggaagcatcagggactaaaataacacaatctcagattaggggacttcacgcccatccttcccatacccatcaccaataaagacatttaggagttcagcaacaacaatgacagttgggcagatttgacacaggaaaatgtctaaaccttccatcacctagcaggataattctgaaaattcatttgtgcagataagacaggtaacttttaaaaaatgcttatttctgaacactgcactgagggtagacccccaaaatcagtttcaagagtgtgagataagaggcctac

SEQ ID NO: 428909 - DNA, 427 bp, Homo Sapiens
  misc_feature (34)..(34): n is a, c, g, or t
  misc_feature (401)..(401): n is a, c, g, or t
acatttctatgactaattttattatagccatagncttattttaaattgtttttcaatttaaatgaaaatgcttccaatcataaattttcccctttgctagttatttgttaaacaactaaatgaaattttagttacattctacaaaagcttaatcaacactacagttgtaaatcaccaggctgaagctaggacattagtatttcaaagcctcttctattactatatttataactttatttctgaaatatatatacagatttcattacattgccagttatttatatttgtttcatgtccacagaaaatagagtatcattacaaaattttaggttcatcttttttttaattgaaaactagtgaaattatctgaatgttttaaggaatatgctattttaattacnggatttttattggttattgtcaatag

SEQ ID NO: 428910 - DNA, 162 bp, Homo Sapiens
tctacagactccgttttcattttctcgtgttctttatgataatgatctttgtagattggttatttctgtactttatctgtaataaactttgtagatcctgtgaaccattactttgcctaaatcacttgagacttgagtctttaataacaaagcatcaatatt

SEQ ID NO: 428911 - DNA, 440 bp, Homo Sapiens
  misc_feature (23)..(24): n is a, c, g, or t
  misc_feature (309)..(309): n is a, c, g, or t
  misc_feature (400)..(400): n is a, c, g, or t
  misc_feature (422)..(422): n is a, c, g, or t
agtattttgtagctaatttttannaatttggagcactattataaacacaaagatgactcacaagttatctcttttataatattttaagtactccaaatttaaatatttaagtctatgatattgatatttattaaggtaatgtttttaggagtggagatataggaaatacaaggccaaaaaatcttaaaggcccactttctcatggaaaaataatctcttgctcaggttttctcaacaggagggaatgaaatggaaatgtagcagagtttcaaaactagaaatgtactagagatggaagctgtattcttnactaaaggcatcagcattactgttaacttccaggcttcctgccaaataatgcgtggttaccactctctccttaactttttgactctgtcgnagagaaggctccatggtttccntccagggcctctcctccg

SEQ ID NO: 428912 - DNA, 220 bp, Homo Sapiens
  misc_feature (99)..(99): n is a, c, g, or t
  misc_feature (153)..(153): n is a, c, g, or t
agcatttattaggactttttttcccccattgctgaacaaatgactacagattgctctacctcttgttctgtgaataaaggctggccgctgtggaagggnggtcagagcaggcaactgagagaaactgtattacagttaccgagtggcttattnaggaaagtggtgcaacaatcaggtccatgtttcattcaaatgacccctccattcccccaacaacatc

SEQ ID NO: 428913 - DNA, 324 bp, Homo Sapiens
  misc_feature (37)..(37): n is a, c, g, or t
  misc_feature (58)..(58): n is a, c, g, or t
  misc_feature (279)..(279): n is a, c, g, or t
  misc_feature (314)..(314): n is a, c, g, or t
acaagctaaagtcccatgattggctgtctgcaaggtnaggtgcaaggaagccagtggnggatcagtccaagtcccaaaacctcaaaaatagggaagccgacagtgtagccttccatctgtgggcaaaggccaaggaggcctggcaaaccactggtgtaagtctaagagtccgaaagctgaagaactgggaggctgatgttcaagggcaggaagcatccagtacggcagaaagatgaaggccagaagactcagcaagtctgctttattctagccgctctngtatccgatttagattgggggccacccaagatttnatggtgggtc

SEQ ID NO: 428914 - DNA, 325 bp, Homo Sapiens
  misc_feature (48)..(48): n is a, c, g, or t
tgaatctttcattcttacctgaataatttcacactctccattactctnggtcctcctaaggtctcctgtggagagtgaatatttccatcgcacttacttgctactttcaatgttctcaatgtcctattggactcactagggcttagctctgtggttgacacatagatatgcagattttcaaatgtctggaatgtgttactctactacatgttttttgaaatggaaacagatggaatgactggctactgtaataatactacagcagctccataatgcatgaaatcctaaaaagtatgtaatattataagtatcttttcaatacagg

SEQ ID NO: 428915 - DNA, 203 bp, Homo Sapiens
  misc_feature (41)..(42): n is a, c, g, or t
ctaagtttaaagtgaaaagtcaagggaataaattttgccgnnaaaaggaggaaatgcaaagttacatggcagaaagagtggatacaagcagaagagaattgtggacaataacttaatctacaagaaaaagaacagctctattttccagggacataaaaatcagtttaaaaaagcttataagccctgtcataatcctcagttca

SEQ ID NO: 428916 - DNA, 320 bp, Homo Sapiens
  misc_feature (48)..(48): n is a, c, g, or t
  misc_feature (305)..(305): n is a, c, g, or t
caaatggctctcctacaggatgtgataattatctattctataaagccntgggtttggagaggtaaatagctatttcacattaacacaataatgtcaatgccctatggaaaagataaaatacttggactatattttaaaggggaatctggggtcatgcatattgaagtttaactagatccctccagatttttggttttgatcctacacatttagatactagttttggattttagacagttggtgctgacagtgtgaaactcctattgcctgcagttaaattgaagctttggtgtctcatgtgtacnggcagtgaagctggt

SEQ ID NO: 428917 - DNA, 195 bp, Homo Sapiens
  misc_feature (45)..(45): n is a, c, g, or t
  misc_feature (47)..(48): n is a, c, g, or t
  misc_feature (91)..(92): n is a, c, g, or t
aaagcggtttatcatctgtgagatcacctgcttatgtggtcaatntnntttattagaaatttagagtttagattagttgctaggcactacnngtttacccacatggccacgtcgagtaggatgaggactgttccattctcagaaccttttagttcctgtatatctactttatggttacaagttccctcctaatat

SEQ ID NO: 428918 - DNA, 541 bp, Homo Sapiens
  misc_feature (488)..(488): n is a, c, g, or t
  misc_feature (519)..(519): n is a, c, g, or t
ccaagataccagatttatagtccatgaaagttatacagaaagcgctggagcaggaccagaaatgacgagactattacatttttatgagacagagaaaaggtcagggaagagtaggtcattctagtcctctgttaggagagatgtgagcactgatttttcggagggaactcagtgttaaggtcaggtaagcactgagaacatccagaacaaggaagaaataaatcaatctgatatggtaattaaaccagaaaggtcaaggcaattgccagactaagcgttcacataagaaaatatgtttaacaatgtggaataatcagaccaaattcatcgtatttgacttttccttctggaaactttttggtgagggcctggacaggacaggaaccttctacaatttacctatgaaatccagaaacagaccagcccaagtccagcaacatatagtggaaagatcccagccaggatccagaaggtcctttaccttaggngttacattaaccccacctcctcactggggcngcgtaaaggtccaggtgagata

SEQ ID NO: 428919 - DNA, 471 bp, Homo Sapiens
  misc_feature (104)..(104): n is a, c, g, or t
  misc_feature (377)..(377): n is a, c, g, or t
gaggtgaggtcttactttgttgcccagtcttgtctcgaactccagggctcaagttatccgcccgtctttcctcccaaagtgctgggattacagggcgtgacacncatgcccagccccagaaatgtgattttgaatggaaatttaatttgagaataagccagaatcatgtataaacatttgagtttgtgaagtagtggatccataaatgccaaccattctttgggggtctccaaagaatattccttgcaaatgttgagtgtaccacattgtgaagaagtatgttactatgtaatgtgctttggaaacaacagggtaacgagctattaatgaaaattttcactgcccatcttactgaacactgattagaacttcattcnttttaatatttttggtattctgggaatatccgttgggcaattatatgaatacacagacacatacatacatttcactgtgaattttttttaaatc

SEQ ID NO: 428920 - DNA, 102 bp, Homo Sapiens
ctgattacaatgaaaatttattctatacagttacaatgcaaattttaaactgaagatgaagttgtttaatagattagtagtctgactgaagcagctgcagtc

SEQ ID NO: 428921 - DNA, 136 bp, Homo Sapiens
ccaaccaattttgtcatttaattaacatccctaaatctatttccaactatttaataacaatgaggtcactttgcataattgatgctctgtataccagacatacaatatggataaagtactaagttttttgagagag

SEQ ID NO: 428922 - DNA, 271 bp, Homo Sapiens
  misc_feature (45)..(126): n is a, c, g, or t
  misc_feature (199)..(199): n is a, c, g, or t
aagaggaaactaaaaccacatttattaatgctgtttaggtggagnnnnnnnnnnnnnnnnnnnnnnnnnnnnnnnnnnnnnnnnnnnnnnnnnnnnnnnnnnnnnnnnnnnnnnnnnnnnnnnnnnacattacaattgctgtaaactaagcttgttcgctctagaaagttgttcatataagatattaagtgccaacgtngttttatgaaagactatacatgatattgtgacactacacttacattaaaaatatatggggtacatataataa

SEQ ID NO: 428923 - DNA, 315 bp, Homo Sapiens
  misc_feature (278)..(278): n is a, c, g, or t
  misc_feature (297)..(297): n is a, c, g, or t
ataaagtaaaagaggtttaattgactcacactttcacatggctgaggaagactcaccataattgcagaaggcaaaggaggtgcaaaggcatgtcttacatggtgccaggcaagagggcatgtgcagaggaactaccctttataaaaccatcagatcccgtgagacttattcactatcatgagaacagcacaggagaaatctgcccccgtgattcagttacctcccactggatccctcccatgacatgtgggaattattacagttcaaagtgagatttnggcaaggatacagagccgnacccgtatcaatgatgtt

SEQ ID NO: 428924 - DNA, 436 bp, Homo Sapiens
  misc_feature (62)..(86): n is a, c, g, or t
  misc_feature (328)..(328): n is a, c, g, or t
taaaaattcatcatgttaattatgtaaggaaattaaaaagctttggtggactgagtagaacnnnnnnnnnnnnnnnnnnnnnnnnntttttacttcaattacttaaaaacatcaccactagtctctctttttctcacttgctatctctcccctgccctcacctcctttgcagcaacccactgctatctttctcctcacttggttcagtattcctggaatatttagctgcatgacaggatgaagatccacaactaaataccatttagcattgatggttcagtaccgtggacagcagcactcatgttgggaatgggccttactgaaatcngcagagtgactttgtaagtttggtatatcacagaataaatttgttggcgtggctacaaatggataaggtgctgggccagaatattaaaattcatgggccgaattaatt

SEQ ID NO: 428925 - DNA, 243 bp, Homo Sapiens
  misc_feature (226)..(226): n is a, c, g, or t
aagtttaggagtttattttaatttttaagtggcatttaatatacaataggcataaaataaatatatgtttactagaaggaaaaacaacaggctattacttaatcatttgtcttttaccacatttagagtagaatttactgaacaggatcatatggcatcagtaattgctttgcctttctgaataaaagtgtaaattatgtacagaagagactaaaacaggtagcgntttaccatttaattaag

SEQ ID NO: 428926 - DNA, 509 bp, Homo Sapiens
  misc_feature (497)..(497): n is a, c, g, or t
acttgataactttgagggtttgattgtgttataaggtggattcagtagactggttttgtttctggaaaattttaggcagccagtgctcagctcccagctcctgggctgtgtgctctaactctgggagacttgtactgggccccaattttgctctctggctcctcaaggtcgtcaactcattgcgctgggggggcctatgtgctcctggacagctggtcactacactctgatggatggtgccagccataccattttgtaggatggtggcagcagatccatccttgcttgcatgtgccagcagcggcagtggtggtggagtggcagtgtggaggggtgcagacttgtcagctgtggaagggtgctagcaggtgtcagggtgcctgtctccctgtgggcattcacagcagcagcagagacagaatggctcagggagcgggggccctccactggcaactgtgcatgtgggtcctgctggtggtggtgttaagcacagggtnaagcacttgtgg

SEQ ID NO: 428927 - DNA, 506 bp, Homo Sapiens
  misc_feature (387)..(387): n is a, c, g, or t
aataggagaaaaaggcatataaatttattaacatacaaaaacatgggtacaatattaaatatgagacccaaaggccagatgattgaggcttatatatctgcttcatagggaagagggagatggggaaaatgcaggggttgttaatgatttttaggggaaatgaatgggcccaggaggctcagacattatcttgtaaatgattctcctaggaaactaaacgacgccagcaagttaccggaaggtgaggggtgaaacttaacctggtagataaagcctcccaggttatctcttggcactgcctcagaggactagatgaagagtcatctgactttagtctccattcttctctggtgggttaatcttttctgattatttgatgagattccntaggaaggggatcttaagacaattgcatttcttttgggaaagaagtttccttagtcagataaggaaattctagggggaagtctctagggggatagagactccagaagtctctagaagtc

SEQ ID NO: 428928 - DNA, 229 bp, Homo Sapiens
acacaatttacttctgagccctaaaaattaatcactgggtaaatcttactctctctaaataagcccctgtaatatatagtttgatatcgtctttctcatttcataaagtataactatttgtttaaatatctgattttagctcattgacttaattttattaaaaataggccatatgaaccagcacatttaaagtaaaacacatactcataagataatgaagcaaggacct

SEQ ID NO: 428929 - DNA, 120 bp, Homo Sapiens
  misc_feature (18)..(18): n is a, c, g, or t
  misc_feature (109)..(109): n is a, c, g, or t
aaaacaagttctgtatgntctagttactttgcatggcaagtggtactgattgttttagtttactgtggcaatataacatttctttttggaataaatgttaataactaanccgaattaagt

SEQ ID NO: 428930 - DNA, 360 bp, Homo Sapiens
  misc_feature (327)..(327): n is a, c, g, or t
gggcagaggtgagaacatgcttgtggaagagaagtccgtggcttggtgattctgcctgacctgcagtctctccatctgtgcagggtactaatgtgtcggagctcagggttccagaattcgtctagagaccggcagagctcctccaccagttgtcatttctgtcttgcccgtctgtcagggttggaaaagtccaaaccttaggacccagtttcctttctttcctgatgttttcctgccaggacaccggtaggctgttacttgccttgagctggaagaagtttgcatttacactgtaaatgtattcattgttttaattgatgtaaggtnttatgtacaattcttaattctttaagagatgac

SEQ ID NO: 428931 - DNA, 162 bp, Homo Sapiens
aggtcaccttgaatttccacacaatctcaagacactgaatagcaaaaaagtaacattacacagtaatgattaggatatttccttagactttgctggatctttggtcttaaggtaacatgtaaaagtagtgaagcctttcctttcatgggccctggtgcaatg

SEQ ID NO: 428932 - DNA, 187 bp, Homo Sapiens
  misc_feature (18)..(18): n is a, c, g, or t
  misc_feature (47)..(47): n is a, c, g, or t
  misc_feature (50)..(50): n is a, c, g, or t
  misc_feature (71)..(71): n is a, c, g, or t
actgaatgagtcaaatangatatttatagggccttaataaaagcttnggnctagctaggttgtattattanatgtcaaacaaactaaatgaaaagctttcaacgtgaaggctatccaaaaagagcagaatgagcagagcattaaaaatgttgaggtaccaaggcatcatgcattgagtgggggcttt

SEQ ID NO: 428933 - DNA, 204 bp, Homo Sapiens
  misc_feature (22)..(22): n is a, c, g, or t
  misc_feature (159)..(159): n is a, c, g, or t
  misc_feature (161)..(161): n is a, c, g, or t
cttaataaagtgaatttttgtntctcctttcatcctttcacaagagacctaaggctttgctttgtctgtagctgtataatttccccaaaataatacagcttcaaaccgtgcactgacaaagggaattctgagcattcttggccggcagccttggcgtgnangcagaagccagccctgtgaagacagtactgtgccagcctaaaa

SEQ ID NO: 428934 - DNA, 126 bp, Homo Sapiens
agtatgactgaattttggaagatagtgtgcagtgccagcttttatcctagaaagactacctccaaaggaacttcacagagtggcatttttggtgaattaccattgatcagagtccatttttcaacc

SEQ ID NO: 428935 - DNA, 120 bp, Homo Sapiens
ctaagtccctgcaatccccaccaaggtctgcaaggtctacttcccctagactacaactacccattacttgtgccaaatattcaataaatcgtaaccttagcagggagagggatgaagaga

SEQ ID NO: 428936 - DNA, 205 bp, Homo Sapiens
ccaagatggtccctgccctaggtaaagtcttcagaggacctcacacctcagaagtcatctctgctatgggctgtgaatcccaccatacctacaatgatctcagcatcctgcctttttgtgtcactccctcgaggttcaaagcccttggaagaacatttgcagatgccccagctgtcagagagaaaagattatcttcctcctttag

SEQ ID NO: 428937 - DNA, 171 bp, Homo Sapiens
  misc_feature (159)..(159): n is a, c, g, or t
cccaaatagcagtgaatttctttttctcacatttccaagtgccagtcagcttcataactaacttctttgcccttaaagtacagtcaaatacagtataggaatgttgtaagggattctgctgatgaggaaagatatatcagaatagcaagtgtttattcngaattcaacacg

SEQ ID NO: 428938 - DNA, 140 bp, Homo Sapiens
ggactgacaaccgggatagctcaagttcgagagaccaggtttcaaacattgtaagttccaggctttgcaagtctttattctctggggtaatatccagtctttctgttattgtctcttaaaattctcttccatggcccaca

SEQ ID NO: 428939 - DNA, 178 bp, Homo Sapiens
  misc_feature (144)..(144): n is a, c, g, or t
agctcctgttactccctcttaaattatgtgggaaatcttaacggaagggcaatgggcccaggaatacctgcagcgtagtgacctcagatcctgatactcaccatgaaactctaagatactgattggaagcgacttgtggctgcnggctgtgtgtgtgactctgccggggaccctggca

SEQ ID NO: 428940 - DNA, 287 bp, Homo Sapiens
  misc_feature (15)..(15): n is a, c, g, or t
  misc_feature (264)..(264): n is a, c, g, or t
gtcgtagataccagntaggatacctaggagagttcttaaatgcctcttctttcaaggaaaaaaattagaatgaattaactagttaacaaccaagagtaatagctattatttctacatgtagctgcctaatgtcacacacttttatatattcatagtgattccttgtaacaaccttgatacatattgcccggattttgaaagggctttgaggttatttgcccaaggtcatgataacagagatgggtattcaggaataagatctgncttccaaagcctttccaggccgg

SEQ ID NO: 428941 - DNA, 336 bp, Homo Sapiens
  misc_feature (42)..(42): n is a, c, g, or t
  misc_feature (44)..(44): n is a, c, g, or t
  misc_feature (49)..(49): n is a, c, g, or t
  misc_feature (107)..(107): n is a, c, g, or t
acctgcgcaggtcaggccacagttttctaccagccctctgtngntcacnggttacaatcgttttcacgctgtttttgcaatgctatttggatgtatcctgcctatgncctaccagtagtttgtgagttcagtctttgatgtgctgattaggaccaggtccatgtgcatgcagcttgaggggatcatcctaggagtttgtaaacagttttatgggttagcttttctgagctcctttctcttcttagagtctctggttctttccagttccctggggctccaaaagggagaaaatacggtaaactcgccaccattttgggtgatagtttaaattttggg

SEQ ID NO: 428942 - DNA, 508 bp, Homo Sapiens
  misc_feature (22)..(22): n is a, c, g, or t
  misc_feature (144)..(144): n is a, c, g, or t
  misc_feature (251)..(251): n is a, c, g, or t
  misc_feature (419)..(419): n is a, c, g, or t
  misc_feature (482)..(482): n is a, c, g, or t
  misc_feature (488)..(488): n is a, c, g, or t
cacaagcccatgtccacgaagnacgggactccaacaatggcagctttggcttgcataccaccattggactgaccaaacctttcttagaactgccagtgtgacagagggacctctgggggagggcgtcttgctttctcttgggtnagtatatctcactaccctctttgtaggttagcagatttgtaacaggatgttactggaggaaggggaagtgggaaagctggagagtattcccactcttttcccttacnacaaaaactttccttctcagtcctgtctccaggagatggaagaccaaataacacaacagccagtgtgcttttcctacccaatcctttctttcaccctcttatcctaatacatttccagcatggttaattcttttgcagcatagacaagagaaccccatacacgctggnaaaactggcaaaagggcttaggtgggaaactccccagtttcttggttgacattttcaagtggnatttanaagatggtaatttaaaaaac

SEQ ID NO: 428943 - DNA, 325 bp, Homo Sapiens
aaacagcaaagaatttttaaaatataaagggtatgtacaaaactgtagtaaccatcttactgaaagatcaaacttgttccctttcagcttgggaataagacagagcttcctattaagaccaccacatctactcatctttaagctggtgattctcaccaacacatctaagcatgaaagaaataaaaattataagataaaaaggaaagaaaactctcagtacttaaagatgatataattacatagaaaatcaagaagattccatggataggcttcccaaaaaacaatatgtaacataccagcaacaaatggtaagaaaaacacgttg

SEQ ID NO: 428944 - DNA, 402 bp, Homo Sapiens
  misc_feature (270)..(270): n is a, c, g, or t
  misc_feature (315)..(315): n is a, c, g, or t
  misc_feature (360)..(360): n is a, c, g, or t
  misc_feature (380)..(380): n is a, c, g, or t
gagcatatgtgaaagatttatttgactcatttataagggaaccagcaggatagtaaacccagttcaaaaggtatttgggaaacaaagtatgtataggtactgaagaaaaatgttagaaaatatttgataggttacatataaaactgataaaagtcctaaagatcaataaaactataactttggggactgtcttttctagtagaccagaatgatttgcatctctactggataagaatctgcaggtaaatacgtaatttcataggctctggntcccaatggcaaacactccccttaaggataattaaataatattcnaggtatataaccattggaaatggatggtccagtccttcccttttngcattaatttccatggttcnggtaaaaaatttttcccaaaaa

SEQ ID NO: 428945 - DNA, 379 bp, Homo Sapiens
  misc_feature (361)..(361): n is a, c, g, or t
gtaaagcaatttcaaagaaaaattattcattgttttggataaataagagcatatcattgaattagaaaaagagacactggaggaagactttgaagatacttaagttggatgtaatgactaactgaccaagggctgaggaagagggaattaaagctataggggaatggattgctttttaaaggaagagatgttatgggtgttgtgaatgtgtgtaagttttagttttggggacaggaatttaggaaagattattcttcactaatacaatcttcataactaactcgttttctgtgaatagaagtggaaaatgcaaatgggaaagaattccccagagagatctgaggctcccgcctaaagaggnggccataattttgcccat

SEQ ID NO: 428946 - DNA, 316 bp, Homo Sapiens
  misc_feature (191)..(191): n is a, c, g, or t
  misc_feature (254)..(262): n is a, c, g, or t
gccaaaataagaatcttatttactgctttagtcaagaaggagatgttatttcacttgtgacttcctcccaagtgaatgagtatacaatttaacaaactaacacagttcagtttattaagttacaatctgtaaccacctaatgtagctcagtgtatggtggatactagatataaacaagagtagggaagtcnttggcacctgcatgatgcgtgccggcttttaaattcagaaagatgagaagctacaatgcaacnnnnnnnnnaatctacagataccgccaaaagaagaaatgtttatcagattttgaatgacatac

SEQ ID NO: 428947 - DNA, 299 bp, Homo Sapiens
  misc_feature (99)..(99): n is a, c, g, or t
  misc_feature (197)..(207): n is a, c, g, or t
aaagaaaagaaaaggttagttctggtttgatgacccatctctctgttgtgttatttcacagtccttttccactgtaggtggcttcatttataatatatntataatgctgatgtttttgtccttcttgccacaaacactaagccccaattataataagcagaaccatttaagttttcatcatatgacccacaatggannnnnnnnnnnagatggttttacaaaattgagatacgatggctatgggccatcggcatcttcttacctgttggaagacttgatctgggctgtctaagcctttc

SEQ ID NO: 428948 - DNA, 182 bp, Homo Sapiens
cagccaactttttaaatataatgtaaggtaagtgtccaacttcattcttttgcacgtgactatccacttgtcccagcaccatttgttgaaaagactgttctttccccactgaatggacttggcacctttactgaaaatcagttgactacagatgtttgcatttatttctggaatcaccattt

SEQ ID NO: 428949 - DNA, 354 bp, Homo Sapiens
taaaccagctataaatttatttaatcatgcttttctgcaggcaacttttctccatttgatcttaaaacttcatgagaggttctgccatattctttgcaggtaaacattacgtgtgccttctctgatctaccggcttcaaccatggaatggtcatccctgtctagagactcataaacaaccatggatggagctggcatggcacttggaggctggaggtggtgagaggttgttgtacagagtattcaatttctccaatgaattcatccagtcagactctcatacattggctctcaacaagactcttttattttccccttttccctgcatagtccttccaaacctgaaattcccttg

SEQ ID NO: 428950 - DNA, 457 bp, Homo Sapiens
cattcagtatttattaagtacccactgcgtgcaatgcacagcatggggctacacttatacaaaagagcaggcaaggtgagactatcaaatagcactggtacttggcaaaaactaaacctatcacagcatcccaaggggcaggtctttgaggcaaaggtgatcgggccaactggtagttataaactgggttactagttcttccacttacccttgaaaatagcagaattcaaatagttattcacaggttaggtaggcactaattatttctgcttcatgagtaatcagggtggaagaatttatcaccacctacagtgtccagtcatttcatatctgggatatacagacatccaggtaagaaaattctgaagcaaccttttaccagtggacaccaagccctaaatgttttgtggatctggggaacacccgcagctgggttttaggattatggaagaccaga

SEQ ID NO: 428951 - DNA, 463 bp, Homo Sapiens
  misc_feature (347)..(347): n is a, c, g, or t
  misc_feature (444)..(444): n is a, c, g, or t
tcaattctgaataagatctattgccgccttgccatgaacaatgaaaaatagtaaacatttatgacaatctcataaaggatagtaatgctgaaagaaagctttctaagccaccattaattaaaaataaataaatttgattaaccacatttagaaaaagattggattagctttccattctttctgtataaaatattataagagcattgtcaataaagggcttttgagagaattaaacgagacagcacattcaaaagcactgagacccatcctgcacagagaagggctcaggtatttgttgggagaattaatgacaagcactgctgagacagaaggagtccggggcagangggcatttccaggccccagggagcccatgttcacatcactccttcccccagtcttcacaacagaccctaagattttagagatagaggggcagggccntgttgaccggataaagaag

SEQ ID NO: 428952 - DNA, 162 bp, Homo Sapiens
  misc_feature (62)..(113): n is a, c, g, or t
tggtggttttgtgcatagtaatccaagggaaaactatagaaaatccaaaggcatgatttatnnnnnnnnnnnnnnnnnnnnnnnnnnnnnnnnnnnnnnnnnnnnnnnnnnnntggttatctttcaatatagtatcaatgaataaatcaaaaatgatggtca

SEQ ID NO: 428953 - DNA, 173 bp, Homo Sapiens
  misc_feature (22)..(22): n is a, c, g, or t
tgtggagctggggtgcgttacnttctcggggcaggttgttccttgcatgctaagccaggccatgtgaagataatgaagtcccgcctcggctaccggacaccgtttgtaccatcaggccatcctgtccaagtctcctggggtctttgcctgcttgtttaaacactgaaggccca

SEQ ID NO: 428954 - DNA, 301 bp, Homo Sapiens
  misc_feature (33)..(33): n is a, c, g, or t
  misc_feature (243)..(243): n is a, c, g, or t
tcagctcccccatgcagggccaacaaacacttntatgagtaaactgggaagcttttctctctttctgtcttcatcccagatcaaagaatcccgagttaggatctggatgaaggataagcccctgaattgtcgatgggctcacccccacactgacccagcatctgaacttgcttaacagggagccggggctaaactgcttcaccctgcctgagaaccagggagcactgcatttctccacagggnggaggagaagaggcagaataaaccaagcctgggacacctccctcctgtctaggtgtac

SEQ ID NO: 428955 - DNA, 201 bp, Homo Sapiens
  misc_feature (19)..(19): n is a, c, g, or t
  misc_feature (44)..(45): n is a, c, g, or t
  misc_feature (47)..(48): n is a, c, g, or t
  misc_feature (129)..(129): n is a, c, g, or t
  misc_feature (157)..(157): n is a, c, g, or t
atgagtaagtgtccctgcnggtaaaaagtattgttgttgttttnntnntcctttcaccaagaattactgtatgaaagcaaatgcacacagtcgactactgaccctaacaaggatctcttaggaacttgntcaaggccactgtgacctgaaggttgtnactgacttccaaaatgcgtgctgtaacttctcatgcttgccctt

SEQ ID NO: 428956 - DNA, 145 bp, Homo Sapiens
aaaaaagataaagattttattttggtatttacaagaattcccaggtacgaagatatctgcatgggtggaaatcaggttcaagcaacgtactttgcattaactgataatacctcagctgcggggttaaagttttcccagtatagag

SEQ ID NO: 428957 - DNA, 175 bp, Homo Sapiens
agggaatgattgtgacacacaatttgctcagccttgagatctgcccttgtgtctttagggcccagatagaatcaccaggatgaccactgcaaggagggtttagaaaccaatcagtgagttgcatgaggtttgctttctagcttgataacatatagggttgggggtaaccatgggg

SEQ ID NO: 428958 - DNA, 432 bp, Homo Sapiens
  misc_feature (342)..(342): n is a, c, g, or t
  misc_feature (391)..(391): n is a, c, g, or t
aatttttaagaaaagaaatttatttggctcatagctctacagggtgtacaagaagcatggtgccagcatctgcttctggtgagggcttcaggattcttccactcgtggcagaaggcaaaggggagctagcatgtgcagacatcacatggtgagagaacaagcaagagagaggaggaggagccaggctctttacaataaccagttctcacaggaactaagagtgagaattcactcactcctggtgagaatggcaccaagccattcacgagggatccacccccatgactcaaacatctcaaaccagcccccatgtccaacactggggatcaagcttgcaacatnaagatttagcggggccaaacagaccatatccacccatggcaatgcggancaaaagggaaaaaatatctcagtaaatttaattccaaatgg

SEQ ID NO: 428959 - DNA, 456 bp, Homo Sapiens
aaaatattacctaggtttataggtcattgaagagttcagaagacactttcccaagcattatcctggcaacaactctgtaaggtcacagagctagaggcagggtgcagtgacttgcctgaggtcacgagctagcccatggagggcagaaagcgcttgaagtttctgaggccaagccagtgctcttcgcatttcccatcttgcttcccaggaggttccatgcagatcctgtgggaatgggcgtttctgcccttattcccctgtgcattcttcacgagtggttggatttccatggacttcattctgccaaagactcatgtgctgaatcatatggaactgctgaccttccaataaaccagcatgatttgctaaggcgtagagccaggctgagaaggaagaggactcaggccagactggtgggttggaatcctagctgtgcagccgagcagcttgagcacg

SEQ ID NO: 428960 - DNA, 424 bp, Homo Sapiens
  misc_feature (351)..(351): n is a, c, g, or t
taatctaaaaggaagatgcattaaaattctgagaggtagaaaaaaacacagccatcaactctagggctactattacgtcttacagaatacctattgagatattacacctattttatcttaaagagctagggtaagtttcattcatgtcactgaattggaatgctttaatgctcacagataccttcagtcataattactgccaccactaactggcactgtcaactcacttctggcttcagataattaggctattcaagtatatgaaaagagtccaagaggatgaaactaggcaatacagcaacaaagctcctccattaatctatctgccactcagccagtcaggtgcctctngactgccctgataaaagatggccaggttactttgctgccctcttcagtttcttaaagtttgaagagctgggaa

SEQ ID NO: 428961 - DNA, 422 bp, Homo Sapiens
  misc_feature (354)..(354): n is a, c, g, or t
  misc_feature (363)..(363): n is a, c, g, or t
  misc_feature (370)..(370): n is a, c, g, or t
  misc_feature (375)..(375): n is a, c, g, or t
ttttttgttaatgtgatctgactcaatattcatgtcacctagttcaacaatataaaaaaatcaccaagttttacagcaagataggaatcattgtacacactagcaaaatgactagtgaaaatgccagaggaccctgacaaaatacgtaacttggagccatataccttttattagcaaactgatgattcctggtttaaagattattgcatttcaccaattttcaaatatggcttttcctcccaaatgttatcaggatgttatgtttgctgctattccagtagtcattaagcacagacctaaacttaggcaagaaaaagccataacggtgctttgcctaaacaagtttacttcttntactgacgntataggnaaagntgtttttcaaaaagtctacccagtaagaggctctccggggaaacttg

SEQ ID NO: 428962 - DNA, 310 bp, Homo Sapiens
  misc_feature (117)..(117): n is a, c, g, or t
  misc_feature (263)..(263): n is a, c, g, or t
aatctttttctctcagtgataagttgtcatcagtttaaaataatgggttatgaaatattatttgcaagcttcattataacctcaaactaaaatcatataaaagatgtacaaaaaatnaaaagcaagaaattaaacatacaaccagagaaaatcaccttcactaaaagacaggaaggaagtaaagaaagaagaccacaaaatgaccagcaaacaacaaaatgtcaagagtaagtcattatttataaattataatattgaatatnaatggactaaattctccaataaaaacattgagtggctaaataaaaag

SEQ ID NO: 428963 - DNA, 431 bp, Homo Sapiens
gtacaagccatttattaggaaggtagcagtctgggacaggcgggaagagagtggggaaacaggactgggacgacgggaagaagccaggcaaaggatccctcgggagctctggggcatcagtgacagcccagacagtcccaccttgaggcgagggcaggctttcaggccccgcaccagccagtccttgccaggcggccggcctaaggtgggtaaactccaggcaaggaaggaggaggcttaagggtccagagtcaaccctcaaaggaagtcaagggtgcaagacagagcagcagagtggcccaggcccccgggggtgcaggctcagctgggttacgagggtgtccaggcaaccactgcagggcagaaatttggggcttcctgccggggaagaacaaggagcttggaatgttcaacctcgggggccaaaaggc

SEQ ID NO: 428964 - DNA, 418 bp, Homo Sapiens
  misc_feature (334)..(334): n is a, c, g, or t
  misc_feature (387)..(387): n is a, c, g, or t
ttttttgattatttttttctattcatagaagacaaaacaataaaccaatccaaaactatgcttctagtttagcagcaaaagcacaaaggttcacatgaacagcctcaatgctttctggaagacacctgtagaggaccactttacattcacaccccacccaaaaagtgacacaaataccgctctataattctgaaacatttctaaaatgtgatggtccttaagccacattctctgcaccccctgccccgccccttaaggaaaggcgcgatgagtcccgtccttctctaggacaggttctagtagcctccatcacatgtgcatgttggtgggcccnagatcccctgggctaaaacaaccaggtcagtgggacagcagaggcagtgtgtncaagtctcgggttcatagaatctggggtttt

SEQ ID NO: 428965 - DNA, 422 bp, Homo Sapiens
  misc_feature (289)..(369): n is a, c, g, or t
tccagctttctggtgcatttcataagaatctgctgttacctttggttttagagatcttactcttttaagtcaagtttttgatcttttgactttatagaaactactatgacctttcattggcaatctgaagcgctctttaatattcacaaaccttaacctaagtttttgacttataaaactttcccctccatctctttttaattcagcctttatctcttctgagaactctgtcagtggcatatgtttctcatttaatactcttgctcttgatgagtttcttttcacaccnnnnnnnnnnnnnnnnnnnnnnnnnnnnnnnnnnnnnnnnnnnnnnnnnnnnnnnnnnnnnnnnnnnnnnnnnnnnnnnnnggaagatttccaacatatacaaaagtaaaagtggactaaaataatggcaactc

SEQ ID NO: 428966 - DNA, 476 bp, Homo Sapiens
  misc_feature (376)..(376): n is a, c, g, or t
  misc_feature (423)..(423): n is a, c, g, or t
  misc_feature (431)..(431): n is a, c, g, or t
tacagacttctgaataaaacaaatccaaaataaaggtggaatgctgctgacaaatcaggcagaagataatggttgagaagactgttatcagcatgaaaattcagggccctggcttttgatgttctatcccaaaaaggtagatagcccacatgttccagtaggtcatgtgccacctctttctccttggagaggaggaggtgagtggcaagaaaatgtagcctgggaatcctcctcagaaagaagggcattgaagcccacttcctggctccgtggacacctgagcctgcattctcaccagtggatcaatggcagcctgacatagcaagaacaggcagaatgatattaagctcattttaagaatgcagggagaaaaacnatacttttttgggaaaggatttccctggaaaaaccctaaggttattnggaatccngaattaacttggtacccgtggtaactttaccgttggtcctgtgat

SEQ ID NO: 428967 - DNA, 254 bp, Homo Sapiens
tactaaatttggatgaaaattaatttttgtacatttttgatattcaatgcatatttgatgattacttcaatctcaattttatgggagaagggaaagtagcattactgagtgcctcaatatacctggactgtgccaggcactttcataactcttcccttaatcctctcagcaaccctgaaacttatgcagcactatcttcactttatagaaaaggaactctatacatctgagattcagattatctacaagtctga

SEQ ID NO: 428968 - DNA, 477 bp, Homo Sapiens
  misc_feature (51)..(74): n is a, c, g, or t
  misc_feature (424)..(424): n is a, c, g, or t
tccatctaaagagcattttatttctgagaaatacagagggacaaaaggttnnnnnnnnnnnnnnnnnnnnnnnncgaaaagggaaggaaggtgctggctgaggcatctggacttctaacccatcaacacactcacctccacattagggttttctttctctgggacatacaagcttcaagcccaaacctctttcctgagtctcagcatggaagttggcagggtctgcaccccacgacatgtaagaacacccctggagagagattggagaaataagaccaggggctttagaggatcttcagttcaatacaaataggatccagaatcattaacagtaaatatttaaaagggggcttaccttcaatgacatgccaatgggagtcttccaaacttaaacaagctcttctctttcttgggctcgggaganctggatggagggagcatgtggaatcttgtctcctgacagcgtttaaaggactc

SEQ ID NO: 428969 - DNA, 108 bp, Homo Sapiens
  misc_feature (42)..(42): n is a, c, g, or t
  misc_feature (50)..(50): n is a, c, g, or t
  misc_feature (76)..(76): n is a, c, g, or t
ttgttagacctaaaattcccatttggctcatttaaacatgtntcctcgcngagatttccggcactttgttcattangcgtgcattccccctcaaaccgaaaaaaagaa

SEQ ID NO: 428970 - DNA, 247 bp, Homo Sapiens
  misc_feature (55)..(81): n is a, c, g, or t
  misc_feature (159)..(159): n is a, c, g, or t
  misc_feature (168)..(168): n is a, c, g, or t
  misc_feature (174)..(174): n is a, c, g, or t
  misc_feature (206)..(206): n is a, c, g, or t
accccagagtcctcactcctggctgttgcacttgaatcttccctttccttgtagnnnnnnnnnnnnnnnnnnnnnnnnnnntttagaggcatgcttatactttgtacattcatttattgaacggcagtagtgttccaggtagcagccctaggcactttnacatactcnggtttncacagaggcctggcaagggtaaactggaaatnttgtccctacttaccaatggaggaagcagacaattcgactc

SEQ ID NO: 428971 - DNA, 254 bp, Homo Sapiens
  misc_feature (147)..(147): n is a, c, g, or t
  misc_feature (216)..(216): n is a, c, g, or t
  misc_feature (235)..(235): n is a, c, g, or t
acccccattgacccacagggctgtgaggacacatgtgctcagagcctggctcactgcatgccaatagcatgagatcccgaaatgtttgttgctcagagttgaacaaatttctgagtgcctttattactaatcctgaagaataatgtnttttcagtatcacacattaagacatggaaagaaaaccccattttaaaaatacggaagaaatcattatanaatacacatcctaaaactngggtcctcggtggttcggt

SEQ ID NO: 428972 - DNA, 122 bp, Homo Sapiens
atagagttgttttaaaaattttccctaaactctaaacttctttctcagcttcaaagccttccatagtgaatatcctaaagagagactagtgcatattggtttaacacttactaggatcactc

SEQ ID NO: 428973 - DNA, 351 bp, Homo Sapiens
  misc_feature (303)..(303): n is a, c, g, or t
  misc_feature (314)..(314): n is a, c, g, or t
  misc_feature (329)..(329): n is a, c, g, or t
  misc_feature (338)..(338): n is a, c, g, or t
gctttaaacagcaacagatagagttgagttgctttggcctattgctaaaggcatctaacccacctgctttgtgggaggtcatctgctttgaatctcaactgtatccaagtcagatttaaactctatggggcattggaattgtcctctgaatcatctccaactctgcaggatacataatagcaccactttgttgttctggaatttaaagacagggtcttattcaactttggctatttttgtgcagtccatggatccttgaaacaggacattctactttaccaatatctgactcatagaagaccntatctatatanctaccaggtggctantaaccccgnaactcctacccgg

SEQ ID NO: 428974 - DNA, 184 bp, Homo Sapiens
  misc_feature (134)..(134): n is a, c, g, or t
aaatctaaatattattcctcatagcacagtttctggtctccttaaattaaggatcctactcatcaggattgaataaaaagggggaaattcctaaaattggtatattgtataatattgtgggttaagtaaaattnaggggggcattatggaaatgtacctattttaaagggcagtggcaattacc

SEQ ID NO: 428975 - DNA, 120 bp, Homo Sapiens
  misc_feature (16)..(16): n is a, c, g, or t
taaacaaatatcctgngggcacacccattgtggattgccttatcctctagtgtgaatttgttttagctctgaatgtctgatcaccctaaccagacatctacccttcccaggtaaccagcc

SEQ ID NO: 428976 - DNA, 466 bp, Homo Sapiens
  misc_feature (361)..(361): n is a, c, g, or t
  misc_feature (433)..(433): n is a, c, g, or t
acagtttttccttaaatatacattttattattacaaaagcatagttgctgttgagttttagactctttcgattcttttatcatgtatcttttgaggacagctttgaggaaagttattataaggtgaatcatatatgatctgtggtagatacacactgtgtatatcgaatcgggtattgggggaaggtaggaaacccaattgaactcttttgtaaaatgccagggaaattatatgagagcttttttgatgccagctataaaaataaacccagcaggaacagagataatccagaatgagttggatgtgtctttatgcaactggaaacaagtgagatatgtcttcttggctaactgctatgctnctgctgtcattttaattacacaaacaggatttaatgttctgtatattgaacagtgtttattttgtggcttcngatggcatctactctgaaggtaagccctttctt

SEQ ID NO: 428977 - DNA, 188 bp, Homo Sapiens
ggatgagctaatactcccagcctggatacttttagttcaaatttctgtgagagagattgtgaaaggtccagctcatcttttcatatccagaagttctgtaggttgctgggtagacaggattgctgctcaaatccagggcccaccccttggtccaatctgctatgggccagcaagaggggttgacagtc

SEQ ID NO: 428978 - DNA, 472 bp, Homo Sapiens
  misc_feature (104)..(104): n is a, c, g, or t
  misc_feature (193)..(193): n is a, c, g, or t
  misc_feature (246)..(246): n is a, c, g, or t
  misc_feature (350)..(350): n is a, c, g, or t
  misc_feature (413)..(413): n is a, c, g, or t
gacataaccatgcacagatcaattttttcaacagtggtagaatgtaaggagttgtagatagaaaatcatcttggcaaatttggtcccatgtctctagtttgggnaaatttccactcagaaaggaaaattccttttggggggagttctatgacaatattaagcaagggttgttcctggttagcctggccttgtnacacctcaagagtaacagtaaacatctctaagacggaaaaacaaataaaccangtcaccaccactttctgacatcactggaatcagggtagaccctggaccttatcttaggtccttaaatctctgggctcctgggaaactttctggcactcttccanaggggaaagcaaaagttaaaatctatatggtagttccttagttacatccaaagttgaaggtgnctgcagtattttccataagaaggcggatctgacttttcagattgggtggtgagaacacg

SEQ ID NO: 428979 - DNA, 248 bp, Homo Sapiens
agaaagtcttatttatttattacaaaagcaaagttcattcacaatatgaactgcatactagatatagttatttctgcattaaactgctttccggaatccctaaacaatatagtgtattgtacaaccataatgcaagttatgttttgcatacaaaatatgttctttacatcaaagcacatgttaacaaaaacaagttctagaaagcatataccctctaagactaatgaaaacgtctttagcagggaatt

SEQ ID NO: 428980 - DNA, 502 bp, Homo Sapiens
  misc_feature (485)..(485): n is a, c, g, or t
tactctaaaataaccactgcctcccatttcacagtgaattcataactgtcaattccaaagatcaattccaaaattagtttcggtcctagtcaagtttccttgacttcacaaacgcatttaacaagaggatactccatatttgtaacgattttcttctaaaacatacatgggagattattgactcctggctcctcatttaccaccttttcccactgtctgcattggtaactcttttgaagacacccctttaattgctatttgaacctgggcctcactctcttgtgttatcagtctgcacacactccctggacaggctcactggcttctgtgactctgtaagcaggtaagtatcaaatctgaagatatgtgggcgaatgtgaaaaatatggcctgaattttaagtgagattttggaatgtgggatacagaagataatgaagcctaatttacaaaaatccaactttggtagttatcccctctctccantgagctttgcttaatcc

SEQ ID NO: 428981 - DNA, 214 bp, Homo Sapiens
tggcataggggtgtgttaaacaattactgagacactaagggctccattaacagaaaaagtttagcagtctgcaccctgtaaggctcacatcattgttttcaggttgtagttgaagaaggtgatgacctagagtgttgagaaacttcccaaaggccctacactagtcagtgtcagacctaggattcaattccagcttcccctcaatataaaactc

SEQ ID NO: 428982 - DNA, 460 bp, Homo Sapiens
  misc_feature (307)..(307): n is a, c, g, or t
  misc_feature (383)..(383): n is a, c, g, or t
  misc_feature (388)..(388): n is a, c, g, or t
  misc_feature (428)..(428): n is a, c, g, or t
  misc_feature (442)..(442): n is a, c, g, or t
actaaaagagtcacagataatttactagccaaaagcagtggtgtttttaattaaaaacacctctcaatattaacctgtccctgtaactgagcacttacttctatataaagacagacaggttcccttgtgaaaataaagaatatttaatacctcccatctaatacatagtacaaagtactccacttttatactgtaaatattgtaatagatcgcactatataatttttgtttcttattgagtacaatttcacagttatcttttttcaagtaatcttgcactttctaacacaattatcttctttaatgnatttttgaatcataaaaacattctgctgcctgtctcttttacatatccaatacaatagagcactatcagtctttgntaatngacacaggggcgtatggggtgagtgaataatctgtgttcncaatatatataagnagtcaacatttacatatg

SEQ ID NO: 428983 - DNA, 292 bp, Homo Sapiens
  misc_feature (147)..(187): n is a, c, g, or t
  misc_feature (248)..(248): n is a, c, g, or t
gtgaaaaagttctgatgtcaactcatgtttggtatgatagattttaaagggctaagatatagagaatcacattcctttccaggagttacttttgctgttatgtccttctggattctacaatataaatctactcctagaacatcacannnnnnnnnnnnnnnnnnnnnnnnnnnnnnnnnnnnnnnnnatttgtctagtagagataagctataaaattctaccactaggcaattccaatctgaatttcnttttttcataatttaattctttaaattatctgaagtgggattag

SEQ ID NO: 428984 - DNA, 153 bp, Homo Sapiens
acgattaatgttttattattcatattttgacaaagatagcatattatattccaggacatggtagttaccatgtggggaaacctatcaaagcatttttaatgactgcttagaataactgtagaaagtactttctcaatgatttttgtatgcaag

SEQ ID NO: 428985 - DNA, 436 bp, Homo Sapiens
  misc_feature (373)..(373): n is a, c, g, or t
  misc_feature (411)..(411): n is a, c, g, or t
aaatcaggaaatcgaattttattgaaagcacattgagtaagttacagaatcacttgaaggctgtagaaacaaggcttgggaaaaaagcagaaacagagaccaggtacctagaattacaccaaattccatcacagagccagataggtgaggacagcctcagtgctgctgctgctgaacgcccagtgctgctgcctttgtcacagccacagctggcgttggatgctggatgccatgctgaccccagtggcaaggcgtctggacactggatactgctgccactgctgcaaccactgtaaagaattttttccatcctcacctccagcctcagaaatcctaagcaaatgcagctgattggtcaagctggccctagctngcctagggacatggcaaaaagtggatatttggggcatnggttaatggtcccgtaagttgggat

SEQ ID NO: 428986 - DNA, 448 bp, Homo Sapiens
tgcaggagaaagagatttaattcggagggctaccgaataaagagatgggaggaaacctcaaatccacctccgtgagagtcttggggctaaagtttataagagttttagaacaggcagaagtgtgaagattgttgattggtcaaagagtgcagggtgaaatcataggacagacagatgaagaaactgtcctcatgctgattctgttcctatgtggggtcttcaaactggttggcgtcactggttttcaccggacttcagaatcttttcaggcttgctacaagggcttacttagtctctgaagagcttcctgcaggcttggggtctgtgggactgaaaatcagttggattgacgaaagctgagtgaaaagggatgggacagaagtcagcagaatgttcctgcagacagacctgcacatgcaaaggcactgttctctgcaggctctttcct

SEQ ID NO: 428987 - DNA, 429 bp, Homo Sapiens
  misc_feature (314)..(314): n is a, c, g, or t
  misc_feature (323)..(323): n is a, c, g, or t
  misc_feature (359)..(359): n is a, c, g, or t
  misc_feature (375)..(375): n is a, c, g, or t
  misc_feature (393)..(393): n is a, c, g, or t
aaaacatcagataaaggtttatttgaaaggattatttgattatttttgaaggattatttgaaaacatcatataaagtgatgttctaggtatcaagacccctccctctacactgtttccccaaaagccctcgcacctttcctcacatctttcatactttcctcgccacccttcccttctcccccacagtgcagttttctgctgcagttcttcacaggttggtggaagtgtataggagccccctgcctcctggagcctctaggactttagccaagcccaagaaagtctcaggaattccccccactggccccatccntcggttgtncagggcagctgaaggggccccagatcaggggaccangcagaggagaaatggncctggccggggcttcaanaagttttggtcaaggaactccttgcccggggaaaat

SEQ ID NO: 428988 - DNA, 446 bp, Homo Sapiens
  misc_feature (292)..(292): n is a, c, g, or t
  misc_feature (322)..(322): n is a, c, g, or t
  misc_feature (367)..(367): n is a, c, g, or t
  misc_feature (412)..(412): n is a, c, g, or t
tccagtgaccatcacaatttttcagtatttattaattcattatacatgtttagaggccttatggtgtgacagggaccatgccagagaccggagcaacaaaaatgtataaggatgcactcaaggagctcatggacagatggggagggcagaaatagctcactgaagtgcattgacagagcatagttgtcctgtaggaacgcaagctgggccttgaatcgtgcctaaatcaagggactctgacacttttaagtggtcaactttaatacaactttgtaacggggcagagggaatncttgggcctaagacctggattcccaaagcnacccaatactttcagggtgccacttttgtgattgatgctggcccnccattatacctggctccagatgggggcaatgcttgcagaaggcanatggttttggctgttcaattctcagagtaatttg

SEQ ID NO: 428989 - DNA, 133 bp, Homo Sapiens
  misc_feature (47)..(47): n is a, c, g, or t
  misc_feature (70)..(70): n is a, c, g, or t
  misc_feature (81)..(81): n is a, c, g, or t
  misc_feature (86)..(86): n is a, c, g, or t
  misc_feature (121)..(121): n is a, c, g, or t
gtgcccagccgaggaagtcttattgacatcagcagtgatacattggnttcttctggcttcaaattttggnaagggaagcantttgnaaaagaaactggggattttcaagatattaagcccncgcttttacaat

SEQ ID NO: 428990 - DNA, 176 bp, Homo Sapiens
caggtgagactacttagtcaaacctttaatgaaaacgtgattcacatggaaagcaggagggggagggaacaactacacaaaggtgcctttaaacaaaattaaatggcaaaacctgactatcagaaacatgaataggtttctttcaattaaaatgcaggtaaagactaaattatcca

SEQ ID NO: 428991 - DNA, 379 bp, Homo Sapiens
  misc_feature (242)..(242): n is a, c, g, or t
tggcaagtcagagttacaatccccaatctcagtaatctggtctttttctccttcgatttacacagaaaaccccactcaatgtggttctaatctctgtaacagtagtatctcaagggtgatacagtgcaaataggactgtctttccttttgttgagggaaaagtctccccgttctatttgagtctgttctcatgctgaaatgaaaccatccaaacacagctgctccgcccagcacaggatgtnttttcagtctactttgggaaaaagtggtaggcagtagtctgactttacccagcagatcccttcctgatgaatggagaagggagaacagaggtttgcagatacacagggagcagggcagtcgaggacaccagagggga

SEQ ID NO: 428992 - DNA, 210 bp, Homo Sapiens
  misc_feature (64)..(64): n is a, c, g, or t
ttaaatagagcccctgttagaacaatatgaattctgctaaaactgtgtcaagaacaaacatcanatttatggctaagcttaggtggaagaatggtgcaatcattgatgctttgcaaaaagtttatgggaacaacgccccaaggaaatcagtttacaaatggataattcattttaagaaaggacaagacaatgttgaagatggaaccctac

SEQ ID NO: 428993 - DNA, 450 bp, Homo Sapiens
  misc_feature (84)..(189): n is a, c, g, or t
  misc_feature (219)..(219): n is a, c, g, or t
  misc_feature (316)..(380): n is a, c, g, or t
  misc_feature (401)..(401): n is a, c, g, or t
aaaattcaatgttttttatttctcatctttataagaacaaatttatgaacattgttttggggacagtgactactagaatagaannnnnnnnnnnnnnnnnnnnnnnnnnnnnnnnnnnnnnnnnnnnnnnnnnnnnnnnnnnnnnnnnnnnnnnnnnnnnnnnnnnnnnnnnnnnnnnnnnnnnnnnnncaggaagcaggagtggccacaagccacggnacacgctcagtcccaccagtgctcagagacacacaaactcagacaggtgaaatggacaaaaattcagatcatcagtgggtaacataacgcccaagtnnnnnnnnnnnnnnnnnnnnnnnnnnnnnnnnnnnnnnnnnnnnnnnnnnnnnnnnnnnnnnnnntgtcgttgtcatctgtgggtngagaccacgggatgcggcttcaacaccccacagtgcacaagacgtccca

SEQ ID NO: 428994 - DNA, 463 bp, Homo Sapiens
  misc_feature (262)..(262): n is a, c, g, or t
aaatctcaacacagctgcatttattaatgacctttaatggactatcatcaaggcagaagtaatagtaataaaacacaattaattagcttgttggaagtataactataatataatttatgaaattttactcattggaaaccattttcccagcagggaaaagcaaccataaagatgtacccaagtaatatatgggattcatgtaattgattgaaacaggacattttcctcagcttaactggagctggtgcttgtcagccctagntggaagcactctgctttctataccaggcctgatagaagcaggcaactgcacaggcacctagatgggaatgcaccagcccaccctatagtcactctacaaagaccaggtctcccttatgcacttgttgttacgtgtgctttgtcgagctctgtccccagtttcccacaaccttcatcgagctaatgtgaagactcttcatct

SEQ ID NO: 428995 - DNA, 109 bp, Homo Sapiens
gacattttgttatcacttttatggtaagcagttccataagtgtgtgcctctgttttggcataataaaattttacattacttcttaaattaagtacaagttttgaaaagg

SEQ ID NO: 428996 - DNA, 506 bp, Homo Sapiens
  misc_feature (220)..(251): n is a, c, g, or t
  misc_feature (399)..(399): n is a, c, g, or t
  misc_feature (443)..(443): n is a, c, g, or t
taatagagagcattcggagctaattcgtattgaaagtgattgtttttatctggaattagctggaaagagctattattaactttgactttgaatgtcttaactataggatcattccggagcatatgattagagttggattagttaccactggatggaactatcgtcttctcaggtagcaaattcctccctgtaaaaatctgtttaggaagcatagtttttnnnnnnnnnnnnnnnnnnnnnnnnnnnnnnnnttcttattacgagtaactgttagccaagaccatcacttatggccaaagttaccacaataattcagttaacagctgcacagaacttgacaagaagaatgcattgtgaaggcaaatcacagcaaaagcacacacagtttgaagaagagcntttgagtgggaaggtaagccttttgcctgacattttttgttccngagatctcagaagcctatcctttccttttactggcctcccccccaagggttccagccccagtg

SEQ ID NO: 428997 - DNA, 437 bp, Homo Sapiens
  misc_feature (17)..(17): n is a, c, g, or t
  misc_feature (297)..(297): n is a, c, g, or t
  misc_feature (367)..(367): n is a, c, g, or t
  misc_feature (373)..(373): n is a, c, g, or t
  misc_feature (393)..(393): n is a, c, g, or t
  misc_feature (398)..(398): n is a, c, g, or t
  misc_feature (406)..(406): n is a, c, g, or t
  misc_feature (422)..(422): n is a, c, g, or t
tcctattgtaagttttnggcaaggtatttttttggctaatcaggcagaaaggaaattacccttcaaaagacgattttctttaaaaattatgcactcctgtacaatctttctttttatccaaaaaagggtctcatattatctctatgacctcatctcctgaaattacattaaaatgtttattacaaagatcttgtaaaaaacaaatgtacaaccttatggatatgttcatgcaaggtgacaaaaatatatgcaaaagggtcttcactcttgctttctttgtaatagagaagtgaaaanaatcttgtagtccattcaacaggggactaattccataagttaaagtatactcctacaatgggattatgcngtaaanttattaaaaggaatgggggnaaaanccaatttnaaacgccttatggggnaagggatcccattaa

SEQ ID NO: 428998 - DNA, 372 bp, Homo Sapiens
  misc_feature (30)..(30): n is a, c, g, or t
  misc_feature (33)..(33): n is a, c, g, or t
  misc_feature (44)..(44): n is a, c, g, or t
  misc_feature (79)..(79): n is a, c, g, or t
  misc_feature (83)..(83): n is a, c, g, or t
  misc_feature (136)..(136): n is a, c, g, or t
  misc_feature (162)..(162): n is a, c, g, or t
  misc_feature (293)..(293): n is a, c, g, or t
  misc_feature (302)..(302): n is a, c, g, or t
  misc_feature (334)..(334): n is a, c, g, or t
  misc_feature (350)..(350): n is a, c, g, or t
aagtactaatgttatgaaacaacagaattnttnggaagctctgntttggagggatcataataccgacatcagttttaanctcnaaatagataaaatagataaggtctaactaaaacactcccctacgaggtgaatnaaatacctcacaacaccggagttttntggtgccttccccgtgtcccaggcttgggctggtctaggacagaggagagaagttggctgaactaatcatgatatttgatctgcacatctgtggcactggcagttactctgaacttacctacttcctgttntcccaaacntgctcctttctaaggcacctttaggcaggaanagattcctcataatgncctgcctccatgacagatgttt

SEQ ID NO: 428999 - DNA, 157 bp, Homo Sapiens
gagaaagaagtccttttatttgctgtttctcaaagtgtagtgtggggaccaccttaataagaatcactgaggatacacaacaacaatgcacattcttggctcccaccctaatgaagagagtgaatctccagtttactttattacctagccatgattc

SEQ ID NO: 429000 - DNA, 444 bp, Homo Sapiens
  misc_feature (95)..(104): n is a, c, g, or t
  misc_feature (359)..(359): n is a, c, g, or t
  misc_feature (369)..(369): n is a, c, g, or t
gcctccaactcccgggctcaagggatcctcccacctcagcctcctcgatagctgggtccacaggcatgcaccaccacaccaggctactttaaaannnnnnnnnnaaagacggggactcattatgtctcccaggctcatggacactctttgaagagacttggactgcagggtgttttgacactaagaggtttgagagccctggactggcaggtccctgagagcccggaagagttgtgggataatcagggagctcagacgggctgcatgttcttggaaaaacaactccccctctcccagcctctgttttctccctgtccagagagaatccagatccctctctcccagggtttttgtggggnattcaaagtnggcaaagctattcagatgatcagtgagttgagtcaggttttggattctttctgacccaagggtaatcgttttgcc

SEQ ID NO: 429001 - DNA, 167 bp, Homo Sapiens
aaattttagtgaatattttatttggacattttaaagtttagctttgtaaccagaaggtatgaaggtgaacatttattcataatcattgaaatctaaccaagtcctattgcagtttatttgtgggtagaatggttggaagtagcatgctcaagacatttaaaattttg

SEQ ID NO: 429002 - DNA, 506 bp, Homo Sapiens
  misc_feature (474)..(474): n is a, c, g, or t
ttccgatgcttaagtatcgtttaaatatatcaacacttaccactgtgttacaattatctacagtattcactacagtaacatgctatacaggtttgtagcctgggagcaatgggctggctaaaccacatagcctacatgtgtagtaggctataccatctaggtttgcataagtacactctatatttgtgtgatgacaaaactgcttaacaatgcatttctccgaacatagcactatcattaagcggcgatgactgtacttggtttgtatttcaatcccatacctagtaagtttaaaggatgaatctgaaataaaagtagagttttgccagtagatggtgctcttctacaaggcccaccaatatgacagtctgtagataacacccagctttgtggaaaatatctctaaagatattcccagatccctacctgttaaatagttatagtaaaagatggaaaggttatctttgggattcntgttttgccttgatccatctggtttatagctt

SEQ ID NO: 429003 - DNA, 348 bp, Homo Sapiens
  misc_feature (60)..(60): n is a, c, g, or t
  misc_feature (85)..(85): n is a, c, g, or t
  misc_feature (236)..(236): n is a, c, g, or t
  misc_feature (249)..(249): n is a, c, g, or t
  misc_feature (255)..(255): n is a, c, g, or t
ctttataaacaaatgataaactagcttttttaaaaagtgactgttagaacttttttagcnctgagtagtggtccctttttaaacncctggaaacatttttgttaccaaataaatcatgttttatggtactcagccatccaaaagtgaaagacctagcatttgattctgtgcaggacacaaatctcacaggaactatagcactttggaaaagcatcaaagtagaaaagaaatacagngcaattctattangagaangttttacatttaaactggtttagcaccttttaagtttaaagcccatagcttcttattactagtgacctagggaattgttattaacattaagac

SEQ ID NO: 429004 - DNA, 463 bp, Homo Sapiens
  misc_feature (438)..(438): n is a, c, g, or t
gcgtgcaactcatttattttagattgattagtacaatgttggctcttgaattgttgatatcttttataccctgctccagagaagcaaagagagtatctgcagtctaaatttttgctttgtattttctgttgtgtattctttgcctctatatcagcattagggatatggctgaccgatttccttaaggctataaattgatattcttagggtgggaaaatatgggtacatatgtgtatatttgtaaatatatgtgcatggaacaaacaaccttatgaaatcaggaagaaatgttccctttggtttgtgtgcatgactttccttttccttgactttgggcaaacttggatggctccctggctttaagaaatccctggaatgtggatagggtcagaagggtgatggatgtaaagtcatattaatatggtgtacatatagaanccgggataaagatatatatatatag

SEQ ID NO: 429005 - DNA, 169 bp, Homo Sapiens
  misc_feature (44)..(44): n is a, c, g, or t
aatcacagagggattgcaacagaacacagatttttctcactgtnttttctctggttgatcgggatgcattatccaccagaaaacactgtagacgactcactcaccaggaaaagagcatatgccagttggaataaataaaggggaagagtaaggaagaggctgtagaatt

SEQ ID NO: 429006 - DNA, 241 bp, Homo Sapiens
ctggagcttatctaagattgggaaggtcagcgatactgaaattccctacagctttcagtcccatcctgttttacttgcttgtggacattgcttaagcccagtgggtttgtgatgctatttagaacttaggtgggtatgtttcacataccttcagtgctatctcacctggacctttacgcggcccagtgaggaggttgggttaatgtaactcctaagtaaaggaccttcctggatcctggct

SEQ ID NO: 429007 - DNA, 263 bp, Homo Sapiens
  misc_feature (243)..(243): n is a, c, g, or t
gtttaagctatattgaacaaaaatgtttaaactgcataaaagtgcttgaatttatagtgtccatccaaacattgagaaatatgagccatacacatgtgtatgggggtcatgggctgttccttgtttatttttaccccgttcagacaaaaaaggtatttgacaattttgcccaagtggtttcttgccctctctagtgtttcttttgaaggacatcaggagataaacgtatttgttactggctcntcattagtgccagttaatgc

SEQ ID NO: 429008 - DNA, 178 bp, Homo Sapiens
aagaattcctgtcagatcagctgttgagccacaggagcaaaaatcacccaggcgctgacgttgtctggtctacttcagcagtttctactctaagcgagtccacagtcggggtcactttctttgcttagcacctcgacttcgcgcagttttcatcgaagacagttcattacgcattggc

SEQ ID NO: 429009 - DNA, 173 bp, Homo Sapiens
acccaaggaatttgagtacttagaatacttggagctatattttaacagctattgatcattgagacagcttttaaaacaatggttagtatgacatttttgagattgttctggttagttgtaggaagaattatttcataagatagatgttaaaagtgttctttgaatacacatac

SEQ ID NO: 429010 - DNA, 141 bp, Homo Sapiens
  misc_feature (128)..(128): n is a, c, g, or t
ttggtggactgggggctccttttctcctcctttttgacatataactgtgccattaaaaacatgatttctgatgaagctggcctagagggaatgaaggagattgcgtgggtatggtctctaggacaggngtagtgttgcagg

SEQ ID NO: 429011 - DNA, 136 bp, Homo Sapiens
ctatgactagtcaggcattatgcctgagtgcatacgcctcccgtgcacccctatctagccttcagatgtcctccactgcaggtcaccccaggagatagcatcaataatatagtctcagtcttgtttataaagattc

SEQ ID NO: 429012 - DNA, 109 bp, Homo Sapiens
attactttttattttgccctttagagagtataaaaactgtattttaattttaattatgtgtacattataaccttaacaataacgtgagtagtatgagtatcagcaatag

SEQ ID NO: 429013 - DNA, 462 bp, Homo Sapiens
  misc_feature (395)..(395): n is a, c, g, or t
accagcaaactactaggatttactgtaggataaaagctctacatggccctgcatacaaactttctgcatacttctgcaaatttttatgcattactcaatccattaaaaatcaccttggaagaaactgcaaacacaatagaaactaaatcgagatagtcacagagaacaacaaaaatagtaatttaagctcccatacaacatcaagtgtgttcagtctatttttggttcttcgggttctctttaaaattgaattgagtttgtatatgcatatgtatgtaggagtggaggatggaattaattatcccaaacatcctacactcactcctctaatatttcttttgttaacatggcaaatctgttctcttcatttacggtgatactgcatttacattacnacacaattagagatcattaactttctcctttataatcagccattttcacaggcctttgatatacaag

SEQ ID NO: 429014 - DNA, 459 bp, Homo Sapiens
  misc_feature (427)..(427): n is a, c, g, or t
ataaatccaatttcttttattttctgatacaataaaccaaaacatcaaattctaacatcactctcttaagtatctcctcctcagaattgtccatgaaccccaaagatttaccaggtccaagggtgaaagtgggacttgagttctcagtgcaaaagaaaaccctcaatcgcaccactgcaattgcttcttgtcacatggtggcgctgttgaagcttagtcctgcacagccctggcaataaaggaactgcctaggccaccaaggatcttcaggggtcttcaagccctttccgaagtaatgcttgccaccaaaagcattctatattagagcttcaaagttgcagctcttaaagatatgctctttcatctcacatagaggggaaccttccagaacaccaactagcctaggagcagttctaacagccaccanctcagcctacagaactgggactcccctttcct

SEQ ID NO: 429015 - DNA, 302 bp, Homo Sapiens
  misc_feature (99)..(99): n is a, c, g, or t
  misc_feature (115)..(115): n is a, c, g, or t
  misc_feature (196)..(254): n is a, c, g, or t
cctttgttttaattttcacagggatctttattttgggggaacattccaattacatatgttgcaaggtaacatttgtaatctttttaatattgggaagcntagatgagaaatgacnaaatttgagaaaggggaagagggaggagtattagaaatataggcaagtctcatgcaaattataaaaagttaaattataaannnnnnnnnnnnnnnnnnnnnnnnnnnnnnnnnnnnnnnnnnnnnnnnnnnnnnnnnnnactggtgaaatccacatcaaatctaaactttgattaatagtaatgtaa

SEQ ID NO: 429016 - DNA, 474 bp, Homo Sapiens
  misc_feature (198)..(223): n is a, c, g, or t
ctaaaatgccagacacttgtccaaattccattcatcaaataacccattgttacctaggatatgcaatgttcttatcctgattcactgatatgtctacgcctataccagcaaaatgaaaaatcagcattctactgtttgatggaaatctcagacattcccacccttatacctataactcaatacaaaggaagcgactcnnnnnnnnnnnnnnnnnnnnnnnnnnagagtccgggtctctgtcacccaccgctggagagtgcagtggtgcaatcatagctcactgcagtctcaaactcataggcttaagagatctgcctgcctcagtctccctagtagctggggatcacaggcgtgcacaacctgcctggctatggcgactccttttcatttacaacatggactccactctggggacacagctgaagtggcctctctctcctaggactaactttcttgataaataccacttactct

SEQ ID NO: 429017 - DNA, 122 bp, Homo Sapiens
tagacaccagaggaggttgttaaagtaggggtgctttgggagcagttagaataggtagtcatggaatagcgtgatttatagggaatgaagtcttatatcttcactccagcacttggtgtatc

SEQ ID NO: 429018 - DNA, 133 bp, Homo Sapiens
  misc_feature (120)..(120): n is a, c, g, or t
aaattaagaatataaagcagtacagtaagtatatggggacatcaggagttgagagaatagagagatccttgtggctccatgcaggacatagatcggtcagttatattgaagggagatttnggaagggatggca

SEQ ID NO: 429019 - DNA, 268 bp, Homo Sapiens
  misc_feature (136)..(137): n is a, c, g, or t
  misc_feature (207)..(207): n is a, c, g, or t
  misc_feature (217)..(217): n is a, c, g, or t
  misc_feature (252)..(252): n is a, c, g, or t
gacccttttcacagtgaaatctctactttatccatgctctgaactttttatttatggagcccaaactaattttcccacaacaaatctcacatacttttactcctatcattaaacaaattaatgtcctccacaaagnnaaacatctggctcttcctacaagaagtcagaagctaatgaggtctcactctggccctggcaagatctcancagtgtgccntgggttctccctgtgtaaactggaggtagtccggntattcccccagcgccc

SEQ ID NO: 429020 - DNA, 208 bp, Homo Sapiens
  misc_feature (18)..(18): n is a, c, g, or t
tctctaaccaaatctctnagcattcttgtagcttgatagcaaattgggtgaactgctccattcactaaaagattgagttcagctttattgcaaacagaattatgaaggtctgttctcatgcatttactcagcctccttcatctgagtcacacaccactggaagtagcccctccttatattaagcaatattgacttgaaatggatcatt

SEQ ID NO: 429021 - DNA, 141 bp, Homo Sapiens
  misc_feature (63)..(63): n is a, c, g, or t
agattttgttacttcccttggggaggtggacagagttcaaattactttcataattcagctatnagaattttatacttcagttgaaattacatgaagacatttttgatctgatatacatatctgcataaatttctattatga

SEQ ID NO: 429022 - DNA, 295 bp, Homo Sapiens
gtctgagcagtcgggtgggcttcctagatgaggggactgtcctcccaggagctgctactcagagtagtttcttgtcctcctaaagtttagagtggaaatactttgcaaaagaggtccccaaccctaagtgtgagggctaagctcctgggcttagtaggcatatacaaatgcccccaggtgggtgacatcaagatgttctggtcctaggtctgctgagagcctctcctgggaatgttgtaggtactgcctttcccttttaggaaacaccatatcctcctaccactaacccccatcc

SEQ ID NO: 429023 - DNA, 394 bp, Homo Sapiens
  misc_feature (21)..(21): n is a, c, g, or t
  misc_feature (23)..(23): n is a, c, g, or t
aggtgagcttgtcagcgggcncncgtatcctatgatctgaacccttaaattaatgaacagatgggtgtagacagcagtttgcagcccctgttgatgttgggttggtttataatcaccatatggaacagaatcggagcctcgcgtccacttcgatggtagaattctgttcgagtgctgatgaccaggggcggctaaacaccatgccctgccatctctgggtcttagagtcaccctaacatctgatctagattaattatcatcatgtgcgaggttttggcatgaagcacgccaggctcaccgtttcatgatcttagactatttacagcaaactcaaacagctcacttgctttttacaccctgcaaaagaccaagggaggagcctggaggggttggt

SEQ ID NO: 429024 - DNA, 189 bp, Homo Sapiens
  misc_feature (22)..(22): n is a, c, g, or t
taaatgcagttacttactacangatacttatgtgccaaacataagtcttctaagtatcaagaatgacctcgcttgaatcacaattcaaatatagatagaattgttggtgttccatagcctgctgatatcagaaccctggacaatgggtttaatcaagcaacagtttgtgggtggatggggccttctggc

SEQ ID NO: 429025 - DNA, 188 bp, Homo Sapiens
  misc_feature (29)..(29): n is a, c, g, or t
  misc_feature (158)..(158): n is a, c, g, or t
ctaaccaggtgggcgaaaagcgctcacgnaaagcagcccataacgcctcggacacctgcgccgccgtatcattccacgtcggcaggcgcgcaccgttttcccaggcggcatcacccatcacgccgcgtagtggcgtccgtcaaaacctggcgcaacgnatgcgcagcgcgtcccggactcatcggggc

SEQ ID NO: 429026 - DNA, 462 bp, Homo Sapiens
  misc_feature (356)..(356): n is a, c, g, or t
  misc_feature (387)..(387): n is a, c, g, or t
  misc_feature (451)..(451): n is a, c, g, or t
tggttggattgtgagtgtggcttacagaagcatcagcatcaccttagtgcccccctccctcccctcaccctgtggatcttagtcacatgtaatataaccaagctcctgtttctatgaaagaaaccaacaggcctatctgtacacagcacttcataaatcctttttaaaaaaagcagaggaagataatggaatattttgccacttctaagagtgggtaataaatgtgtttgtaacccccagcccagaattgataggatttaatgagaaagtaccttttgcttgattttgtaaatgtaatctttcaatttatagacaagcaaaaatgtaccccaagatgataggatgtccattaatgnaaatggttaagtttcctaacccccccatccnaccctaccccccacaaaaaaatttaagaaccccatttttagaaaatacctcctatttaggaagngctccaaacca

SEQ ID NO: 429027 - DNA, 194 bp, Homo Sapiens
  misc_feature (53)..(53): n is a, c, g, or t
cagaaaatgctgatatgaatacttagtaataatacaaaagttcctgctaaatnatatatgtgtatcactgcctgactagaaaccccacttttcttttctaatccagcacaaaatcaaactctgattctacaaccagtctttttaaagggcaaaaatgactcaacacctttgttttgtatggaaaactttttttt

SEQ ID NO: 429028 - DNA, 319 bp, Homo Sapiens
agagacaatggtctgactctgttgcccaggctgcagtaagtggcaccatcattactcactgtagcctcaaactcctgggctcaggcaatcttcctgactcagcctccaaaagcattagggttacaggtgggaggcattgtgcccagcctgaaactttttaaaaacagaaatgcctacctcaaaattctggagtcaattcattcaatttaccaactcacaattgaaacaactgactaatcagatgataacaggttgtaaattccttgaaggcaagactgcgtttcatttgtctctgtaccccgagaactgagcatggggg

SEQ ID NO: 429029 - DNA, 339 bp, Homo Sapiens
  misc_feature (140)..(140): n is a, c, g, or t
  misc_feature (143)..(143): n is a, c, g, or t
agagtaatcattttactaatgtgctgctggctttataacattgataagtataatatgcataacaatcataccacacaaaaagggggaagggaatagagctataaaggagtaatagttctatatattactggaattaagcnagnattaaatctgaagttgatgctggtaagttatatatatatacatgaaacgctaaagctaccattaaaaacaaatctcaaaaaatacagtgaaagaatcattaataaaattaaaatactacattagaaaatattcactcagtgaaaaagaaaacagtaaagaaggaatagaacaataaaaagatgagacagggaaaac

SEQ ID NO: 429030 - DNA, 208 bp, Homo Sapiens
  misc_feature (160)..(160): n is a, c, g, or t
  misc_feature (194)..(194): n is a, c, g, or t
aaaagactacgacaaaacaaattcacaagttcgaactaatggacatagaactgcacttcacatcttttcacacacatggaatgtttacaaaatttaatcagaaaaccatgccacaaaggaggtttttgaaaataaccaaagaatccataacatacaatgntttcttacctccaacacaactgaattagaaatcnataggaaaaaatac

SEQ ID NO: 429031 - DNA, 477 bp, Homo Sapiens
  misc_feature (420)..(420): n is a, c, g, or t
  misc_feature (444)..(444): n is a, c, g, or t
aaaccttagaaaaataagtaattcttttatttctacttcaaaatataccatgtacatctggaactctaagggggaaagtaaccaggagaatagtccatcaaaaaaataagataaataataattgcccatttcagatccatctttaatccagctcgaaaagggtatgagctgccagttgtcttgctgtcaggggccacccctctgtcagtggccttgcggctgcctcccaaggactctgagtctaagagttcctggagcgtcttgaggacgtgctttggctggctggcggcaaagtccagcaggcgggaccaatggtgctcctggaggctcctggacagccggcacaccaccccgcggatgttcccgctgggtccaggcagggtgccattcctggtggcggtgttcaggaagttgccagangatgggaaggacatgccgctctanagcttggaggtttcccggggtaaactgaggcca

SEQ ID NO: 429032 - DNA, 127 bp, Homo Sapiens
  misc_feature (28)..(28): n is a, c, g, or t
  misc_feature (57)..(57): n is a, c, g, or t
taatgaatatataattattaatatatanttgcatggacagtagagttttcacttttnttagttcttctgagagtaaatgtaatgtgttaagatttttgtttcttcctttaggctggctttttgataa

SEQ ID NO: 429033 - DNA, 123 bp, Homo Sapiens
attagctcctcaaagctatattgcaaagaatttaaatattattatcattttaataaactaggtcagttcacaaaagcaaccaaccacaaaagcactttaaacaaataagactcaccgactgag

SEQ ID NO: 429034 - DNA, 258 bp, Homo Sapiens
  misc_feature (47)..(47): n is a, c, g, or t
  misc_feature (246)..(246): n is a, c, g, or t
aaacattacagtgaggatggaatagttgcaaattggcacaaatctanctggagacatgttttgtttgtctcagtaattttaatatttactgtagttaccaaggttttttaactttcatgaaaatgaagatttctggctgttttggaagaatgggaagaactgacaccactaggtccacacttataaatgaaaataactgagtggaatggaatagcaccgccttctccaacagagaatgtgcgcgcngattcttcccac

SEQ ID NO: 429035 - DNA, 169 bp, Homo Sapiens
  misc_feature (125)..(125): n is a, c, g, or t
  misc_feature (131)..(131): n is a, c, g, or t
  misc_feature (151)..(151): n is a, c, g, or t
gtatagaaagaaagaaacttattgatgtcagtggccagtccattaagtggggaatccaaaatgaagtgatgatgaaaaacccaattaagtggctgagcgagcagaagccaggaaatctccaaatnttagantcagggcccagaaataggcntcagttttaagggaccag

SEQ ID NO: 429036 - DNA, 109 bp, Homo Sapiens
tcaaggacctttggctgtttaaggacacattcaaatgcctaaccatagcgttcagtgttctcaacactgggccttagtttaaattttggttccagcttctggcccgttt

SEQ ID NO: 429037 - DNA, 255 bp, Homo Sapiens
  misc_feature (65)..(65): n is a, c, g, or t
  misc_feature (114)..(114): n is a, c, g, or t
gctcatcacacacatatacccggtcttgtgcgtctgccagctcggctgtgtctggggcaggctgnccctgagcttagcatgcagtgagttctcacatgtgcatgtgtggtgtgntcccgtttccagcttatgtgagtagataggccctaatgtgaaatggatacagtagggccacactgtctttttgatggcacatttaaacagtttggctctgcacttacagactcatctgctgctctgcgtctggcagcttac

SEQ ID NO: 429038 - DNA, 201 bp, Homo Sapiens
  misc_feature (47)..(48): n is a, c, g, or t
ttctcaagatcctcaaagttgctgacgaggtgccgagacctcggtanntgctgccaagaaacactccacatgcctttgactgtgcttgttggcagatagaacaggagcgactgaaatacggctatctgagaaaggttaagattgactgaacctccatcacattgagaacactagttgcaagagaatcttgaagatgtagat

SEQ ID NO: 429039 - DNA, 302 bp, Homo Sapiens
  misc_feature (105)..(105): n is a, c, g, or t
acagatatttaataaggaaatattccttcctgttcccactttcagggaggcctcttaagacatgaagaggaccaaaataacaattgcagtataacttcacatggnggggtggggggtgtggagttcaaatgtggttgatcaaaatagtgttgttactttcctttagacttgattccaacatgtaaaaaaatcaggcactttagtgggagtgattttaacttcagtagtgaaagggcaatgcaattaagagttagggtagtgtttctcaaacttcatcctcagaggtgctttagaaattgact

SEQ ID NO: 429040 - DNA, 179 bp, Homo Sapiens
  misc_feature (67)..(67): n is a, c, g, or t
  misc_feature (157)..(157): n is a, c, g, or t
  misc_feature (163)..(163): n is a, c, g, or t
tatttgccaagctctgactaacttctggatatgaaaataaggaacttgcccagcataggcctatagnagcagcttactagtaaatcttgccacagaatcacttgaagctagacagagaaagaagttcaatttaaatatttgtcccattgtttgtggntttagngatgtaagccttgtgg

SEQ ID NO: 429041 - DNA, 194 bp, Homo Sapiens
  misc_feature (136)..(136): n is a, c, g, or t
atctattgaagatgactgccaaattctactgtagctggcaattttatgaaatgaagaaaatttgctctagttgcaagtgacacacacctcttaaatgtctgctatcaattaaaagtaaaatactggttacttgcanctatcatttagatacaatgcactccaggagatcaggagccttggcattcagacatagg

SEQ ID NO: 429042 - DNA, 228 bp, Homo Sapiens
  misc_feature (207)..(207): n is a, c, g, or t
gccctttctttttaaaagttatcattgttacttattttcctcaagttggtaactaaattggaagcagactgaataaaatatataaacacagtcaattttgaaacacatgcacattacagtaacatatgccgtcagcttattaaagaactagtttgggacttgtttcagttggttaatggcatttaaaaagtagaataaatgtttgtnatcagttgtttctttgggggg

SEQ ID NO: 429043 - DNA, 295 bp, Homo Sapiens
  misc_feature (70)..(70): n is a, c, g, or t
  misc_feature (144)..(144): n is a, c, g, or t
  misc_feature (153)..(153): n is a, c, g, or t
  misc_feature (168)..(168): n is a, c, g, or t
  misc_feature (177)..(177): n is a, c, g, or t
  misc_feature (199)..(199): n is a, c, g, or t
  misc_feature (206)..(206): n is a, c, g, or t
  misc_feature (251)..(251): n is a, c, g, or t
  misc_feature (284)..(284): n is a, c, g, or t
gtaatttaagttcctacctgaagaacccagcaaaagaagagcaaataagctcaaagcaaggaggaagaanaaaataatgaaagtaagaactggttagaagtgaagtattttatatggttactttggggagaatttaggtttccntgatttgtnccaaaattgggaagntaggaacanaaaataaggaaactccatcatngaccaanatgctgaccacctgggccaactgctgcagaggttagggtttgacnttctggggcaagtttggctacagagggttatgnagtcagaggtt

SEQ ID NO: 429044 - DNA, 297 bp, Homo Sapiens
  misc_feature (260)..(260): n is a, c, g, or t
  misc_feature (271)..(271): n is a, c, g, or t
taggatctccctccgtatccccccatcagtcttcccaacaaccaccaccagacccatcctgcgccatcgccctccaccctctgtgatagctccttctgtttttctggatgtgctaccatccattctcaccttttaaattcatcacagttgcctgtgacccccttgcccatctgtgcctctcccagctctctgtgctgtgatcttttcccctattccctaccgtttctcagtgctttatcagaccctgctcctccttagcntaaagctttancttttccaccagttttgtgagatcag

SEQ ID NO: 429045 - DNA, 183 bp, Homo Sapiens
  misc_feature (146)..(146): n is a, c, g, or t
ttacctgtgcaaatcatgcaatgttcatatgcccagtatttgtatccttctttaataaagtatcctctggtgttacacagatatacacatatcaataacagtgcatataagcctttattaagtatactttagattttacataaagnatttctattatctcattctgcaatttttatgctttat

SEQ ID NO: 429046 - DNA, 140 bp, Homo Sapiens
gatttactatttacgtagctttatgtacattctctgtaaaaatagacctctaaatatgaggctttacatgaaatttgtacacacatacacactaatgttagctccttaaattgctgcactaaggtgctggttagtagaga

SEQ ID NO: 429047 - DNA, 294 bp, Homo Sapiens
  misc_feature (223)..(223): n is a, c, g, or t
  misc_feature (255)..(255): n is a, c, g, or t
  misc_feature (279)..(279): n is a, c, g, or t
gctccccttgcttcacctcacaggggctggaggggggcagtgggtgatgggagggaccagggtcctgcagaaggagctggaccctccctccctgttgctactcccgtcccccgaacccactccccacctgtgccgagctccagaagggcgtgcttctgtgctgccctgcacgtgacagtctcagcagacacctactgggattgtcagggcggtgtctctaggnggccctgtctgtgcccagtgctgttccagtgngggggccagccctgaataaaaganccagctgtctttagg

SEQ ID NO: 429048 - DNA, 312 bp, Homo Sapiens
  misc_feature (18)..(18): n is a, c, g, or t
gcctccaaatgttttgcnaccacataacatgatcttcatctttatagcttcaaaaatcatttttttaaatcacttgtcactcaccactaattgagcagtgggtacaaggaagctgattctggagactggaaagactcgcgtagtgaccaaacacctgcgatggcttaaaaggaagaccactaaacaaggccacaaattttagatttatgttacaacagcataccactttaagtataaacttctacattagttaaaggactgttacagaactggtccgctacagagtatagattttcctattggtaaggtata

SEQ ID NO: 429049 - DNA, 303 bp, Homo Sapiens
  misc_feature (70)..(70): n is a, c, g, or t
  misc_feature (73)..(73): n is a, c, g, or t
  misc_feature (137)..(137): n is a, c, g, or t
  misc_feature (160)..(160): n is a, c, g, or t
  misc_feature (214)..(214): n is a, c, g, or t
  misc_feature (217)..(217): n is a, c, g, or t
  misc_feature (225)..(225): n is a, c, g, or t
  misc_feature (255)..(255): n is a, c, g, or t
  misc_feature (262)..(262): n is a, c, g, or t
  misc_feature (281)..(281): n is a, c, g, or t
cctaagtagctgagaaaaaagtttgctagaatttgaatttttgttaacagtgtttgaatatcaagtctanctntaaaaaatatggggctttctaaaataattttctctacattagccttcctattaatttaatgcanctcagttgtatcagaacttttcnagttcgagttacaaaaactcaactcaagccaacatcagcaaaaaaatggaattnatnagaacatnaaattgaggaagtccaagggaagatcagcnttcaggnatggcgtatcaatctgggnccaatcagggagagagaattcg

SEQ ID NO: 429050 - DNA, 101 bp, Homo Sapiens
cttctaacctctggtggccaggtcagcctcaggaaggggctgggactgagtggaggggcctggaaacaactgcgcacactcgtatccattctcgggctcac

SEQ ID NO: 429051 - DNA, 265 bp, Homo Sapiens
  misc_feature (34)..(34): n is a, c, g, or t
cagccagagatttatacctgaattctgctgtttngggtcgatgctttgacttctttagaaataatctttgctaggtgactatgagctttgatccttttctgtaaaactgactgttggtttctaggtttgagacagtctctaagtcagttttttcaataattccctcaccaagttattttttttagggaatggtaagataaatcatatttcaagtataactcttttccctcctggttttatgtagttttaaaactgacgtctaacg

SEQ ID NO: 429052 - DNA, 232 bp, Homo Sapiens
  misc_feature (32)..(32): n is a, c, g, or t
  misc_feature (71)..(71): n is a, c, g, or t
  misc_feature (79)..(79): n is a, c, g, or t
  misc_feature (104)..(104): n is a, c, g, or t
  misc_feature (130)..(130): n is a, c, g, or t
  misc_feature (200)..(200): n is a, c, g, or t
catcacaataaaatgtatccctacttggtgtntactatttgttgggtactattctaagctttacctagatnaactcatntaatcctcccaattatctccatgangtaggtaacagtatcgcttataattnacaaacgagaaaactggggcagagagtaagttaaataggagactggctgtctagcttcaaagtccatgtncttcaccaatacttcaacctgctttgtataac

SEQ ID NO: 429053 - DNA, 140 bp, Homo Sapiens
  misc_feature (38)..(38): n is a, c, g, or t
gccgcgggtgtgacccgggcagacacaggctgccccanacttctggactctgtgtcagggcgcacacgctgacagcatggctaactttctgggggccggggacatctgggagaagcagaatgaaacagaagatcgattcc

SEQ ID NO: 429054 - DNA, 476 bp, Homo Sapiens
  misc_feature (23)..(23): n is a, c, g, or t
  misc_feature (74)..(187): n is a, c, g, or t
  misc_feature (194)..(373): n is a, c, g, or t
  misc_feature (378)..(378): n is a, c, g, or t
  misc_feature (392)..(392): n is a, c, g, or t
ggaaattagcagctttgacaaanaaaagtactgtttcatctgtcttccctatgagaaggctctcactttgtcannnnnnnnnnnnnnnnnnnnnnnnnnnnnnnnnnnnnnnnnnnnnnnnnnnnnnnnnnnnnnnnnnnnnnnnnnnnnnnnnnnnnnnnnnnnnnnnnnnnnnnnnnnnnnnnnnatagccnnnnnnnnnnnnnnnnnnnnnnnnnnnnnnnnnnnnnnnnnnnnnnnnnnnnnnnnnnnnnnnnnnnnnnnnnnnnnnnnnnnnnnnnnnnnnnnnnnnnnnnnnnnnnnnnnnnnnnnnnnnnnnnnnnnnnnnnnnnnnnnnnnnnnnnnnnnnnnnnnnnnnnnnnnnnnnnnnnnnctcanctccaggaccactngtggataattggtggttaaactggtacaaatttgatttgtggaaacatggtggtggtttgaaccaattaagaaatccaggtggc

SEQ ID NO: 429055 - DNA, 349 bp, Homo Sapiens
tgcataccattttttcactgaacacaatctatcatgaacatctttccataacttaaaagaagctgcatgccagaacagtccatcatgttctgttttctttcagaaatctttagagatggatcattttccttacaagaatagataccaggtaagagaagcagcctttaaagcagcgaatagcagctcatgcatgctaattatttgcttacttatctggctcccctattgatggcatcttgagggccggtatgaacatgtcatgcagtctccaagcaacccacagtaggcccaccataaacagatgttgtggccagcatgggaggtgcaatggtgagttgctctgtttcct

SEQ ID NO: 429056 - DNA, 379 bp, Homo Sapiens
  misc_feature (25)..(25): n is a, c, g, or t
  misc_feature (323)..(323): n is a, c, g, or t
  misc_feature (334)..(334): n is a, c, g, or t
  misc_feature (347)..(347): n is a, c, g, or t
acatgatgctggaattgagaataantgacatagactgccttacattcggtagggcaagcctttctgtgtaagagatatttaaccaaccattaagaatgagaaggagttggcctttcacagagccctggacagattatttttaggagatgaaaaatcccatagaaaactatatgaaatgggaaatgttatgacacaatcgaggagctgaatagaagcaagtcataataagagggagtaaggaggacaatgtctttgaaagaggtctttaggtaaccaaagaccatattatattatatgggtaaccatgtttgggattttaatcnaagagtaaagnaaaactggttaanattgttaagtgggagattccccaaaactttgg

SEQ ID NO: 429057 - DNA, 387 bp, Homo Sapiens
  misc_feature (310)..(310): n is a, c, g, or t
  misc_feature (345)..(345): n is a, c, g, or t
tctcattcaatccagctcttttaggaatctcgtagacagatagtactctaaagggaaagatttgaatgtgtcactgtggccctggccaggcaaatcattttgagcagctcctgtctgctgtgcattcttccaggacacaaagccgggggggaagacatgggtctgaggctctccaaggaaataatgtgctgcaaaccaagctcgttagttctttatgaagtgagggacaaagatctgttcattcagcagagcccgtggtatgtgcctgttaaatcgggcactgtgcaaagccaataggggtgaagatatncatattaatgggacacagccctaatcttttagggngcccaaaactttaagttggtggggagagaccagtccaagtcc

SEQ ID NO: 429058 - DNA, 355 bp, Homo Sapiens
  misc_feature (23)..(23): n is a, c, g, or t
  misc_feature (188)..(188): n is a, c, g, or t
  misc_feature (297)..(297): n is a, c, g, or t
  misc_feature (312)..(312): n is a, c, g, or t
  misc_feature (327)..(327): n is a, c, g, or t
  misc_feature (333)..(333): n is a, c, g, or t
aatagagattaatggcttttaancttggagcagagcagtatgtatgtgaggcatggcgctgggtcactgtctctaagtcatgcaggccacacaccttcctgctccctctcagtttttcctctccctttcacagttctaggagaaccatgacatgaaaatggttcccaaatcctttcccacatcatcangggggcttcatcaaaggcctaggcagcaccaagagcaaaacgaaggccctgggcacaaaacaccgtaccagctttggccacttcccccatgggaagacggggcaggagnaaaagtacccctggntcctcaagggcctangccganccttaagggacctggattaagt

SEQ ID NO: 429059 - DNA, 138 bp, Homo Sapiens
cgcaacgtgtcttaagaatgagaagtgtccttgacagttatctaatgatttcaagattaaaattcagggactggaactccttccgtcttggttggttatctaaggcatacttcccactgggatttccagcactctttg

SEQ ID NO: 429060 - DNA, 307 bp, Homo Sapiens
  misc_feature (30)..(30): n is a, c, g, or t
  misc_feature (155)..(155): n is a, c, g, or t
  misc_feature (258)..(258): n is a, c, g, or t
caccacaggtctctctcgtactaaatccancagatacaccttggccctcatcttacttatttgcagcctctacgattgtttcccactctcattctgaagtcctccttccttggcctcttaccattctgccttctagtttccttcactggttattntaagaacataaatgtgctatatttaagctggttcattcattatattaccaagcttggtatcacaaatagacttcatatagaaatgctataatcctttccttcncctccttccctgcctccctctgttccttcccatccttccattcctgttg

SEQ ID NO: 429061 - DNA, 247 bp, Homo Sapiens
attattgagacctgacttttaaaatatctcttatactagagttgaagaggttgataggaggccagttgctaaaagtgaagaggggctttgcatctttttcctgctaaaataaattgtgtgcttagctcagtgttgttcacaagcagccatcgaatacatgtttgataagctgatcagtagtgacagcttgttggaatgcaggaaagggggaggacagcaaactgaatggctagcagtggaaatgctg

SEQ ID NO: 429062 - DNA, 277 bp, Homo Sapiens
  misc_feature (216)..(216): n is a, c, g, or t
aaaaatctgtgcgatccggaacatggataagctactttgatggtaatgttgagttgagaaagacattccagaaggcaaggaatatagtttgtagtctgtgcgatccggaacatggataagctactttgatggtaatgttgagttgagtgtaattttttaaataggtatttgccggttttgaaaagaaaaagcatgtttatctctactattgagagnatcttatttccactaattgcgtttcactaacatataggctttctttcaaaacacaaccaga

SEQ ID NO: 429063 - DNA, 135 bp, Homo Sapiens
  misc_feature (40)..(40): n is a, c, g, or t
ctttgagacagtactatgtcagttcagccacctattttgnattgttttctataaggaggcaaagcatatgtgttttcctgttatgcaccttttatagcctttaccactgtgtaatgttcacaaacaccaaagtac

SEQ ID NO: 429064 - DNA, 191 bp, Homo Sapiens
  misc_feature (28)..(28): n is a, c, g, or t
  misc_feature (32)..(32): n is a, c, g, or t
  misc_feature (39)..(39): n is a, c, g, or t
  misc_feature (65)..(65): n is a, c, g, or t
aactgtcacttctggattgataaacagnggangaaagtnaagtttcttttttacataagtcaganaaacttacagctggtgttcctagtttcctggttgacctcagcagatgaagtgaacagatagtgttaattcagattgaagaaattatctgaatcttggtttgtgtagatttacaatctacatgcaat

SEQ ID NO: 429065 - DNA, 384 bp, Homo Sapiens
  misc_feature (48)..(48): n is a, c, g, or t
  misc_feature (331)..(331): n is a, c, g, or t
ttttttggagaggataacatttagaaaaaaatctattgactaaacaanaatcatttgacacatgaggtcaaaccttaatttagctgtaggaatcattgtcgtatcaatgtggaagtagaaatagcactaaaagaatgttctttttctcctgaaagatgcatcctctgacccactttgtgacacatagtgaggagttcagtaactataaatgttaccgatgactcttatccttggtttaactctgggttcttctaaatgcttacggtagagtacaaattatctgctggaagagtagccaaggttgccaagtgagacagcactgaagacgtcnggaaggggagtgaagtttggaagtggagccaggcagcctttaaaataggcccg

SEQ ID NO: 429066 - DNA, 101 bp, Homo Sapiens
ataagctagagtagacttctgtgtattcctttcttgatgagatgcaactttcaaccgagagggaaactggcactgatttctctgtggtaacccttgttctc

SEQ ID NO: 429067 - DNA, 407 bp, Homo Sapiens
gacgggtcccaaaactggcttgcacagtccctttcagtattgctgtgatgagacgcctggaggaaagctgtcagagcagatgtgtgtagaggaagaaagttgtgtagtcgaaggacagtgttgtttactcttatcttgagtgtgagtagagaactgtattaacaatagggctttgtgccattgacagagtgtgaaagagggagcctatattacattggggtttgggacctgacctgcctatatctagccagcgagagtgaatggggtcagtgttagctgccttcatctatgcagtcacaaaggtaaagatgatactggagagtatattccctcccgggagccttgccaacgccccctgccaccttggaagacctgctaaataacacctttgtctgagacagggttat

SEQ ID NO: 429068 - DNA, 201 bp, Homo Sapiens
  misc_feature (48)..(48): n is a, c, g, or t
taataagatgttaagtaccctcaggtttgcacttgaacagcctattantaataagcaagatgtgctacgctttgcaaaaatcaacataattctactgtttgtactcagtcatctgatgcttctagtaaccaagcaaaagaaaacatacttaattaaatcagtcttatttgcaagcactagttttaagtattaagagctcac

SEQ ID NO: 429069 - DNA, 196 bp, Homo Sapiens
  misc_feature (170)..(170): n is a, c, g, or t
ataataggaaaacagtaaatacctaccttagggagttttcctgaagcctgagaaaatatatttaaagtacttgaaacaagtcttggcacacaggacttaaatgctgctgctgctgtctgctcacaggtttgtggtgaggattcagtggcagaattgtggagagtgcttantgcacgcctaggtttgggcatgtggc

SEQ ID NO: 429070 - DNA, 428 bp, Homo Sapiens
  misc_feature (282)..(282): n is a, c, g, or t
  misc_feature (366)..(366): n is a, c, g, or t
  misc_feature (381)..(381): n is a, c, g, or t
  misc_feature (400)..(400): n is a, c, g, or t
actccagcccagaagctgtcagcttgacacgtgcgtgcgtgcacattcacgtacacacatatacaggcttctacacagaaagggagagccacactcccccagtgcagctgcagcccgtccggtaagaatacgaaacacccaggagccacagcaagggcacaggatttgcaaaatcatcttgccaaagggctgttcctcatttacacggtcatccagggcttagaaaaaggctgaatgattggcgtctggttacaaaaaagagaaaaagaaccttttcgctgncttttgctttctaggaatgggaggataccttggtggaaaggccattttggctggcattagggaaaggattgggggcaggtttantttcaccttcctaantttttaaaaaggaccggcnaggtaaattgggtcccaattaataccgt

SEQ ID NO: 429071 - DNA, 419 bp, Homo Sapiens
  misc_feature (289)..(289): n is a, c, g, or t
  misc_feature (384)..(384): n is a, c, g, or t
gcagtgaagccaatatagttttattggatccaatgcactaccactaaaacaaatatatgtacactcaggccaatacacttttattaaaacaaatagaatttaattcaaaccagcattcaatacgttttctcaaagcaatgaaattaagctgtaccagtacttctgctcaatatgttttcccaatcaaatccatttgaacaaagtgaaatatatttatcatagatagcacatttttattaaaaacaaattcactgaaaccaagtttccctttgaactgatagatagaaantctaaccaattgcacaattagatcatagaaacggatgtatttttactttagcaaaaagcatttctgttcaggtccacttttaaaacacactaatngaataataaaagttgctccaacaatgtctttaatg

SEQ ID NO: 429072 - DNA, 435 bp, Homo Sapiens
  misc_feature (362)..(362): n is a, c, g, or t
  misc_feature (419)..(419): n is a, c, g, or t
atagtttgcaaaatttagtgaaaatatatacatttgaggtttagtgcacagaagaaaatttcagatttcactgagggaaaaaaatgtgtccaatactaaacaattataatccagaaagcttttgatcacaacattaacaggttacaaagagtattatcaatgtcaacatgtcagatatcaagactgtcatattgtaaaggcagcagcttgacaggacggaaaactctttgaagaaaacagaatttgaaaggagagaacatacatagtatcttcaatgaaacacatttctccagtaaacttaaggaggaagttagaatgtttataaatgggaaccccatatctacatggtaggtaaacttgcncctaattaagtctcccaaatccgtaaagaaaattacctctttattagcaggtaggtngttttaggaatggatc

SEQ ID NO: 429073 - DNA, 438 bp, Homo Sapiens
  misc_feature (343)..(343): n is a, c, g, or t
  misc_feature (396)..(396): n is a, c, g, or t
aatttaaactattgcttttattataattacacgggagcacaaataaataatcacaaaaagtattgtaaaatattgtcaatgcactaaagaaaacaatttattttcaaacaacatctggttactttagtagtatcaaagtacatttataattacatgttacctaaaaaaatcaagtacaaaaattaagagacattaaaacatcagtgtttatattattatatatatagaaatggctaataacacatgagtagagaaatctgttatctaatgcttatttgcacaaattttcaggcacatacctgacatttctaatgaattatgaaaaatgcaatatgacattcanatttttagatatggtaaacatgttatattggaatggatgttaaatggttttcnttaaaaaccctgtcttttaaaaatgtagtgccgttatccact

SEQ ID NO: 429074 - DNA, 592 bp, Homo Sapiens
  misc_feature (512)..(512): n is a, c, g, or t
  misc_feature (545)..(545): n is a, c, g, or t
  misc_feature (582)..(582): n is a, c, g, or t
taaatcataagcagcacagcacatcagcctgtttggcaagaaacaagggaggggtgcagtttatcacatacttggctgtgaatattcctaacagcataatagagttttcatggttccttcccaagcttgatcacctttaatgtaataagtcatcttctggggcaaggtttctgcatatacatggacatcctgcctctctgctctccttttgcatcttgcctatgagggtgcatgctgcctacttctctgcaaaaccagttggagggaaagcataccagtcagtgtgcattaatgacggcaatacattccctgaaggaggcagaaacctcagcagacgcctggaacagatttgcaaaatactctgtctgcataaggcagctctggacatccgtgtatttcttcgccccacagcctctaagcctcacttgaatgaatacctttcatggtttccttgtcccttttgatttgaagagtgagctcttttaatttgggtcctttaaggtaatttggangatcttggtttgcttgctgtcccctttggtggncatgtgtgaaataaggatatagctgtgaaatggaggnaagaggaatg

SEQ ID NO: 429075 - DNA, 415 bp, Homo Sapiens
  misc_feature (81)..(81): n is a, c, g, or t
  misc_feature (172)..(172): n is a, c, g, or t
  misc_feature (258)..(258): n is a, c, g, or t
  misc_feature (346)..(346): n is a, c, g, or t
  misc_feature (386)..(386): n is a, c, g, or t
actcaagacagtctatgtgtcttatattgtaatagttcttaataaagaaggtaaacttacagagtatttcaaaaatttcanacagaattttgagcaatgtaacactgctacttccttagttaagaacacatgaacaaatgaggatgaaatgattgggtcttaaaaagttgcngaaatccttacaaaacctggtcatgctcatacatttgcctagactgcaatttcaataggtgatgaagcaaaatccaggtattttgnaagaactgccattgagcaagaattcaattcaaagacatatgtatgagttgttagttaacatttaaaagcagttaatttggcacattcnaaacaagataaaatttctattcaaattgatgaaagttacnataaaaccctcctaatggcaattgtttgt

SEQ ID NO: 429076 - DNA, 387 bp, Homo Sapiens
  misc_feature (125)..(125): n is a, c, g, or t
  misc_feature (137)..(137): n is a, c, g, or t
  misc_feature (160)..(160): n is a, c, g, or t
  misc_feature (165)..(165): n is a, c, g, or t
  misc_feature (191)..(191): n is a, c, g, or t
  misc_feature (205)..(205): n is a, c, g, or t
  misc_feature (273)..(273): n is a, c, g, or t
tatgaaaaggatgtcactgaaggtagtaacacttcatggccacttgctttttactttcgacattgcttctaagattcatatacatcggcctttcccaaccagagcccctcatctggaccacagancacagaaaatanttgggagtggaatttccccaggnccccnaaccatggatacctaaatagtccccnaaattttaagatgncataagggagaagttatccccgttacatacaatggatgccttaggctgggcatttggagcttaattcnctattggaacctggttgagactggccgaattgttacatgtagctaagagttaattcatttttactgctgtaagatatcccatttgtgagcacactaaagtttttttcatatgtc

SEQ ID NO: 429077 - DNA, 273 bp, Homo Sapiens
tgggcaccatacccagccaaaaattctttatataccataagaatattatcctttgggttatcatctatgttgccaatacagttccagttcccttctttgttaacaacagggtttttcatttttaaattgtatgtagtcaaatttctccatcttttccttcaagatttttacggtacacttttctcaacctaaaattttaaagctacgtaccaaaaaagtacctttttcagcataaaaatctgaatttctttttaaccatatgagatgctttct

SEQ ID NO: 429078 - DNA, 429 bp, Homo Sapiens
  misc_feature (84)..(256): n is a, c, g, or t
aggtttggaaatgtcccaagcccaggagcctctgtccctgtggaggtggagggtgccacccttccagcaggttaatgtattctnnnnnnnnnnnnnnnnnnnnnnnnnnnnnnnnnnnnnnnnnnnnnnnnnnnnnnnnnnnnnnnnnnnnnnnnnnnnnnnnnnnnnnnnnnnnnnnnnnnnnnnnnnnnnnnnnnnnnnnnnnnnnnnnnnnnnnnnnnnnnnnnnnnnnnnnnnnnnnnnnnnnnnnnnnnnngcacacagtaagtccccttggcaaccaacccttcatcctgtagttatctagggattttccaataatcacctcattaacatagtctcaggtgtggttgaaaggggcttgttataaataacagaaatgctggtttcaccttcatcactctggagctactctggagctgtttctgg

SEQ ID NO: 429079 - DNA, 233 bp, Homo Sapiens
aagttgctgatcattgtggtgagaggaatgtaaaatatgagtatttttcttgctgctaggtttagttatattgtgctgcttattcttaattctagtcctaacaaatttgatttcaaaagcacatctgtggtcaaccaacttcattgttaatatttgttttattcatattaagtgacaatgtaagaatattcatgttaagtggtactgcagattttataaaaaggagaggatcc

SEQ ID NO: 429080 - DNA, 344 bp, Homo Sapiens
  misc_feature (241)..(241): n is a, c, g, or t
attacaaactagtatttttattgctgccccatagaacaaattctgttgctcagttgaatgtaatctgtctccagctgagacttaggagccaaacattttgtcttgttgagccaaacattcagtctggaggccaagggatcaggggtgggggaaagaggagctagtgcaagaacagctacagatagattgcttcagggcccaaaggtaaggcttggaaatacagtagttgcagtaacacgantttgacgagaacccctcaccacatatcccatgtctctctaaaaacccatacttgatgtctgtgttttgattctttagagttaaatggctggagcacacaatgg

SEQ ID NO: 429081 - DNA, 428 bp, Homo Sapiens
  misc_feature (273)..(273): n is a, c, g, or t
  misc_feature (285)..(285): n is a, c, g, or t
  misc_feature (324)..(324): n is a, c, g, or t
  misc_feature (354)..(354): n is a, c, g, or t
  misc_feature (367)..(367): n is a, c, g, or t
  misc_feature (399)..(399): n is a, c, g, or t
  misc_feature (412)..(412): n is a, c, g, or t
ggaagttacgatcaaatatattagaaagctgtggtcagtttaaagataaccccagggcaagaataagtaaccaaaacaagcccttgtaaaatttactattatagtgtcacaaatcagtggaaaagggaaggattattaaatgacagtaagattttgaaaaatcgagaagtttagatactttcttgactatattaaaattccaaaaagattaaaaaattttttcagtctataggaaatgttaatgaaactagaactattgtaagtactagaagnaattacaaaagnaatgatcagtcaatgtaaataaagatgactggtttttgnaacataagtgttaacaaaacggggaaaaantatttaattaacntaatggattaggagaggcagcatacagacgcnggctgaggagtcnggctgtctggaccaga

SEQ ID NO: 429082 - DNA, 436 bp, Homo Sapiens
ccctttgggtatttcggtctccctgtttgtctttttctccccatgaatgacatcaatgtctgtactgttgtactgttagagggcgtgacttactgccatctttagtgcccctgtgcagctctgccttctctagctgccccttcccccctctcccacctcccttttgccaatcttgggacttctttgtatgtttttctccttcttcctttccctctggtattatcatctaatcccagcaatttgtaatctagtactgcttaagcaagtgtagcctgaactgacgagagaagggagccaagaaagagagagctccctaagaaagaaggctttgtcttcacacagtgcccttttcccagctctcaggcttctaacttgccctgtagcactcctcttttagagggcagaagaagtagagtgctgggctgtgtacaggact

SEQ ID NO: 429083 - DNA, 337 bp, Homo Sapiens
  misc_feature (276)..(276): n is a, c, g, or t
tacagtacttaaaattttatatcctatttttactgtaggttgtctctgtctagatatatttggatacacacatacttaccaatgtgttacagttgcctgcagcactcagtacagtaacatgctgcacagctttgtaacctagaaacaacaggctacacctatagcctctgtgtagtaggctgtgcattctgggtttgtgttctacaacgttgcattctacaatgtgcacacacgggggtgaaatcgcctaaggacacatttctcagaatgcttccnccattgtcaagcaatgcatgactgtatataggaattgttccataaaatacctgtggttttt

SEQ ID NO: 429084 - DNA, 137 bp, Homo Sapiens
  misc_feature (86)..(86): n is a, c, g, or t
attaattacatatgcaaagtcttcaaaacaagagccctatttcaggatcgtaaaaacatgtcttatgcggaactttcatgtcagangcctggagtgtgaagtgttcattggacattccattttactgttcgaagtat

SEQ ID NO: 429085 - DNA, 346 bp, Homo Sapiens
  misc_feature (121)..(121): n is a, c, g, or t
  misc_feature (245)..(245): n is a, c, g, or t
  misc_feature (272)..(272): n is a, c, g, or t
  misc_feature (288)..(288): n is a, c, g, or t
gaatttgtcacccaggtagtcagcatagtactcaataggtagtcctttataaccttcaccccttctccctcccttctcttgtattctgcagcatctgttcccatttttataaccatatgtnccccccagtgttgagctcccacttatgagaagatgtgatatttggtttgcagtttctgcattagttcacttagggtaatggtttccagctgcatctgtgttgctgtgaaggacatgattttgtncttttttatggctgcatagtattccangggtatatattcacangtacataatccagtccaccattggatggccacctgggatagattcccatgtttcgggc

SEQ ID NO: 429086 - DNA, 224 bp, Homo Sapiens
cccaaaacaagcagacaggatttttcatgttaatcaaaaagaatcaagatcatcagattaggaagaaatgaggaataaaacatacgttacacacagatttaaagaactagtcaatctgctgcccccaaaaccaaaaccttctctaaacatatggacatatatccatcaagatgcttacccttcaaatatcagaatcttggaaaattcaatttacaaatacatta

SEQ ID NO: 429087 - DNA, 250 bp, Homo Sapiens
  misc_feature (74)..(74): n is a, c, g, or t
caatgcacagtattcacgaatataattataaaatagcaaacaaacttcagaaacttaaagactgagctggtccngatcagaaacactagagtctggtttcaggaaatggctcaaatacatagatactcttgactggagcaagctgaggaggagctttaacctagagtcatagctataggttaaaggacgatattcaataattctagggctcacctgacccactgtgaaaactgtcttcctcagttatttt

SEQ ID NO: 429088 - DNA, 255 bp, Homo Sapiens
  misc_feature (44)..(92): n is a, c, g, or t
  misc_feature (146)..(146): n is a, c, g, or t
gattgttttttgtttttcaaacaggtctcactcctatccatgtnnnnnnnnnnnnnnnnnnnnnnnnnnnnnnnnnnnnnnnnnnnnnnnnntgagctcaggtgatcttcccacctcagtctcctgagtagctgggactccaggtngtgtgccaccatgcctggctaaatttttgtatttttattagatacagggtctcaccatgttgcccagactggtcttgaactcctgggcctgccacctcagagcccaaaa

SEQ ID NO: 429089 - DNA, 446 bp, Homo Sapiens
taggtctttgtaatttttattattcattaagtttcccattatagaataacataataatattgcagcaccctagaacatagagaagagaggggaaaatcattcacaatcattatagcctgacattaacagtattagcatttttgtgttttctgagccagtatttttcctgttgatgttaaaccaggctctagctataatcattatgtatgaatatttctatgcatattttataagtatctaatcttagtgtgcaaataattttctaccttttccacagtattttcttttgtaagctatatatatataattgtataggctcactaatatcatttagtggttaaataattttccatcttgtgatatcatacacatacaatgccatagtgatcactcaaaacattaatttagtgaatgaaattgaacgactcatagtggcaacatcccct

SEQ ID NO: 429090 - DNA, 433 bp, Homo Sapiens
  misc_feature (102)..(176): n is a, c, g, or t
  misc_feature (369)..(369): n is a, c, g, or t
  misc_feature (406)..(406): n is a, c, g, or t
  misc_feature (423)..(423): n is a, c, g, or t
atttttaaatattttaatctgaaatccaaggaaggagttgaagtaacataccgttattctttcaaggaatttaaactcagagacaagacaaacacacagaannnnnnnnnnnnnnnnnnnnnnnnnnnnnnnnnnnnnnnnnnnnnnnnnnnnnnnnnnnnnnnnnnnnnnnnnnngagaaagacatggtgtgacttaacactgaagtcaggagcaaggaagaagaggaagaggcaaaaagaaaaataaagtcacagatctgtgggcaaggcaggataaatgtgggtatactttgcttggtggatttctcccaatattaggctgtcactggaagaagtcagtaaacacacctggcaataccccctttgncccctgaagaccactaccttccttgggggtaaaggcnagaattgccattttaantttttaaatt

SEQ ID NO: 429091 - DNA, 419 bp, Homo Sapiens
  misc_feature (314)..(314): n is a, c, g, or t
  misc_feature (337)..(337): n is a, c, g, or t
  misc_feature (349)..(349): n is a, c, g, or t
  misc_feature (395)..(395): n is a, c, g, or t
aaaagcagttcagataatacatttattgaacgtactatccacacacacagcgatctatatacaggagtccctatatggagcctgttcatgatattggccaggtttctagtgcaattatttctcttccatcttctaagttttctttctatcttttagtgttacgctctctcgtctacaggactttacttcaagtagcctcaacgcttttttagaagtgggtgagataaagttataactaaataagctaaccgaaagctctctttacacttaataacaaacaaacaaaatgggcttatttgaccccaaattaaaanttggattaaaaaaacctccatangccccaatggtncctttggaccttaacattcatgttggccaagtgtggaaagggtccnctaaactggacatgggttcaatgg

SEQ ID NO: 429092 - DNA, 167 bp, Homo Sapiens
  misc_feature (86)..(86): n is a, c, g, or t
  misc_feature (107)..(107): n is a, c, g, or t
  misc_feature (118)..(118): n is a, c, g, or t
  misc_feature (132)..(132): n is a, c, g, or t
atgggtgtgaggcagtgcgtctggtctatttttctcaatttatagataagagcatctaagaccacatcataaaatattatcacagncacactagtagttaaggggcncaaaattgggnttgaattccagtcnagtttaagcaaggatcccatgttaagttgggaagt

SEQ ID NO: 429093 - DNA, 437 bp, Homo Sapiens
tatcatcagaatttgtattgatagaggaactctgactatgcccaacgaaggcaaatacttttttgaaggccataaaatagtaacatcaggaagaagatgcttctggttactatcacatgaataaatccagatctgtatcatcactaaagaaaatactaaatcggctaaagaccagaatcatttataaataaatgcaattcatttctaacttgggctgtacccccaacatctgtttctaaattagttttcctgataacagattttattttcccataataattcatgtcaactgtcgtagacggcttcccagctgcctcttcatcatcatgaggtggggaggctgtgtgtttaggctgcagcttaacacagcttacataggagccccaagacctgcctggagtgccgagcaggctcaagtgtagagcaggagtaagtaa

SEQ ID NO: 429094 - DNA, 185 bp, Homo Sapiens
  misc_feature (66)..(66): n is a, c, g, or t
  misc_feature (96)..(96): n is a, c, g, or t
  misc_feature (175)..(175): n is a, c, g, or t
gacaccgactccgttggcttctctatgcagtcctcccatccctgttgtatgcccggcgtcccggtnttctcattctcacattctgaattgcgtacnttcccccttcgaaggagacctgatgggctagctgcgtttcgaagcggcaacttaagagttggctgaattctctgctaancaccctttat

SEQ ID NO: 429095 - DNA, 120 bp, Homo Sapiens
cctcaaatgttcagtcagatgctgtacctagcatagttccttgtactcagtgggcgactagtaaaatgttgtggattttgttaatactcagactcaggttatattaagagtccattttgt

SEQ ID NO: 429096 - DNA, 136 bp, Homo Sapiens
  misc_feature (49)..(49): n is a, c, g, or t
  misc_feature (51)..(52): n is a, c, g, or t
gttattcaggtagagtgatgtgtccaaggtcacatcaaggttagttacnanncagagattagaatggaccttctgactcagtttactgcctagattaccaaacagtcttctacaatattttatcatagtcagtggt

SEQ ID NO: 429097 - DNA, 429 bp, Homo Sapiens
ttctccatgtaatcttttatttcactgccaattgacttgatgactaaaaagaatgtatatagttcagttccatattttccctctgtgccctattttagcaagttattcttggggttaaaacaagtagtggtcttcaaattcttctttccataaaaattatggatcctgttattatgaagttcatgaaatacagcattttccagctcatctgtactttcacagaagcctacgagaaaggatagggaaacttacttttgtgtgcaaccgatcatatgctgaactgagaaagtcccaaatgcttatgagactcttgcttcctaactctgtgctcttctgccaagagataaaagcttgaactcacctacatttgtgaacagggggcagagtggaggatggcagccaacggggttagatctggcaatcactttt

SEQ ID NO: 429098 - DNA, 130 bp, Homo Sapiens
  misc_feature (92)..(92): n is a, c, g, or t
tatgtaccaagtatgaagtttggtgttagtgctatagtagcaaagaaaaacagacataatatcttcccccatgaaatacaaagtcaataggngagacagatactaaccacacaattgttgtgggaaatca

SEQ ID NO: 429099 - DNA, 363 bp, Homo Sapiens
taagcttgcaaaaagacacacagatatatgtttacacgtgcatagagagtcatgtaccacataaggacattttggttaacgaaggacctcgtaaatgactgtctataccatgatggtctcatgacattataatggagctgaaaaattgctattggcagttcgatgttgtagctgtagtggaatgcattactcatgtgtttgtggtgatgctggtgtaaacaaacctagtgtgctgccagtcatataaaagtacagtgcatacaattatgtgcagtacataatacttggtaatgataacaaatgactatgtaactcggtttatatatttacttttaatcattaagtgtattccttctgcttatt

SEQ ID NO: 429100 - DNA, 440 bp, Homo Sapiens
  misc_feature (316)..(316): n is a, c, g, or t
ggaataaagccaggttcccagtctttgcacttttactcttactctcttaatccacttgttccagggcttgtgaaaaggggttttctttcatgacttccccaacagtgagggttcctttctagctttaaaaaattcaagcttaaaaaaatttaaactggcatctttataatgctgtagcttttgctcagtgaggaatcaaaccctttgaacaatgaatgcttgtctaaagcaactattcatagaagtactgccttctggggaatgggaaaagtttttacctactgacaaacgggagtagcataacagaatagaactngcacccaacgcaaagtgccttgtgttttcagctctggaaataaggagatcagttacagcccgtctgctattgacccgttataaaaagtagagtgctgaagaatattcaaaccagatcaagcagc

SEQ ID NO: 429101 - DNA, 465 bp, Homo Sapiens
taagacagctaaaattgtgaagctaaatatgacacacaagaaatatgtaatccaggccgagaataaaagttacaatctattctttctctctgacctttaggtaagccccatgctttctccttccatatcaataaaagagtgggcgcctgcaaatcctaattcccagacttctagaagacaaatgaggtaatagatgaaacactctgggtattactaaccaaggggggaaaaaaataatgaggttaaatctacccaaagcaaatctttaacattcaagccactgtttgcagacatatagtcccctggttcacacactaaccaccggagccaccagatgtagggattcataggattggtccacacaagaaaggcttcctagacgtgtacattagtgatgtcagtaggaagtgggatgtttcaggatcctcagaaggttctgatccaccctccatctgggagcccagt

SEQ ID NO: 429102 - DNA, 464 bp, Homo Sapiens
  misc_feature (411)..(411): n is a, c, g, or t
  misc_feature (435)..(435): n is a, c, g, or t
tagagaaaatttttgtattatatattttaaatgttacccacttgtcttcgttaaatagacaatcagcaatctattttagtaatgtatgatcagatttgctactatcagtctgattatcactcaacaatataaaatcaagggactgaaaagtcattcaacttataaaacaagttagaacattataattttttatgccaaaacattcagataattattgcttagatatacaataatgacacctgtgaaattttccaaatcagaattgagaaaatttcttttgtgtgctgtaacatttatcctatgggagagaggagtatctaaggatgtgtagcaattgctagccactatgggaaaataagctcaatttttcccctggaacaatttctaaacactaatgctaccatgggtcantcagggaatcagaagaaaacatgnttacacacatggctagaaaagagccaaat

SEQ ID NO: 429103 - DNA, 467 bp, Homo Sapiens
  misc_feature (340)..(340): n is a, c, g, or t
  misc_feature (374)..(374): n is a, c, g, or t
  misc_feature (398)..(398): n is a, c, g, or t
agaatttacacaatttattaattttagtgttgtacttacaataatactatttaccattgacacagatgcatttcaatagtttaacaattgagacagtcatgctggtctctatcagtgaaatatcatatctgcttataatcccaaccaatactcggatattattaatcttttaaagttttgggaatccgagaggccaacgttgttaattcacatttaatcatgaacgaatttgtgcatctttacatatattacgttggtctttttaccctccccttgaattgctgatttatatccctagcccattttattgatttataaatattaatattacatacatganatggattgtccaagtatttcctttggcccatttnaaatttactggataaatgtttttnttaaagaaaattaagtccctttgtctacataagtcctacaaaatatttttccccaatttggtaggttcg

SEQ ID NO: 429104 - DNA, 415 bp, Homo Sapiens
gctgcttttataattctttctccttgacctatgagagtttattatatgctttggggtaatcttagttgggtcaaatctgtttgctgttctatgatttccctgtacctggatattcatctctttcttaaattttggaaagttttctgttattttgttgaatatactttctactccttgctcttgctcaactccctcctgaacagcagtaattcttagttttggtcatttgagatattttctatctctttcagtcaatatttgctctttttctttctctgttctcttctgactgtgtattcacaaatagcctgtcttggagctcactgattctttcttctgcttgatacattctgctgttgagagcctctaatggatatttcagtgcagcaaacatatttctcagttccaagaattc

SEQ ID NO: 429105 - DNA, 309 bp, Homo Sapiens
  misc_feature (89)..(158): n is a, c, g, or t
  misc_feature (256)..(256): n is a, c, g, or t
taacttttttaaaagaggccatacaatatagcagtggtcctcaaccagggctgtgtcctggacacaccctagagcaccttagatgctcnnnnnnnnnnnnnnnnnnnnnnnnnnnnnnnnnnnnnnnnnnnnnnnnnnnnnnnnnnnnnnnnnnnnnncagcctacgtgggtcgagctcactcactaaatttcagacatgacgagcagtgcttttgctctctgaagaacaagcactggggtaatgccaacacctangcctcagctaacacgggggaaggggcagaaacaagatgttgaatttgcatggg

SEQ ID NO: 429106 - DNA, 279 bp, Homo Sapiens
  misc_feature (247)..(247): n is a, c, g, or t
attaaatagaatttaatactttattaaattttattaatgtttacttctacctgtttagactatttttaaggaatgtagacatcagtactactcgaagtgtggtcccatattgatcccatattgatcaactgtcattggctgatggagagataagcacataaagtgagcaaacatgcataaacatttagaaatgctgatagtaaactgacagtgccaatgcattcaagtacatgattttgtatttacnaaaagtatccttttatgaatgggtttagaatt

SEQ ID NO: 429107 - DNA, 307 bp, Homo Sapiens
  misc_feature (190)..(190): n is a, c, g, or t
cacttcataattattttactattatctactcttttgaggttatttacatctattatatctgttggtggaaatactatataatatgtgttccgcatgtctcttcccgattctgttcagtggcgtcatgttggtagcttaaaattgatagcaacaggaggcagagaaactgtaggcatacaggggcgggtcntggcaaaatcccaccttcaagccgaaaagcctgaaacccacagcccaaagtgagaacttccattctctcccgattggttatttctgaatactgtctttttaccaattgaatattgcc

SEQ ID NO: 429108 - DNA, 448 bp, Homo Sapiens
  misc_feature (433)..(433): n is a, c, g, or t
cagtagcatttggattttattgaggttcaaatttttaaactacaaaaatggtgaatgcatcagtaaatgggtgatggaaatatttggggaggatgcactgtttgcagttgtccttgaaattggatcaagtagccacttgcctactctggtctgctaggaaggcagataagaattctgcaccttcctcttctaccccttaaaactctcctttgtttcacataaccacgaaaatgtttattttaattatctagatattccatttctatttttccttttttactgtaagaaatggcatggtaaaagattcaataaaaccatagtattttatgctcaatactctaaattaagaattaaagtcctactatctagatgccattccaaatggattaattttgtttcacattgttcataagaataatacattactttaggnggatggttttttccc

SEQ ID NO: 429109 - DNA, 444 bp, Homo Sapiens
  misc_feature (351)..(351): n is a, c, g, or t
gagttaatgaacagattttaatcggcaaaacttacaaggtatgtgttcacaaaaaagaaaagcatgcatttcccaatgcctcccttgattacacaaagaggcatggaaagtcaaagtgctctattagacacccagtgtggggtcaccattcaaggaccccatcccacggttgatagagatgaacatttttcacaggagaatcaaagatggcttaccagcaggcagtctggatttcagccaccagccacattttggagtggtagagaaaactatccaggttgtgaccttggtatccatggaaagctagatttaggcacagcgccttattggaaaggcgaggaaagaagagtnaaattcagtgctagaataaggaaaattgtgtgaagttcaaattacaaacagtggagtccctaccttcattttatgctgttggacaaatattcc

SEQ ID NO: 429110 - DNA, 453 bp, Homo Sapiens
  misc_feature (238)..(290): n is a, c, g, or t
gtctcttgcctatccctcttttttctctttagctttgcccactccaccatctgctatttaccttctcctatccctccacctttttctttctttcctatctaattctttatttaactactgactgatgaaatttctcatagctcagtgctcaatacttttctgttctcaaggtgatatattttattcccattgtttcaaatactatttatgtagcaatgacactaacttaaattatccnnnnnnnnnnnnnnnnnnnnnnnnnnnnnnnnnnnnnnnnnnnnnnnnnnnnnatcacttctgatccttccatcaacttgttccttatttcacttcttgatctcaatgaaggcaaaactcgttttcatttactcatgttcccaaactggggggacattcttaaaggcctctaatctcccacaccacccccattcaatccatccagagatggatctt

SEQ ID NO: 429111 - DNA, 447 bp, Homo Sapiens
  misc_feature (364)..(364): n is a, c, g, or t
  misc_feature (432)..(432): n is a, c, g, or t
tgaaaaaagtacataatttgtattaataaaaaaatcagcttcttgctaaatagcaacacaaaagcatatgaaagtataaatctcactgctaagggtaaatacatagacaaatacagaataatgtaatattgtaatggtggtgcataaatcacttttaaccccagcataaaagacaaaagtattaagaatataaccacaaaatattggttaatggatacacaacataaaaagcaaattctgacatcaataacaaactggggaatgggagagtaaaagtgtagtttttgtatgtgattgaagttatcagctcaaaatagactggtacaattctaaggagggttatgcaagcttcacagtaactacnaagaaaaaatcttccagcagataccaagaaaggggaaaaggatcccgagttatataacccttaaaaanttatccaatccccaa

SEQ ID NO: 429112 - DNA, 422 bp, Homo Sapiens
  misc_feature (76)..(76): n is a, c, g, or t
  misc_feature (378)..(378): n is a, c, g, or t
  misc_feature (394)..(394): n is a, c, g, or t
gggttttagttaccccagttgaaagagaaatttttcatattggggttgagaagaatggaggctattaggagcaaantttaatgagtgaaagtctggtgaatcctgcaattttgatatgtttccagtggattttgagaacacagttttaggaccagagtagatgttgttccctagaaaatagagtcagctattgatattgtgcctcccatccctcatatctcagtgttttaaccccacctgagtttggagaccagtttgtccaaggatctttcaaacatgtgagcccagagtagaacttctgagtcaaggatcatgtctttttctgaggagctttgcttggggcactgggaaatcctgttttagatcaggactaatggnatattatcctctccangggaagtgccaggttgaacatttaaggc

SEQ ID NO: 429113 - DNA, 268 bp, Homo Sapiens
  misc_feature (212)..(212): n is a, c, g, or t
  misc_feature (248)..(248): n is a, c, g, or t
caaagttttgattaatttaatgtattgacattaatcttttatgagtactaataaaattataatgatctatcatcttaaaactcatgtctcagttttgtataacacataaagaaggcatattattaacaaattcacaatcacgcaaggcaaatttttaagccttaattttttaaaactactttttatcaaatcaaagacattttgatgctgtnactttactgatcataccagaagtatcatgagaaggngtttatacaactaggagggg

SEQ ID NO: 429114 - DNA, 442 bp, Homo Sapiens
  misc_feature (276)..(276): n is a, c, g, or t
  misc_feature (291)..(291): n is a, c, g, or t
  misc_feature (336)..(336): n is a, c, g, or t
  misc_feature (359)..(359): n is a, c, g, or t
  misc_feature (376)..(376): n is a, c, g, or t
aaagaaaagagatttaattggatcatggtcctgcaggctttacagaagcataatgcttgcatctacttggcttctggggaggcctcaggaagtttacaatcatggcagcaggtgaacagcgaggaggcatctcacatggcgagagaggaggcaagaaagagtgtgaggatggggaggaggtgccacacacttttaaacagtcatatctcttgagaactcactcactatcatactctcatgaggacagtaccaaaccatgagggtccaccccatgancccaacaacttccancaaggcctcacctccaacactagggattacatttcagcatgaaanttgggcacaaccaatatccaaanccatatcatcatctctnaatccatggataagtttaaatggccatcattggtaagctatgcaggccaaatgccaaccaacactt

SEQ ID NO: 429115 - DNA, 351 bp, Homo Sapiens
  misc_feature (307)..(307): n is a, c, g, or t
atttatgaaaatatttattaaaaatactagataatattcaacgatgtaaaaccagttggaatgatccatttaagagatgaagagcaactatgttttattagtatttatgtggcaacatattttaaattaagaaacgaggtcaacagcttctttcagaagtttgtggtaatattctctgcttcatagatcctagaggtcagttgggttccaaattgggcagcaccttactcctttagctacatatattttcattcgtggacctctaacagacaaataatataacttgagagaatttcagagtactacntttttaggcctcaaaagaccattcttcccaactatccactattg

SEQ ID NO: 429116 - DNA, 432 bp, Homo Sapiens
gctcatctttcagagagagagagcagtttgaaggtgagaactggtctgggaatagttagagaacaacccttaccctattatgttttcattttcctcccccaacttatcctgagagcttagagggcatttgttgcaaaacccaagcatcaataatttgggagtggttgaaaaagtcttagttctaggttcactgaaacaacttgagttaaagatttaaaaaaccccacaactctttagcggggccaatagaactctttcatcagaatattcgacaccaccattggctagacatgtgactttgggtaaggattcgggtaattgatgcctaccttgcaggttgggaggataagcaagtaagtcggtaggtatgattattccttggaaagtaaatcataattatggaaggttaaactttgttttacattcccataa

SEQ ID NO: 429117 - DNA, 458 bp, Homo Sapiens
tcctcatgtcaaaccatgccttttctaattgcactagtgtggataccagcaactcatgtcatctgttgcaagggagtcagtactggagatgggagcacttttttgtccataaagttaatttgcaaatcaggtgtttatatgtctgtcattttgttaatgaatgggaatgcttctattatttttctttccagatgtactagatgttttgagatctctttggcactacttgtttttgccattttggaggatattacagcggtattctcatcaaagtaattagcttgttaagataagctctgcaggtggcaggtaatgtgatacattaagttaaattgtagccccaaagacttgtgggaatcagaattgcaaacacagcctgaagttcccaagtcccatgaacctacccttttaggatgtacctcgcctacagtgagagtgaacactgcaataacagatca

SEQ ID NO: 429118 - DNA, 428 bp, Homo Sapiens
  misc_feature (298)..(298): n is a, c, g, or t
  misc_feature (332)..(332): n is a, c, g, or t
  misc_feature (349)..(349): n is a, c, g, or t
  misc_feature (358)..(358): n is a, c, g, or t
  misc_feature (364)..(364): n is a, c, g, or t
  misc_feature (380)..(380): n is a, c, g, or t
  misc_feature (394)..(394): n is a, c, g, or t
  misc_feature (410)..(410): n is a, c, g, or t
tccatatctttctgattttaatactcattgttagtaactcctgagcttcctagtccccagagtttccagagagacagagtaactgggatgcttgagatgaaaggtttacatagtctttatttagcaaatcctcacatcgcacaaagcacaaaattagccatggctccaattagagtgactccaagccagagcatccagaacacagcagagtaaattggcctgctatgggtttggctcttttatacgcatgttaagtttcctcctccataatgtcaagctcagcttgagatttcctcanttttattccaaaaacctcctcctattaacccaanttcccaggtttccaganaatggcttnggaagnaaatttactgggggtnccccaaaaactttnaaaaaactcccggaanttcccccggaatttaaaa

SEQ ID NO: 429119 - DNA, 428 bp, Homo Sapiens
gcattttataaacaatagttttacttattattaacatagacagaaaagacatttgggcaccatgtataaagttctatgaatctttaagaacgattggaacctgttaaagaatacttttctcagaacatatcttacttcttaaagttaaaactagttagatgataacgtgtatttaattcagctcaacagtgaggtcaaaaacaggaagaggtctttaagaacagcggtaatgtaatggcaacacatgataaaaattaatgtaacagaatggaaagttttttctaataagaagcatctatatgataaaaatatcgcacaattaaaatgttttgagggcttaaaaatccatggcctttactctttaatatttttattaatctaataaataaaatcagttaaacaatcaaatagtagtaaaaggttatgac

SEQ ID NO: 429120 - DNA, 286 bp, Homo Sapiens
  misc_feature (226)..(226): n is a, c, g, or t
  misc_feature (239)..(239): n is a, c, g, or t
gatttcaatttttgaagtcaattttattgatttcttgactgactcaataaaggagtgaagttgaattggttgatatctaaataaaaatatccattctaggacaacagatgtgtgtagctcaggtgagcttttaatccaaagtaagaagtagggatttcagacccacattcagaatcctgaggccatggtagtttttgagatctcctctttgtagccctgagtgttngacaagcccagcntgggtgttcaatatttggcaactcagtaggatggtctgaagaccctg

SEQ ID NO: 429121 - DNA, 266 bp, Homo Sapiens
  misc_feature (222)..(222): n is a, c, g, or t
  misc_feature (229)..(229): n is a, c, g, or t
  misc_feature (235)..(235): n is a, c, g, or t
tctcataagcacggaaatttgacctcctttaaagctgactcaagatcctttaattcataaacttgtactccttacatacccaagacacggtaaatgggactcacagctcctcagacttttttctcaggtgacaccagcctgaagatgaatcataaatgccgatttggactcaatgtcccgagatccccaacatcttctcctagtagttctcaactcctctgnacacttnaaaganaattcccgggactttgggggcccaaaatccc

SEQ ID NO: 429122 - DNA, 411 bp, Homo Sapiens
  misc_feature (227)..(227): n is a, c, g, or t
  misc_feature (245)..(245): n is a, c, g, or t
  misc_feature (267)..(267): n is a, c, g, or t
  misc_feature (274)..(274): n is a, c, g, or t
  misc_feature (296)..(296): n is a, c, g, or t
  misc_feature (301)..(301): n is a, c, g, or t
  misc_feature (306)..(306): n is a, c, g, or t
  misc_feature (313)..(313): n is a, c, g, or t
  misc_feature (327)..(327): n is a, c, g, or t
  misc_feature (345)..(345): n is a, c, g, or t
  misc_feature (350)..(350): n is a, c, g, or t
  misc_feature (365)..(365): n is a, c, g, or t
  misc_feature (390)..(390): n is a, c, g, or t
ttatttataacatttcctttatttatcaacagcaacgatatgacattacaaagtgacccatgacatcttttttaatcttgcacacgcactgcagcaaggttaatcctgtatgtgaaaacctctgagtgactatctcaaagtgtatatgtcatataacctgctgagttttctgatattgtaatactagatacaagatgtctgaataactccttacatttataaattcntatttaattttaaaagcnttaatgcgggccatcatttccnataatgnaaatgggcaccaagaataatgntcccnattanttaaccncataaatttacccnatttggtaaaggccaccnaaatnggccccttaaccaanggaaatggaggttaccggccacccnaaaattttttgggaaaatttt

SEQ ID NO: 429123 - DNA, 530 bp, Homo Sapiens
  misc_feature (470)..(470): n is a, c, g, or t
  misc_feature (478)..(478): n is a, c, g, or t
  misc_feature (511)..(511): n is a, c, g, or t
aattgcttaatatattttattattatcataatcagtattaccatggggtcaaatacaaaataggcacttaataattttgtttgtaacgacattgcaaatcacttgattttaaatcaactggaaacttttctgctgttagcacaggacaattcttcaggtatctttggactgacacagttacccctcttttttactcatagttctcaagaataaatatagaatatgctgagaatgcaacatcttaagatagggagaaactagcctgaacagcctaggttctgttctaatccctcatagaaacagcatgtccttcaacacattagcacagtgaatcatgttatgctggggtataaaacctagggtggagtgctttcttgggaccctcgactgcagtgcaaatgtggcacatgcagatgaaaccccatctgccaaactaggtttcttgaggcctttacgaatcataggcttcngttggccnaactgtaagtaatacactgggcttcagggtaancctgcgtggaggagtggtc

SEQ ID NO: 429124 - DNA, 401 bp, Homo Sapiens
catcttttattttttaatgtgtacagtttagtagtgctaagtatatttacattgcagcaaacctctagaactttcacatcttacaaagctgaaactaaatacccctgaagcattaactgccccttttactctctctccagcttatcgaaatacatcattctacttcctgtttctgtaagtttgactacttgagatagctcgtataaatggaattatatgagctttgtcactttgtttctggcatgtttcactgaatgtcctaaagttttatactttctgtagcatgtgcataatttgctttcggaaggtagagccgtattccactgcatgcacatgccacatcttctttatccatttatctatcaagaaacttttaagtagctttcaccttttgtgggggg

SEQ ID NO: 429125 - DNA, 391 bp, Homo Sapiens
  misc_feature (53)..(54): n is a, c, g, or t
  misc_feature (71)..(71): n is a, c, g, or t
  misc_feature (75)..(75): n is a, c, g, or t
  misc_feature (92)..(92): n is a, c, g, or t
  misc_feature (114)..(115): n is a, c, g, or t
  misc_feature (119)..(119): n is a, c, g, or t
  misc_feature (121)..(121): n is a, c, g, or t
  misc_feature (127)..(127): n is a, c, g, or t
  misc_feature (143)..(144): n is a, c, g, or t
  misc_feature (148)..(148): n is a, c, g, or t
  misc_feature (158)..(158): n is a, c, g, or t
  misc_feature (166)..(166): n is a, c, g, or t
  misc_feature (171)..(171): n is a, c, g, or t
  misc_feature (248)..(248): n is a, c, g, or t
  misc_feature (263)..(263): n is a, c, g, or t
  misc_feature (379)..(379): n is a, c, g, or t
aattccaaaacgtccttttaattcactaacaatttaatggaaaaatactagtnnacgtcacattacatttnattnggtaagttcaatcatanttactatataatggcaaggtannatcntntataanatctcatataactttnnaganaacagttgtncttatatngagcnggtttaatgcaatttagacactatgacttaatatatggcagattagccatatgattcttctattacatttgactgtntacaatggatctgtntatctctgcattcctggtacctatcacaggacttagaacacataaaccctcaactgagaaacatttgctcaattgagtataagatttcaaagagaaaactgaaggccaaaagcaantgaagcagacag

SEQ ID NO: 429126 - DNA, 251 bp, Homo Sapiens
aaccatctcagcaaatacatggttcttaaaaacatacatgtccatttctatgtctcccacaaaacatctggagtaattacctccagacaatgtgtgctaaacttcgagttttgaatattgctttaaattattgctaccacttgtatatgactttattgtttaccaagcacttgtatatattacctagtatgtacaacaacacggtaaagtatgtatttatcagaaaaataaccagattcagaaaaactacg

SEQ ID NO: 429127 - DNA, 413 bp, Homo Sapiens
ttttatttcaaaaatttagaactgtatacatttaatgtgttaattcctcctttgcacctaaaagctgatgcttaaaattggacttcatcttagaattaagaaaatagatcaatttataatagatacactacttcagtcccacccactgccaacataccactaacatcatcacttttaagtaaactcttgaagtactcaaaactatacatattgacatagacagtaagtcaccttaaccaattacccaagtttaactagcagatattatgtacagtatgctgagattataataaacacagaattctgattcagtatttctagaatactggaacaagaggtgtttgtggcattgagagtactgtgataacctgtggtaccctttaaactgctttaaaattttacaatgaaatcag

SEQ ID NO: 429128 - DNA, 452 bp, Homo Sapiens
  misc_feature (162)..(223): n is a, c, g, or t
  misc_feature (401)..(401): n is a, c, g, or t
tcactttctttactcagaattttatttttcagtgtgtacacagaataaaaatcttcttagtgctataacaatctcagaattctaatgctttgctgctaaaagcaaataatataaaaattgtttttctcaatggatagatatcttcttgctttaattatatannnnnnnnnnnnnnnnnnnnnnnnnnnnnnnnnnnnnnnnnnnnnnnnnnnnnnnnnnnnnnctgcaaacactatggcaacttgggcatttgctacttcttgattgcagcatctagaagcagatgacaaaatgaacgagtgaaaaaacaacttttccctgtgcttagttcacttaagcttctttgttttgtttgatggtcttgacagtatgattttggatcgcttaatatataatattgngttgtgctagaaaaaactaacatatacatggaatggttttcatttaaaaaa

SEQ ID NO: 429129 - DNA, 526 bp, Homo Sapiens
  misc_feature (475)..(475): n is a, c, g, or t
tcctcattacacaatattcccacgatctacacaatttaggacaatcagcttttttcgattttttagaaaaaaacagagatgtcaacttagttttcattatgattttaaagatttttacatgttcattcttaaataaaatggggatggaaagagtactaagcaattagtgatcatgaagaatgttgctaaaccaagaaagccattaagtagacagcctcataaaacaccaagggtccaatataaaaggtactatctgacccttgtacttatgcagctgctggacccacaacttcagcctctgctccctagaggcagggtaaaggctgtcccatatttgaagggaagtacagggaacctgtacttccagggaaggcccagacttacatatcccagctccatctgctggcctgggatggcccttgaacatttaagttccccataaagcctagacatggctctgggaccagataacccnagcctgacatgctaagaagttgtgccccactcattttcctttccttttcct

SEQ ID NO: 429130 - DNA, 429 bp, Homo Sapiens
  misc_feature (98)..(177): n is a, c, g, or t
  misc_feature (414)..(414): n is a, c, g, or t
gacagttgattatttatttgaataaaaaattcaattagatttctatcacacacaatagacacaaacaaattaaaggtggattaggggctaaatacatnnnnnnnnnnnnnnnnnnnnnnnnnnnnnnnnnnnnnnnnnnnnnnnnnnnnnnnnnnnnnnnnnnnnnnnnnnnnnnnntttttaagggaaaaaaacaataaaattaaaacttagaagtatatatatgtaaactgtgatctggtttcaagattatgaaaggctttctaaatagcttaaagtagaaatcacaacagtaaaagataatctgattataaataaaaaagagggaaaacctttttatgtaaagaagaccataaaatttaaaaggcaaataataaactgggggaaatacctggcaaaatatattcatatccnaaatataccaagagt

SEQ ID NO: 429131 - DNA, 451 bp, Homo Sapiens
  misc_feature (84)..(98): n is a, c, g, or t
  misc_feature (335)..(335): n is a, c, g, or t
  misc_feature (426)..(426): n is a, c, g, or t
aatagttatatcaaatatttattcttataaatgtttaagaagatgggtaaattgtgtcagctccttaagttgaaggatcatgcnnnnnnnnnnnnnnncccatttttgtatcccttcccgtaaccattccatggctctgcatgtagaaagagctcaaaaaccactcgttgaatgagttatgagtaaatagataacactattttaacattttaatggttcacaaaaccctaaaaagcagcagagtgtcttacagtttatcccctatttccatacttccctaactcagtgctccagagataaattatcttgagaagaaaccacactcataccgattnggatttcaaaacttaatgattttttttctgttccccaataatttttgtgttgggagggggcaatcgcatcaagtttggtgaaactctggcngtaagagattttcaatcaacacaca

SEQ ID NO: 429132 - DNA, 435 bp, Homo Sapiens
cgcagaaacctcggtcttttattaatagtgtttttaaccaaaacatccccaagtactcaggaagaggcgtcagtccctccaggcaccccgtgtaaacagcaatccctgcagagtccactaggtggggccggtgacccagcggaaagggcagaaacgctccccgaggagggaaggcaggtgcgcggatgggacctttgcccggacgatccccaggctggacaagtgctccctactcctgccttgcgtggcttctagtcgatggtgtaaacatcaaccctgggggccacaagcactttagggggcagtcactctaagcatctctgggatttcaaggtcctcaagccaagttgagtccctcgtgagccaccaagcaagacgcacagccaccaagttaagttctgccccgaagccccggagcgccaggcgggggcatct

SEQ ID NO: 429133 - DNA, 448 bp, Homo Sapiens
acatctttaggaatcctttttattgttatgaaccttttctgcctgccatagtaggtggtggagtctaagtgttctaagatgtggaatgtaaattaacaatattgtaagatatggagtctgcatgatcaagattatttgtttttacagtgtgtggcaaaatgtcttcttccctttatgcctctgatatttaagccttaggactattttattcaaacctatctctataaaatcttgtggagatgtgacccagatcaataactgcctttctggccaattaaaatactcatgcatgtatccagtgaacttacaagttgaatgagaacaggacaaactacaagatattcattgacaccagttcactagtttcctaccacattttgaaaatcagggcattggacccatatgcaacaagaggcagtgctaaaagggaaacatgcctgtaagtggg

SEQ ID NO: 429134 - DNA, 362 bp, Homo Sapiens
  misc_feature (319)..(319): n is a, c, g, or t
taaaagtaccatggtcaaagatgtttgggaaattttcctcacgtcaaggtcttctcggagactttaatatgcttatgaacattatagtgattaaagaggaatatacagtatgcagtcttttctagagtaccttttaggactgttttagagaaatgttctctgatcttttccatggtcctagcacacacagaaaatgatcatctgcacaacacaaggggaataaacccctggatgcacccagcctaaggcctctgactgtcctaagtattggaggaatgaatacctggacatactcctaatctaaggaacactagttcanaagctttattctatttaggcaatgtggttttctgaagtgattt

SEQ ID NO: 429135 - DNA, 353 bp, Homo Sapiens
atgaatcactgcacctggccatgtttactatttatatcctgaattaagtttaatcgattcaatattgtagtttaaaattctgtctcaggcagccctaaatatatggaagattaagacaactgcctctgctcccaaacccaagagactttatcactttgttatggattctcagaccacaaattttaaatccgtggttgggcagggtgaggatagactacttctaagacgaaaaaaggaagcaagttagttgtctgtagttacaaagaaaaataagagcatcggtacaagctcaaagactttcttagccttcagtgtcacctgactcatggagaaagcaaaacagcattactatt

SEQ ID NO: 429136 - DNA, 333 bp, Homo Sapiens
  misc_feature (225)..(275): n is a, c, g, or t
taaaattaaatattcgttttattcatctcaaatacaaatgtctctgggaaagaatacaggtttaattaaaggactgacagactgtatggaaactactacagagattgtaaaatggacttgtgagaacttaggagttttctgaggttaatagcatgcttacctttacatctaatttatctccaaacatcatgagctaaaacatattagtcttgcctgctgggtcannnnnnnnnnnnnnnnnnnnnnnnnnnnnnnnnnnnnnnnnnnnnnnnnnngtttccctgaagtatctggacatgagtttgaaggaggaaacagaaaaattgcccctag

SEQ ID NO: 429137 - DNA, 359 bp, Homo Sapiens
  misc_feature (340)..(340): n is a, c, g, or t
gtgcacatttatttcaccttaattataacttgacttatactgggcatagttttatacaaagtcttctgcaccaacttacataaattcgcatgtttccatatatcaacatctattttccctagctggaaatttctttatacttgattgtacaaggaggtttctcttcgaaggaattataaaggtaacatctgctgttggaaatctgctcatattttaagaaattacaaagccaaaaataaatggtatctcaatgaaaactagaagaaataacttttaaaatgtctttgccatacattctcttatcttccctattcatatataatggtacattttttaaccnaaaatcccagttacccttg

SEQ ID NO: 429138 - DNA, 468 bp, Homo Sapiens
  misc_feature (450)..(450): n is a, c, g, or t
cagagtctcataaaggttgatttttcccttggaagctcctgtagtcgatgagtggtttttctttacgggtgttttccaaaatggctaattcctggaacagatgaagccccgaactgctcagaacagcgcgcagacctcttgcctctctactccccaaacctgccggtggttcctcagtaatcccctgagcacccgcagctcccgggttccctgctgcgcccgcctggaagcccaaattccatgtaaggcagggtcgccctcgtgtcccgctgtggctccggtgtccttcccccgtcagattcctacttagaggccctggggggacggagtcattattcgggggacaaacggcggctcaaggtgccttctccggggagattgtctcaagggcaggcggccgcttccccgggcaggtgtggacgggggccccgggcaaaaagcgtctctcangggtgggccttgtgtccc

SEQ ID NO: 429139 - DNA, 281 bp, Homo Sapiens
tctgcctttcactttcttattatgacccagttaagagattggctgttacatataatagtcaaaatttgttatgattatgattttatatactcagtccttgctttgttttacttgaatctttgccaaattccatgctcaccattacttcttgcatcccagttctttcactttgtaattttcttcttccataagtacatcctttagtagttctttcagtgaggatctagtcaatttcccagactttatttctctgaaggtctattttgcctttactcttgaac

SEQ ID NO: 429140 - DNA, 502 bp, Homo Sapiens
  misc_feature (317)..(317): n is a, c, g, or t
  misc_feature (323)..(323): n is a, c, g, or t
  misc_feature (387)..(387): n is a, c, g, or t
  misc_feature (403)..(403): n is a, c, g, or t
  misc_feature (414)..(414): n is a, c, g, or t
  misc_feature (452)..(452): n is a, c, g, or t
  misc_feature (484)..(484): n is a, c, g, or t
aagggcagaaacaatttgacattcatgttgaatgttgtattcccaggaattctagtacaaggcttattaaagagtaagtaagtaaacattcagtaaatctttttaaatgaatgtacaaatcaacaaagtctcattcaattagggaggataaacaaggctgacaacatcttcatgatgatttaatacaatattaatcatatagttactgagtgcctactatgtttcaagcattattctaggcaacgggaatacagtagtaaaaaaatttttgaattgaatgttttagccaaagcaacaagacattaaggcagataaangaagcntgagtattggggaaggaaattaaccaaatttattattcccaagtgatattaacctattaaaaangaaaagctggtcaccngtaaataaatnccaaggaaaaagtacagtccatttcctgggaggatacngggaagtaatagctgccgggccactcccaatnaaggtttattatcccaat

SEQ ID NO: 429141 - DNA, 479 bp, Homo Sapiens
  misc_feature (378)..(378): n is a, c, g, or t
  misc_feature (386)..(386): n is a, c, g, or t
  misc_feature (418)..(418): n is a, c, g, or t
cagagttttctgattttattaaccagcattgatgtacactgttctgtcttgcacacatatggttgtatggatagatgtaatctcaccttcaatgtttagcaaatatttacagtgaatgaattaatgaatacttgtaagaatggcaagttacaatagctttcaataggttcagaggaatatttaagtgctgcaaaaattaacttaaaataccaagatcaaggcatagaccacttttcaatctcattaccccgagtaccataatggcagaaactacaaggtttcatgcttctttcaaattatccgaattgccttggagctcagggctttagtatttccaggtgctggtcatctgcttttgacttgtatgaatctgagacnccatttancctttggttatggccacaattcaccttgaaangacaatggggggcatctccttgaataagagaaatgggaaatgtgcctgggagatgtgagtc

SEQ ID NO: 429142 - DNA, 247 bp, Homo Sapiens
  misc_feature (76)..(76): n is a, c, g, or t
  misc_feature (99)..(99): n is a, c, g, or t
  misc_feature (132)..(132): n is a, c, g, or t
  misc_feature (137)..(137): n is a, c, g, or t
  misc_feature (147)..(147): n is a, c, g, or t
  misc_feature (197)..(197): n is a, c, g, or t
tacacagggcccacctggcacatcacatagtgaacaaaacaatcggagtgatgacaattactaggcatctgaattnccaatacctaagagcaaacaggncattaaatggctttcatggggttacttcctacnaaggnaggcaagcanccttgggggtaaaaaaacacttaggccctagacaaatcctccatttattnccatcccttaaaatccactcctaccttgtgggaccttgagctccttcccc

SEQ ID NO: 429143 - DNA, 547 bp, Homo Sapiens
  misc_feature (503)..(503): n is a, c, g, or t
gctttagatcgcaggttataaatcattttggggtacgcagcccttagtaattactcctatgatcaacatgtgctgcttaacaaccttaggctagcagccaaattgattaaatttcatacctaaccattcccccaaaggaaagaagcgtgaagggagccctgtgcctgggtcccagagaggacacagagggccttggggaagccccgtcagagtcgggagaggccattctcgtgccccaggctgtccgcggacattgtacatcaagacctaccattagtgaaaagctagaagcagaaacataataatttggcaggaacataaacagcctactttgaaaaagaaatttcctcatttttccatctttcaaggtgtaagaggcacaagtgattaaaaagtcatccaaagctggcccagggaatatttcctcctaacatgtcactcctgtagatgagacctgaagtagtgacctgatcctggaaaggcagcaggaagccaagatggtnccattgcaggggaaaggcctttcttgaaattcttcatcaaaatg

SEQ ID NO: 429144 - DNA, 552 bp, Homo Sapiens
  misc_feature (415)..(423): n is a, c, g, or t
  misc_feature (457)..(457): n is a, c, g, or t
  misc_feature (464)..(464): n is a, c, g, or t
  misc_feature (480)..(480): n is a, c, g, or t
  misc_feature (491)..(491): n is a, c, g, or t
agtttcattatgcaattatctttatttgataaaaagaaagtggataccaaatagggtgtggaagcctctcataagaaaaagtaacagttggacaaagaagggaataacacaggacgctgcacagtgcttaaaaagtgacactgctattctaatcggtatttcaaaaccaaaaatctgtactactctcaactactgttaacttactcatattttcaggtagttaaaaatatgaagaaattgtttctatacatacaacagtctgcttcagactattaccaacatgtattacaatgttatggagggttaattatcgattaacataaattagaaaaaccagttggactttaaatttcactattataatcaatatcttaatgaatgggtccccttacaattcaggatattttaatcaagnnnnnnnnncttcccatcaatagtgtttataatcaagttttcngatattnatatttaatatcttcnttttttaagcnggtaattgaagaccctagttttatgttgccattcatccagaggctgtagtacaggcttcac

SEQ ID NO: 429145 - DNA, 443 bp, Homo Sapiens
  misc_feature (221)..(289): n is a, c, g, or t
  misc_feature (305)..(305): n is a, c, g, or t
ggatataactttttcttttattttggattatttctttagatcaacttgtcgggtatatagtgtgtcaatgcatatgaacattttacagcatgtgaaaaatacataatgtcaaatgacttcccaaaagcagtgagctcatttacacactctcatcaatacaggagtgtgtctatttcctcatgatattaccggcactgggctttttaatttgcaaaattttnnnnnnnnnnnnnnnnnnnnnnnnnnnnnnnnnnnnnnnnnnnnnnnnnnnnnnnnnnnnnnnnnnnnngccaattttccatttnatgctactgggctttagaaccatgatgaagtaagcacagagctgagctgtgctggggaagcagcacatgcctacaatgttataagcttaccaaaaattagggaattttgtacatggagatctgaaaggtagtaaaaaa

SEQ ID NO: 429146 - DNA, 177 bp, Homo Sapiens
  misc_feature (66)..(66): n is a, c, g, or t
  misc_feature (144)..(144): n is a, c, g, or t
  misc_feature (160)..(160): n is a, c, g, or t
ggtgatcaggatgaacaaaaacagtggtgaatcatgtggtcagtgtgtccccttgatatgtgatgnaatgacacttcccctttgagggtcttcctccaaaaaaacacggtaactcccagtggtaatccatgaggaaaaatatcnagaccaattcccaggntgaagggggaatcccat

SEQ ID NO: 429147 - DNA, 473 bp, Homo Sapiens
  misc_feature (458)..(458): n is a, c, g, or t
aagcaaaacaggaatttattgagaggctattcaacttggagaactaaaggataagctgaataactaacctccaaaaggacagggaacagggtagcttctgggatctgggtagcaggaactaatggactgtatccttaaggcatcatctttaagaaccatgcttaggccatgggacatagtgctcaaaagtcaccttccagggagagagcatctgcttgggctggtggcttgtgtgctcaccctttggctaggaaaggcaggaacagtcattgaaagttcttctaagactgcattaaatggataaatggctgttccgcaaaggaaaattgggatatattaccagaagaaaggggaatcagaacttaagaggtgttaaacgtatcacatgctacaggaccataccacctgggaggagtattagaatatggggtttgggagaaagaccatggattgagaangcgtatccaatatac

SEQ ID NO: 429148 - DNA, 202 bp, Homo Sapiens
  misc_feature (94)..(94): n is a, c, g, or t
  misc_feature (139)..(139): n is a, c, g, or t
aacacttgaaaatgttaaactttacttattatgaagaaaaactatcaatgattcatcatttgtcattatcaaagaataaaagactcaagaatangcaatactggggaggatgggatgagacaggcactctctgaaactngctcggtggaaacataagttgattcacaaaaatattcaccatagcattcatagcattataaaa

SEQ ID NO: 429149 - DNA, 182 bp, Homo Sapiens
  misc_feature (48)..(48): n is a, c, g, or t
  misc_feature (50)..(50): n is a, c, g, or t
ccaaagtatttgtctacaatggaaactccaggacattatgtactttcntntgatcctgtttcagtttccagggtaagattttgaactatttggcatgtaacagttatttttctcctctaacatcttttttccccagtctcataaggaagagagaaaagtcagaaaataatatttaaattggg

SEQ ID NO: 429150 - DNA, 272 bp, Homo Sapiens
  misc_feature (237)..(237): n is a, c, g, or t
acattctgtgtgccatcaaggaacatggttaagtaacactatggctcaaggtgcgactccacactgacgtagcagtagtgactccgttgtgctccattttgcctgtccatctcttctcagatttgccattttgtctgcatcttgatttttgcaataatccatgctgctggaatcacatcctgggtgagggccacctgagactggaaaccagaggaccaaggtgtctgcttttgctgnaccacttggttaatatgactttgagcctcagtttc

SEQ ID NO: 429151 - DNA, 437 bp, Homo Sapiens
cctagacaatttttattcacagaaagaaatgtacaaaggtccctcaatccacaaatacttttttcctaaatttatcttaagaagttaaaattagcattctgattattaaatctaaaactctagctttaattctatctaaacaaatatttcaaagtctcgtactcaaaagaaatagtattttgttcattatctgcattattctgcccctaagaagtagttactgacataatacgggaaacattctgttgcagtaatggaatgcgtaactgaaaatacaaaaaacagtaaaagctagttaaccctgttaccaagctacagaatatgacccctgtagaatactttaaacatttattttcttcaaaagacttgaaaaactattcttagaatccttacatagaatctggaatactttataacgctggtcaaaccaagacttt

SEQ ID NO: 429152 - DNA, 415 bp, Homo Sapiens
  misc_feature (205)..(205): n is a, c, g, or t
  misc_feature (210)..(210): n is a, c, g, or t
  misc_feature (236)..(236): n is a, c, g, or t
  misc_feature (294)..(294): n is a, c, g, or t
  misc_feature (333)..(333): n is a, c, g, or t
  misc_feature (377)..(377): n is a, c, g, or t
  misc_feature (393)..(393): n is a, c, g, or t
  misc_feature (405)..(405): n is a, c, g, or t
aaatttcggaaggcacgtaggattgtaaaggttagctgcccaagtttgtccagccaccactcagagagcacaaatggtagccccggcattgcaactttgggaggcttgagatggtagacattgtttgttatctatatagggttgactgttgtagcctgaaatgtttggctcattcttttaaaaaaactaaatcttcttagagtcnttccnccaattgtgcccaagtgagctccagnatcagattaaataaccacagattcaaagtgtgacaactgtatcctgtttcattatacnaatagaaagtccttgggaaagtttgcaagtttgcccagnattaccaagcactagggcaaattccaggataaggtttgccaagntttagagtcccatccnggtgggtcaatnggtagacagg

SEQ ID NO: 429153 - DNA, 438 bp, Homo Sapiens
  misc_feature (374)..(374): n is a, c, g, or t
  misc_feature (380)..(380): n is a, c, g, or t
tactatagaaaatttttattgaacgaagcacaaagtaagagtttgaccgaaatatatagtgattgatttattaagacaaaacttaaagaacatacgcaattggtttattacatagaaaactttcagctatttaagaccagttatgtggaacaaaatggtctaaaatagccatattggttattggtattgcatagaacagttaaacgatattctcatttacataaactattcaaaggcctctaataaacatgaccttggaacttccctcatcagaggaagcaaaacaaaaagagagcttttaaacgatggaatcaaatgaatggcaattacagagtccattcacatatttccattccgatagcatattttattcnaaaatnaacccccatgggcaagttgtaagaaaaaccaggcccattaccatataggcgtttaaag

SEQ ID NO: 429154 - DNA, 217 bp, Homo Sapiens
ttgcttcaatgattgctcttgtttataatgaaaattagtttttcttctaaaattacattttgtacaatgaagtgtaatactcttccctttcttttcaatcccgtgtagactttaaaacaaatagagtatccttagaatcaagccataattctaatgacatttgaaagatacattcattttctttacagcatgaaagacacacaaataacattttatc

SEQ ID NO: 429155 - DNA, 414 bp, Homo Sapiens
  misc_feature (76)..(95): n is a, c, g, or t
  misc_feature (292)..(292): n is a, c, g, or t
  misc_feature (297)..(297): n is a, c, g, or t
  misc_feature (304)..(304): n is a, c, g, or t
  misc_feature (327)..(327): n is a, c, g, or t
  misc_feature (338)..(338): n is a, c, g, or t
  misc_feature (343)..(343): n is a, c, g, or t
  misc_feature (358)..(358): n is a, c, g, or t
  misc_feature (365)..(365): n is a, c, g, or t
  misc_feature (376)..(376): n is a, c, g, or t
tccataaggcactgcaatcgattaaaaacacttaaccctaactggcacataccaaactgttgatgtgcattgaggnnnnnnnnnnnnnnnnnnnnaatattagcaccaaatttttgggaacggagtcaaatttacttgttgggtgttctagagttacatcttagaaaataccatttaaacacgttttcagctcttcaaatattagccttagagcaaattcctggaaaatttggcacccattttataactattggcagcattttcacttttttcccattcctttaagaaggcntaagnttttaantaatggccaatccttttggaaancccttaataanttttnaggataaatttaggnatatccnaccaccttatncccttaaaaaaatatatatccccatgggaaacctcctc

SEQ ID NO: 429156 - DNA, 516 bp, Homo Sapiens
  misc_feature (273)..(273): n is a, c, g, or t
  misc_feature (293)..(293): n is a, c, g, or t
  misc_feature (365)..(365): n is a, c, g, or t
  misc_feature (379)..(379): n is a, c, g, or t
  misc_feature (440)..(440): n is a, c, g, or t
  misc_feature (448)..(448): n is a, c, g, or t
  misc_feature (486)..(486): n is a, c, g, or t
  misc_feature (506)..(506): n is a, c, g, or t
aattgacaaataataattgtagatattcatagagtatataatgttattatatatacatataatgtatagtgatcacatcagggtactaagcatatccatcatctcaagtttatttatcatttgtttgggttgggaatgttcaatatcttccttctacctatttaaaagtatatgttactgttaactatagccatcctgcccaccactgtttttataaaacatatacacagccagctttaatagaactacaagttatttaaaacgtataaacangtcaatatcagaataaaccnaaatcgaatttaggaaaaaaatggaggaagcattaagccttaagtagaaagtctcaccatccaggagcttcnttttaactccatcntttagtccaggccactttcaggtccatcagcaagcgggagggtagtaccatgggcatggcngggtggangccggttcagcccgggaaatttgttaaagagatccgcntatatgcctccttggataanttccaaatcc

SEQ ID NO: 429157 - DNA, 234 bp, Homo Sapiens
taaaaagggagggggctccaagcactcccttgcattaaactctgaggatgctgaaccaagagagacagtgtgaaccccagcattggtggctgttgtctaagaggcccatgccagaagcgacatctgatagagtggccacctcaccccacgtgagcccggcttactcgtggcctggaggactttgagtgagactaatttccatatcaaacccaatttagatgaaacgtctttgtt

SEQ ID NO: 429158 - DNA, 493 bp, Homo Sapiens
  misc_feature (122)..(122): n is a, c, g, or t
  misc_feature (193)..(193): n is a, c, g, or t
  misc_feature (198)..(198): n is a, c, g, or t
  misc_feature (252)..(355): n is a, c, g, or t
  misc_feature (385)..(442): n is a, c, g, or t
  misc_feature (449)..(449): n is a, c, g, or t
  misc_feature (474)..(474): n is a, c, g, or t
taaagcatgggaagtagaatgtatgaattgatgggttctgtttcaaagatcagttaatttcagtcttaagactctaagagaaaagttggcttagagatctggtcaaatctggggccctgagngtaccttgggctcatggcagcacaaaagaaatctcactgacagaagtaggaagttgccctcacacgtgagnaggtnaagccaatgaagccatctcatttcttaatgcagcaagaccaggtggtgcagtgnnnnnnnnnnnnnnnnnnnnnnnnnnnnnnnnnnnnnnnnnnnnnnnnnnnnnnnnnnnnnnnnnnnnnnnnnnnnnnnnnnnnnnnnnnnnnnnnnnnnnnnncattcagctccccaactggcatcttaattnnnnnnnnnnnnnnnnnnnnnnnnnnnnnnnnnnnnnnnnnnnnnnnnnnnnnnnnnntgcaagnccagatactccatgcagttaccggnaagtccctaggtgtgtttg

SEQ ID NO: 429159 - DNA, 506 bp, Homo Sapiens
  misc_feature (238)..(238): n is a, c, g, or t
  misc_feature (383)..(459): n is a, c, g, or t
aatttacaaataaaagagatttaattggctcatagttctgcagtctgtacaggcaacatggcagcatctgcttctgggaagacctcaggaaacttacaatcatggtggaaggtgaaggggaagccagcactttacattaccagagcaggagaaaagtgggggattaggtggggggaggtgccacacacttttacaaccagatcccagtgagaactcactcactatacagtaccaagtnggggatggtgccaaaccattcatgacgaactctacccccatgatctaatcaccttccaccaggccccatctccaacactgggcattaccattgaacatgagatttgggtggggacgtagatccaaaccataccacatgcctaagnnnnnnnnnnnnnnnnnnnnnnnnnnnnnnnnnnnnnnnnnnnnnnnnnnnnnnnnnnnnnnnnnnnnnnnnnnnnngtcctttcacatgagatataaagagtactatgcagcagtgaggggag

SEQ ID NO: 429160 - DNA, 504 bp, Homo Sapiens
  misc_feature (171)..(369): n is a, c, g, or t
  misc_feature (419)..(419): n is a, c, g, or t
  misc_feature (441)..(441): n is a, c, g, or t
  misc_feature (493)..(493): n is a, c, g, or t
gagtcttgtaaagaaggaaaacagtgcctggtgagtgtttaatgctacctgttactatttctaattctgttcttatgccaaaatgagtcttaatacaacgaaatataatacagtttaaatataacaaataacatatgacaagtttaaattttttaaatcgtttaagtatannnnnnnnnnnnnnnnnnnnnnnnnnnnnnnnnnnnnnnnnnnnnnnnnnnnnnnnnnnnnnnnnnnnnnnnnnnnnnnnnnnnnnnnnnnnnnnnnnnnnnnnnnnnnnnnnnnnnnnnnnnnnnnnnnnnnnnnnnnnnnnnnnnnnnnnnnnnnnnnnnnnnnnnnnnnnnnnnnnnnnnnnnnnnnnnnnnnnnngggtgggccgcctccgtgcccgaattcctgggccccgaagggccaaattnccccatagtgaggccgaattanattccgtaaccaggccaagccggttcccggggggaaatggtaacccgccccnaattcccacaa

SEQ ID NO: 429161 - DNA, 436 bp, Homo Sapiens
  misc_feature (355)..(355): n is a, c, g, or t
gaatctttatcttgtccttttattgttagttggcatgcaataattgtacatatttatggaaacagagtgatattttgatacaggtgtacaatgcataatgatcaaatcagggtaattagcatttcaaacacctcaaacatttatcatacttttgtgttgacaacattcaaaatcttctcttctagctttttgaaaatataccataaattatagttatttccatgcgaccagctatagagcactacaacagaacttattcctccagtatagctataattttgtgtccattaaccaacctctgctcccacatccttcccaacatctaataaccacaattctaccatttactttaatngagctcaaatttgtttagttcctgcatatgggtaaggacagacagtattaatttttctgtgtctgacttattccacttaac

SEQ ID NO: 429162 - DNA, 442 bp, Homo Sapiens
  misc_feature (256)..(303): n is a, c, g, or t
tacagtttctttttagcattgtaccttttctagcatttggttttcttgtgaaaacagtggcttaaaaatatccctttaatgaatcttctttctgtgacaaagtatttgcccttttctcccttttattatgaaagtgacataagggattctaaactcgttaaaacagtgaaaatcaccataagtagaaatgatgccaaacagtaatgagaaactctgtctttggaatcacacccctccaggattgcagttctgttgnnnnnnnnnnnnnnnnnnnnnnnnnnnnnnnnnnnnnnnnnnnnnnnncaatcataaattgggaaaaaataatttaaagcacaaaaagaaagccttcctcacagtacctggactacagtgagtgttcaatgagactcagtgattgttgttaacaatggtgtaaagacctggggggtttaacaagaag

SEQ ID NO: 429163 - DNA, 442 bp, Homo Sapiens
  misc_feature (243)..(266): n is a, c, g, or t
aatcatagtaccctttattatcaatattcattagctatcattacacgatgctcactgtgctgagctcagaactgtatgaatagcatttaaattaattctaacaattcattaagtaacgttattaacctcattttacagatatggaaactgagacttagaaaagcaacttgccaaagtcactcagtatgtcaggggcctgaacttgaattaagagtttgattcaagagccctgttcttaactannnnnnnnnnnnnnnnnnnnnnnnggttaggggtgtcaaacccttgtgcaaccaaaaatctgtatataatttttgactcccgcaaaacttaactactaatagcctactactgaccagaagccttactgataatataaagtcaattaacatagattttgtatgttatatgtaagagataatatattttttatacaaacatc

SEQ ID NO: 429164 - DNA, 417 bp, Homo Sapiens
  misc_feature (377)..(377): n is a, c, g, or t
ccttacagtatctttgttattgtacttgcttacttctcctggtttattaataaacacaaactaattacatttttatctggctctctgatcttcgttgctttattctcctagtcagttcgtctgtagtctggaagatttttcaaacatgtaagagcatactataaaatcgtagagagtgctttttttaaccaggctgatgcagacaaagtcttgcctctcaaattagtttctgtgaactccaccttttgctggtctataaaataaagagtaatcttaccttctttaccaagaggtttgtttattaactgtggaaatgcttgtaaaacacctactaccattgtcctatcaagttctaaaaaaatatttgttattattgnttagagtcgcagctttgctttctgcatcttaaatcctaac

SEQ ID NO: 429165 - DNA, 458 bp, Homo Sapiens
  misc_feature (418)..(418): n is a, c, g, or t
  misc_feature (429)..(429): n is a, c, g, or t
  misc_feature (445)..(445): n is a, c, g, or t
taatagaatattcagggaggggttcttccaaggtgccactcaaacaaaatccaagcaggttcatcataagacgaaaaaggtacactctcagattggtttaaacctcctaacttaaaggacaaggaaggatctgtttttgtcttttggaaacccatgagctatctacttgttctttacttcagccaattagaagttcaactgaagatagctattgaacatcatcttaatgatgttataaacaggcaatttaaatattttattttgcataatccccaagctgggttatcacagagaaagcatctgagcttctccagctcgccaacctgcctggcattcgtagctactagccagtcctggtttccttccacaaagaaaaccatgatttggtggtttcctccttggtccgagaggggccttnacaggtgggangtgatgagtagtacantctccaaaaaaac

SEQ ID NO: 429166 - DNA, 488 bp, Homo Sapiens
  misc_feature (108)..(351): n is a, c, g, or t
  misc_feature (370)..(370): n is a, c, g, or t
  misc_feature (412)..(412): n is a, c, g, or t
  misc_feature (433)..(433): n is a, c, g, or t
  misc_feature (455)..(455): n is a, c, g, or t
ttttattgtacatattcatggtggacaacatggtgctgtggtaaacatgtacactactgaaatgatggctgcaattaatatctccaacaccttccatggttccttttnnnnnnnnnnnnnnnnnnnnnnnnnnnnnnnnnnnnnnnnnnnnnnnnnnnnnnnnnnnnnnnnnnnnnnnnnnnnnnnnnnnnnnnnnnnnnnnnnnnnnnnnnnnnnnnnnnnnnnnnnnnnnnnnnnnnnnnnnnnnnnnnnnnnnnnnnnnnnnnnnnnnnnnnnnnnnnnnnnnnnnnnnnnnnnnnnnnnnnnnnnnnnnnnnnnnnnnnnnnnnnnnnnnnnnnnnnnnnnnnnnnngtaggagcacctggagtcntctctcagcacacccgccacacacaacacctgactgtcaccngtagtccctgcactgtgcacnggactgctcggctccctctccnacacaaccgcaagcccctgacctcctcctcccc

SEQ ID NO: 429167 - DNA, 482 bp, Homo Sapiens
  misc_feature (319)..(319): n is a, c, g, or t
  misc_feature (374)..(374): n is a, c, g, or t
  misc_feature (418)..(418): n is a, c, g, or t
gatatgtgccccaaagatacagatttgccttgctccgtttcatggtcatagacttttatcccatgccagccttcttacagacgtgtgctacgggacataggggcccaagtagggtatctggaaaatcaacaaacactagaattggaaaaacaagcaaagactacagcacatgtgtaattaccagcttgtacaggcatctcgtggttttaaaatagtagttccaataatgtgagaccttaaattgtcttttcaacatcactggatgatgagttctcagaatcagtgtatagatgaagaaagtcaattttatgcttatggntatttaaagaaccgttcttgttttggtccattacatctgtaacattttattttcnaattaaacctttaaattatggccctccccataaaatgggcatcntaaatccaaatggggatacttaaacccccccggggccgaattcttgggcccgaggggccaaatt

SEQ ID NO: 429168 - DNA, 121 bp, Homo Sapiens
taacacctttgtctggccgtcaaagattactgaatatttaaaagatatcctcctgtggagccagaaaccatgaaaacatcatggattctggctggaccacctcaaccactcacagataacc

SEQ ID NO: 429169 - DNA, 520 bp, Homo Sapiens
  misc_feature (453)..(453): n is a, c, g, or t
aatctctctccagttaggaaaattatccttattgtctatttttaattcattaagttaatatataataagttcctattgcatgttaagcagagagactaaatctggctcctagtaacaaaaccctttctttcttctagtagagtaagacacttgcctccaccaggtatctagcagaccaagaatttctattctctgccagccagatgctcactccattcgccaccatgctgaatacaaaatggcataaccttgatgttcctttataggtgggcaggaataagatccagacaaggccaggctggagagggcagggtcagtgtttgaggcagaattaaggcaactgaatggcgagagttggagacaggggaaaagggagaaaaggctcaaaggacagagtttggagactaaggaaaagagaaagggggttggagaagaggacagagctggaggtcncaaaaagaaaaaggccaggagaaagagaaggctggagtccaggggtggggcaaagaggttagggttg

SEQ ID NO: 429170 - DNA, 350 bp, Homo Sapiens
ccgctgatctttaatgcccagtgctttctcgggcaatgcgtggggctgaggcattaaattttgctgaaacctcagtgctgagggagtgagtgtgcacgttctggacctaggacaggacagaggcctggctagctcaggtgctctgataatcaaccaagagactgggccaacacagatgctgaggcccgcgctgcactctcctactctttccaggctgcaagtgtagcattgttattgacaattccattcatttttcttcatacacacccatacacgcttttcaccatccactacatcctgtttacttggcaagctggcttctcatttttgagttccagaatccacacttg

SEQ ID NO: 429171 - DNA, 423 bp, Homo Sapiens
  misc_feature (237)..(237): n is a, c, g, or t
  misc_feature (263)..(263): n is a, c, g, or t
  misc_feature (274)..(274): n is a, c, g, or t
  misc_feature (297)..(297): n is a, c, g, or t
  misc_feature (302)..(302): n is a, c, g, or t
  misc_feature (343)..(343): n is a, c, g, or t
  misc_feature (378)..(378): n is a, c, g, or t
  misc_feature (391)..(391): n is a, c, g, or t
atttgttcatgattttatacagagaaacagaacgtgtcaggattccttggcagtgagcatactggaagctcgtggccacactctttctttccgtaccacagctttccctgtctttctctgtccttttatctacatacattttcttcctttctggggatgggggaatgtcggcagggggaggtttggacaaattctctacttattattttgatttttcaattcttaaagcttccgccnattgttttcttttaatcactaagtanttgctaagtgnttttacattccaggccaacccanagacntggaagggatcactgggaaattaggaggccccccatttaanggtaaaaggaagaagcccccgggaccaagagaaangggtggttggaangccttgaaataccaggagcagttttactgcct

SEQ ID NO: 429172 - DNA, 154 bp, Homo Sapiens
ataggaaacaggtttaattgactcacagttccacacggctggggaggcctcacaatcatggcagaaggcgaatgaggagcaaagttatgccttctaaggtggcaggcaagagggcatgttcaggggaactcccctttataaaaccatcagatct

SEQ ID NO: 429173 - DNA, 432 bp, Homo Sapiens
aatttataaaggaaagaggtttaattgactcacagttcagcatggctggggagttctcaggaaacttacaatcatggtggaagggggaagcaaacatgttcttcttcacatggcggcagactgagaagtgcagagtgaaggtcgggggaaagccccttataaaaccatcagatctcatgagaactcactatcatgagaacagcatgaggataactgccccctgattcaattaccttccaccaggtcccttccatgacatgtggggattatgggaactacaattcaagataagattttggtggggacacagccaaaccatatcaatggttccatgttctggattcccagcataaagacatttcctgatttcccagtatagttggatgtggtccagtgaccaagttctattcaatgacatatatgtgaaaagta

SEQ ID NO: 429174 - DNA, 200 bp, Homo Sapiens
tcctcttaatcaatttaattaaaatgataaagtacttacagcaaaataatggctatacaaatacagtatctacttacagcaggtggatacactatagataagatatatcccatctagattatgtgtcataagcaaacttctgtttaagtaaaataaatcgtcccaatccaatttcaaatatagtttccctctctctcatt

SEQ ID NO: 429175 - DNA, 419 bp, Homo Sapiens
  misc_feature (323)..(323): n is a, c, g, or t
tgtcactgtgtttgattaactatcctggatatgctttattctctaaaaacttcatttttgaaaataccatggttattaaacaactagtctttgtgcgtgattaggacataaacaggaatctcacccacttttaaacctttccaagaaataacttttccactgattttattttgaattgttaaaaaacttttagcagggagagaaaatttggttgatgattcagagcgcgagggaaacggaagcaagggattctggcacatgcgcacgagttgaactgacaactggtggatatttttatatttattgctattcttagcctaagnctggagctgagtagggagtaactaagcttagccatacttattagacttagagattttactttgtttatgtcaatgtcaaggcctttgggaaaactt

SEQ ID NO: 429176 - DNA, 458 bp, Homo Sapiens
gcgaagaattgtattgccagtccagttgtacagaagcaacagatagacactttcaatatgaatgaactgagggaatatactactcatgcactttccagaaaacctgtagacaacaaaatgatgagtcaaaattcaaaacctagaaatgaagaagctatggtaaaagcattcatggtgagtacagtaatgattttgttttcgtattggattaaaactaaacaactctgcttatggaacagaaaccttgacaatgtggtagtaatataaataaccaaaaccagtacttgggaggaagtgtgagtactgatttctttactttcataatggggaatagatttgtcagtagctaaagtctgaaattgaaatatatagttgaaaaaataatgatttcagcatcctaatgtttttcattacttttttcttaactttagagagatcttttagaaactattctctct

SEQ ID NO: 429177 - DNA, 439 bp, Homo Sapiens
  misc_feature (388)..(388): n is a, c, g, or t
cccaaaaccttaaatccagtactagtgttcttttctcaccatatattttcaacaccatggaactgtaatcccattttcccactcaatatctcattacaaagatgttccattcaaatctgatccttcaacattaagcttaaagcgcctctggttgtccatgtcaactctccccttgtcccctaaaagctacatttaagcacagtgtgtataaaacagttcgttgttttgggataaggagttccttaaagctacgtttaagcatagtatgtataaaacaacacgtttgttgatcaaacttttgtttgttgctttatatatattgcaacagtttgttgttttatacatactgctcttagacatagctttaaggaactccttaaggaatggnaactaagtgcaatgtggagctcattttttactgaatcattaccttttagta

SEQ ID NO: 429178 - DNA, 166 bp, Homo Sapiens
gactctgcttttctaagacgactcttttttaaaaaaatagtaatttggtagtaatttggcagaaattcagaaattttatttgagcggttaagacatcaaataaaaaaacattttagcaaatgtttttggaatgtaatagatacactaagcatgttcagtagttttg

SEQ ID NO: 429179 - DNA, 178 bp, Homo Sapiens
  misc_feature (62)..(62): n is a, c, g, or t
  misc_feature (69)..(69): n is a, c, g, or t
  misc_feature (79)..(79): n is a, c, g, or t
  misc_feature (96)..(96): n is a, c, g, or t
  misc_feature (125)..(125): n is a, c, g, or t
tgcaaccaacacccaagccagttccaccaagtctttgaacttcctgtctgggctgaaagtanttgcagntagcatggancgcctgggggaatggcnctcaaggtcaattccaattaagaactcgntaaagatactgggccagccttaaattccaatcccaaaaacccggcttaggttt

SEQ ID NO: 429180 - DNA, 236 bp, Homo Sapiens
  misc_feature (15)..(15): n is a, c, g, or t
  misc_feature (50)..(157): n is a, c, g, or t
gtgccttccacaganaatgtttgctcatctctatgctacactctagaaannnnnnnnnnnnnnnnnnnnnnnnnnnnnnnnnnnnnnnnnnnnnnnnnnnnnnnnnnnnnnnnnnnnnnnnnnnnnnnnnnnnnnnnnnnnnnnnnnnnnnnnnnnncttctttttttaatgaaatgaagagtaacagcccctgccttctggaatttaaaatctggtaggaggatatcaaagtaaa

SEQ ID NO: 429181 - DNA, 439 bp, Homo Sapiens
  misc_feature (119)..(134): n is a, c, g, or t
  misc_feature (143)..(143): n is a, c, g, or t
  misc_feature (156)..(396): n is a, c, g, or t
ctcctagtgggagagaacagtgtttgtaaataatgatgaatatataggtttttccatttgtgtaccccttttatctgacttcagatttgtagtttgataggtgacctagtctataggannnnnnnnnnnnnnnngagacgganccacccttgtcannnnnnnnnnnnnnnnnnnnnnnnnnnnnnnnnnnnnnnnnnnnnnnnnnnnnnnnnnnnnnnnnnnnnnnnnnnnnnnnnnnnnnnnnnnnnnnnnnnnnnnnnnnnnnnnnnnnnnnnnnnnnnnnnnnnnnnnnnnnnnnnnnnnnnnnnnnnnnnnnnnnnnnnnnnnnnnnnnnnnnnnnnnnnnnnnnnnnnnnnnnnnnnnnnnnnnnnnnnnnnnnnnnnnnnnnnnnnnnnngcgtgcacccaaagcacagccaagatgttttaaaagagtcata

SEQ ID NO: 429182 - DNA, 428 bp, Homo Sapiens
ctaaggccagagtccgaacttgcatgatttctgatccatatttgaggttttcccactcatctgagaccccacgctgggaatgagggcggggtggaaaaacccgggtcccttgtgatatctgacctctgctcgaggtgtccccctctcttttgccagtcgtgagattttgtatggaatgggcaagattccgcacaattgaccctcgacggaagtctcctaaattccaaacccaggtccagggattgaaggctggggagtagagccatcctgggtcaggctgctggtaaggagcggtgggacctgaaagacgtggcggcgttggcgcggtccaagcgcccgaaggctgttcacgagttagtcacttcgcataacttggttaatccgggactgggcgggcggaagggcagacactctgcctgtccggagtt

SEQ ID NO: 429183 - DNA, 453 bp, Homo Sapiens
  misc_feature (160)..(161): n is a, c, g, or t
  misc_feature (164)..(164): n is a, c, g, or t
  misc_feature (245)..(245): n is a, c, g, or t
  misc_feature (371)..(371): n is a, c, g, or t
  misc_feature (381)..(381): n is a, c, g, or t
  misc_feature (408)..(408): n is a, c, g, or t
  misc_feature (413)..(413): n is a, c, g, or t
  misc_feature (434)..(434): n is a, c, g, or t
atttgctgaaatgttcttgaaccttacatggattcatggctcataactttttaaatataaatttagggctaatcatgggaacagaataagcagctgtaaacaaaatcaagttagttaggatttcactaaaacatggacagggccccaaatatcactaacnnatngcagaatgtgggaattacaaagccaaatactgtgattaaaaatactctgaataagcaatctttttggaaagaggtgggtangacggaactaatgaagtgtttccgttagttcacatcagcaccttggacagttccaaggaggctttctccctcagaaaggagcaaatatcagtatttgtctagttttctaagcattcatttccattngagtgtgttngatcccgatttatccaactaaataaantggcngaaggtaattaggtgtggtcntaaaaacccttaattcctt

SEQ ID NO: 429184 - DNA, 157 bp, Homo Sapiens
tggaagtatctggatgttacttagtcacttaaaggagaactgaaaaatagcagtgagttccacataatccaacctgtgagattaaggctctttgtggggaaggacaaagatctgtaaatttacagtttccttccaaagccaacgtcgaattttgaaa

SEQ ID NO: 429185 - DNA, 399 bp, Homo Sapiens
tttgtttttttattcccctgctttccaatttgttttaaggcctggggagctgggcgttctgaaactgggaagcagtaacagatgagttgccgcccgatgcatctgaagatcagcggctgcagggccaaggcatttcttggcagcatcatttccactccggattttattaaaggagatacgttgatggagtcactccctctcagaagaaatgtttacaattaatttgaaaaaagattaatattcacgggtgcctggagttggtaaaaaaagagttcaagctcttagttcttttgtctgagagaggaatttaattgcttccctgaatcaacgatcataaggtcaatacgtgaagacctagtgaagtttatgggttctgaagcctgtccgggtccccttccc

SEQ ID NO: 429186 - DNA, 571 bp, Homo Sapiens
  misc_feature (227)..(227): n is a, c, g, or t
  misc_feature (366)..(429): n is a, c, g, or t
  misc_feature (434)..(434): n is a, c, g, or t
  misc_feature (446)..(446): n is a, c, g, or t
  misc_feature (491)..(491): n is a, c, g, or t
  misc_feature (548)..(548): n is a, c, g, or t
ccctctccccacatacttgtgagtttgtatatgtgtatgtatacgtgtaaggaagtataccaaataatgttcatttctgagttgtggaattatgggtgccttttactttcccccttaacacattatttttcatgttttctaaatagtaccatcatatacaattaggaaaaaattactttcatattggtttaatctagtaatctatttgtagatatgtatcataaganaataaccaaaaacgtagacaaaaacttatgcataataatgttcatataaagatacacagaaaactattaataaataatggttacttctgcagggcagaattagggtaaagacttatttggggacttatttgttatatcnnnnnnnnnnnnnnnnnnnnnnnnnnnnnnnnnnnnnnnnnnnnnnnnnnnnnnnnnnnnnnnnatccnatatgatagacnattatgcagccactaccaatatttatgaagagtatatataaattnatataatgaaaaatgggtaatgggggaaaaagccgatttaaattttagggaatatangtcccggaatgccaacccggaat

SEQ ID NO: 429187 - DNA, 431 bp, Homo Sapiens
  misc_feature (120)..(120): n is a, c, g, or t
  misc_feature (123)..(123): n is a, c, g, or t
aacagtctttattgtttttattcactgaatggagtccagatacatttccatttttaaaatacagttctcaaaggatgacagtccagttacctggaaaattttatcccatgatcatcttanttnagcaacggtgtagaataaatgagatatcgtcacattttaagtcccaaagttaattggcccatggatcactgatagcacgttaagaagaaacaaaaacaccaaaacatgtggaaggaatttgttcctgcccttaaggaacacactgttcttagctggcctgctgaggctggcaggaacatggctaatgatttctgaaatctcctttctccaaatctccaaagccttaaagctaaaaatctctggtcctggtggaaaacccaggtgtgaacacagcctggttccctgaagcactgtgggcatttcctttt

SEQ ID NO: 429188 - DNA, 609 bp, Homo Sapiens
  misc_feature (123)..(123): n is a, c, g, or t
  misc_feature (339)..(339): n is a, c, g, or t
  misc_feature (455)..(455): n is a, c, g, or t
  misc_feature (555)..(555): n is a, c, g, or t
  misc_feature (587)..(587): n is a, c, g, or t
atcgacacagaaggcggctagggatacgccctgtaccatgccggccagtctggattgccctaacgccaggccccgactcgctctggccagcgggcatgcggcgagtttgcccccgcagcgcanagcgcccacaactcggtcttccagaggagcgaacgttcggactgcttggtagtttactagggcaaagtaccaccccaccccgagcgagcaagcgggacctcaggaaaggggctccttctgtgtaaagtgatcggcaggccttgcagtggatcttcggtgtccatagttatataccaatcactattttgtctacatcattttggactgtgcagaatnagatgccaataatatatcacatacagtaaaagggctattttcacaaaaggtcaaaacttgggatatataacctcctttcttttgattagtcagactgacttcaaaggggggcttanggttgcttattaaagaaaaatgcctcccgtgggttttcatttgagcacttataagtgggctagtttctccaacaccattgagctggaactagagtaattnggaacacacatattccgacctgaacaggatanggaataagttaaaagcctcatt

SEQ ID NO: 429189 - DNA, 487 bp, Homo Sapiens
  misc_feature (273)..(273): n is a, c, g, or t
  misc_feature (446)..(446): n is a, c, g, or t
  misc_feature (470)..(470): n is a, c, g, or t
agcacttaccaattattaaatcatttaaacagtcaggaaatggatactactgtgttctagaaatgggtaccaactctcaaaatgtttcacgtactcatggaaataacatggctttaatggaagggcttagggagttctgcttcaagctggctgatcagaaaaaggggaagcctcagaaaggaagtgggatctgtacatgcacccaggaagcacagctttagtgtcaatggagaagtttcgaatagcaaaattctccactgaacttgctgaaanaccgagaggagaaagaagcatttgcaggccagatgatacctaagagaggactgtgcattgcttttcaacctccacatgtcagtactcaaggggttaaagctggaatttttaaaaattttactttttgtatttggtttcattggtataattactacctgttcacctataagccnattggggaaaccttaccaaaattnggaattaataagattcc

SEQ ID NO: 429190 - DNA, 277 bp, Homo Sapiens
  misc_feature (23)..(23): n is a, c, g, or t
  misc_feature (36)..(36): n is a, c, g, or t
  misc_feature (47)..(47): n is a, c, g, or t
  misc_feature (64)..(64): n is a, c, g, or t
  misc_feature (74)..(74): n is a, c, g, or t
  misc_feature (98)..(98): n is a, c, g, or t
  misc_feature (103)..(103): n is a, c, g, or t
  misc_feature (105)..(106): n is a, c, g, or t
  misc_feature (203)..(203): n is a, c, g, or t
  misc_feature (246)..(246): n is a, c, g, or t
gggggctgggagcatgcatggtnagactggagtgtnagcttgagganagcaagaatcagacgancaccccaggntgccagggtgtggctcagcctatntgccncnncacgctgagctgcacagatgcaacaccttccaaacacagtcacgagggcttaggaacgtctccagaacttccgtcatcatccggggtcttcctcgtnagcttgctgccttggtgaagggctctgcaagaggacaagcccnccattaaaggctgatgaaggccgccccaacg

SEQ ID NO: 429191 - DNA, 491 bp, Homo Sapiens
  misc_feature (442)..(442): n is a, c, g, or t
  misc_feature (477)..(477): n is a, c, g, or t
gaaggatttcatgtgaaactacaatttgataaaaaatgagagataatcactatgctttgctccagtcactaaaattaggtcccataggatcatatctttggtaaaatgaatataggactgcataaatcaggaagtacagtaaataaggctttcaattcaatttaatatatgaccagctctcttttatcactgaccttcataccactgaatgcttacagatgtgtcatttatttaagattgctaagtgttggactgacttacaaaaattaatgtatgactcactcaaaatgggatacacattctcaggacagttttaggtatcttaaaaaacaaatgcactagctgtaaactttttcctagattatgaaatttcttttgacagaaaacataatccacaaaattggtctttatattttgagggaaggagggtatggcaactacnttcaaaattacggtaaaaatggtcttgctggttanctactggctaggtt

SEQ ID NO: 429192 - DNA, 343 bp, Homo Sapiens
atttaggtttagataaatgaagtgatttttatccaatgttgcatggcatagtcaagattcaattagatctaactccgatctattctcttcccctatttgaatgcgcttctcagttgagatagaaaaaaatgctaaggaaataaacctactattttggatggactaataaagaagagaagaatttatggcatgaataatgaaaagaagttatgcttgaagaattcagctattcattatattaccatttgaacttaaacccaagtatttacctataaaatgtgaataatgggaataatgtatgaacccttacaggagtgtcacatggctgagtagtaacacttag

SEQ ID NO: 429193 - DNA, 249 bp, Homo Sapiens
  misc_feature (26)..(27): n is a, c, g, or t
  misc_feature (61)..(61): n is a, c, g, or t
tcctgcctcctcccatgacccacctnnctgagaccccccgctcacacatcagttgcagttncctgggggtgcagtggtggctgaggcagacatggctcctgtccccagtgcgagcgtggatggtgctcatggtcagcgccgctggaggggagctccgagtggaaagggagacgaaggtggggccctgagccatcatgagtctgggctcctccgtcgtgctgctcagcatctccttcccatcacttttct

SEQ ID NO: 429194 - DNA, 192 bp, Homo Sapiens
  misc_feature (40)..(40): n is a, c, g, or t
  misc_feature (117)..(117): n is a, c, g, or t
gcaagaggccattggtattgccagataatcagataatcanaagggaaggaatgaggaaccaacagtatctgcttcaagtgagaacaccctcttgggtacccagtagaaagtcgcagncttaccagagccacagatgagaacagatgtgcaggtcatggctcctgtggagagggaagtgcatggcctctcagc

SEQ ID NO: 429195 - DNA, 242 bp, Homo Sapiens
gctaatgttattgagtaatgtgagtgaactgccacgtgaacctgcagatgaggaaaggtgcatgtactgtggagtcagggaggaaaagtaagatttatttgacactcagatttacaggaagaagcatctcaggcactgagggaaggaaaaggagtatgagttatttagggaatggtaagagagcagcatttaaataaaagcatatgctttggtctttagaaagatcttaaatatcatgttac

SEQ ID NO: 429196 - DNA, 429 bp, Homo Sapiens
  misc_feature (159)..(160): n is a, c, g, or t
tggccaagaattcaaggacttgtaggagataagtgaaggctattacagggattttgtcctggtttggtaggtttctcttggagaaataccactacaccctggtctagaaatgagttttgaagacttggggagttaaagggcactgagttttactctccnntggaaccctgattccaggttttacatggagaaataacctgagggactttatttctatccaatgccctggtttccatcctgaccagaggatgatgacatccgctgataggccatgcttctgtcttctcttatgtgcctcatgccaagcctcgaaatataccttctggaccatcatttccacatctaccttgtgactagaagtcctagttatggtattttgaaatttatgatccataatccttgccagaaatcctgcagcgaactatgggc

SEQ ID NO: 429197 - DNA, 276 bp, Homo Sapiens
  misc_feature (229)..(229): n is a, c, g, or t
ctattttttactattcacatcataactatatttttcctaaaataaatttattagaaaaatacttccttacatcaatactactcctgcttcccaatatagaatattactcaattacactcacaaagcaacagctccttttcaaggtagttcaattttttcagctttttagaacagttagtaaatatgacattatgagtaatactcctctaattttaaaatgaaaaattanggtgttataaattactaacctctttagttattttaattaacgttcag

SEQ ID NO: 429198 - DNA, 253 bp, Homo Sapiens
gaagcagtaaaaagagaaatgtgaatcccctcttcttacctcctataacatgctaattaacatcactgcaattaaccaccattcacagctcttcagctgctctgtggaacctcagcccactctgaaatgaacagccgcagtggcaggggttacagaatgggctgggagtggcaatgtagatttatctcttcacacactctatgccctctatcaaaaatgcctcaggctgtgtaaaattccacaaccccttaaa

SEQ ID NO: 429199 - DNA, 182 bp, Homo Sapiens
agacttcattgtgtatttttattatagattgagttaaaggaaagactgatgggaaaaatggatgagtccctaaatcaaattttcatggtgtgacctgattatcatttgaaattattttctataatattgccaagcaaattgtaagaccaactttaggaagttatgttttctgccggctacag

SEQ ID NO: 429200 - DNA, 155 bp, Homo Sapiens
  misc_feature (24)..(25): n is a, c, g, or t
ggctatgagtaagttacttattannacatcaatcatgaagccttaactatgattggacagtagtatcttattggattctgataatactttcgtaatgtgaactttagagttattcttgttacttagcttgagaaggcacatgtctattcattgtc

SEQ ID NO: 429201 - DNA, 168 bp, Homo Sapiens
gcagtgttgtcttttcctttgcgatgtatttcctgatagaagccttttcattttggtgtgcggcgggtagagtaatgaatttattttagaaatgtcagtggcattttatgatgctaccttcagcagcaacatcacagggcctgattgtgaagctgctaatttacagat

SEQ ID NO: 429202 - DNA, 528 bp, Homo Sapiens
  misc_feature (28)..(28): n is a, c, g, or t
ggcatataagtaagaaagtcttaagtgnttagctagctcaatgaagcttgtggcccaaaattacctgagacaggtctcaaccaacttagaaagtttattttgccaaggttaacagcctcaggaggtcctgacgacatgtgtccatgatggtccgggtacgcttgcttttatacattttagggagacataatacatcaatcaatacatgtaagatttacattggtttgatctggaaggagggtacaatttcaactgggatggggggcacttcctggtcataggtagatttaaaatgtttctacctggcaattggttgaaagagttactatcaatagaaaggaatgtgtgggttatactaaggggttgcgaaggccaaggctttatcatgcagctgaagcctccaagtagcaggcttcagagagaagagtttgtaaatgtttcttgtcagacctaaggtctgtgttgatgataatgctggagggtagatgaggcaggtccgatcctctcttccatcgtgtcctgaactcg

SEQ ID NO: 429203 - DNA, 535 bp, Homo Sapiens
  misc_feature (51)..(51): n is a, c, g, or t
  misc_feature (370)..(370): n is a, c, g, or t
ggagctgcccactgcgggtcttctctccactgcgagatggacacttgtcangatgacctgcctgcgggaaggagctgcccactgtgggtctcctctccactgaaagatggacatattgggacagcctgcctgcagaaggagctacccactctgggtctcttgagggctgttctgtcacccaatgaagctcctctctgtcttgctcaccctccagttgtccacatacctcatacttcctggacacaggacaagaactcgggacctaccgaatggtgggactgaaagagctgtaacacaaacaggctgaaacatgccccccacttgccatgttgcgggtggtgaggagagaggagctgcggccttcagggangtccagacctaggggctccctgagcaagggctgtgacaccctctttgggactcgggtttctggtgtctctaagcttccaggagtcaccatgttcccgggtgcccacagtggaagctgcttgcagtacatctggttcactgcagcttcacacagagccagccctgt

SEQ ID NO: 429204 - DNA, 202 bp, Homo Sapiens
  misc_feature (15)..(15): n is a, c, g, or t
cttcgagatcagtgnttcatttaagtctgcctggattggatggcaggtcaagctttttaaactttaacccaacatagattctgtcagaagcaccactaggtctggtgaatttctggatctattctgtattgcctcctaatcccttggggtatgaatctctgagaagccctttcaccttcagccctggcctctacctcccaca

SEQ ID NO: 429205 - DNA, 118 bp, Homo Sapiens
gggtgaactttcaaaacgtatctcatttgaaagttagaagctaattatactagttatatgttgggatgaaagtagagaagcctagtaccaaatctgctgtcagaaccttatacaaagt

SEQ ID NO: 429206 - DNA, 507 bp, Homo Sapiens
  misc_feature (266)..(322): n is a, c, g, or t
  misc_feature (371)..(371): n is a, c, g, or t
  misc_feature (376)..(376): n is a, c, g, or t
  misc_feature (403)..(403): n is a, c, g, or t
ggctttatagaggtgaaaatcagtaaaccagagctatatgtagtagcagatctttaaaataatgtggaaaaaaaggaaaccgcctatataaaaattaagacacaattcattatgatatattgtttatgaatgtacacatatgtagaaaagtataaaaacacatgtggaaatagtgtttgcctctgagaaggaattcacagggagctcacttgtgtttgtaatgttttattttttaagtgctggatggtagatactcagttctcatnnnnnnnnnnnnnnnnnnnnnnnnnnnnnnnnnnnnnnnnnnnnnnnnnnnnnnnnngaaccctgaggtgagaagacagaagacccccagtactaaccaggacccnttccnatttgcctcagggaggaaggagagaanctccaaggaggaaggaagaggggctatggattgaggtgttcctgaggaaaatggtcaacccactcaaatgcagagtggtcagactcaaagccaccccaaaataa

SEQ ID NO: 429207 - DNA, 498 bp, Homo Sapiens
  misc_feature (18)..(18): n is a, c, g, or t
  misc_feature (36)..(36): n is a, c, g, or t
  misc_feature (133)..(210): n is a, c, g, or t
  misc_feature (258)..(259): n is a, c, g, or t
  misc_feature (290)..(291): n is a, c, g, or t
  misc_feature (344)..(344): n is a, c, g, or t
  misc_feature (376)..(376): n is a, c, g, or t
  misc_feature (418)..(418): n is a, c, g, or t
gggggagcagtcagaagntttatgaaaacagcagcngcttgagacagcccatgctcacaagaggggacctgtcagttaagccctttcccctgaaagaagaatgacattaaaccaggccttgtggtgcacgccnnnnnnnnnnnnnnnnnnnnnnnnnnnnnnnnnnnnnnnnnnnnnnnnnnnnnnnnnnnnnnnnnnnnnnnnnnnnnnttgggaaaatcacttcataacctttcacaagatctgaaagaaataagnntcacattctttccacactactgtgtacactnncaaaaactttacaaagttcttttttggttgtgtttgtgtgtgatgtttgtttnatatttgaaggaatatctttatcatttgttcncttatttaggatgaataaatttaaacatggctgtcattcagnaacagaaaagatttatagaaaaatacagagacattgttcttttctctgtaaggtctgtaagctgctcacagacatgcctg

SEQ ID NO: 429208 - DNA, 152 bp, Homo Sapiens
tgtaaaggatgttatcttttatagtgaaaaattccttctacagcatatcctaatattaatagatctcatgaaaagcctatgagctggagtcacctgacacccagttcaatgctgtttctgtatttcatggtacaacatcatatagctcaaga

SEQ ID NO: 429209 - DNA, 167 bp, Homo Sapiens
  misc_feature (151)..(151): n is a, c, g, or t
aagagaaacaaaagactcgccagtcaatgactttcaaagagaactaactttggcttattcatattctgttcaaagacagtctattttttcactgtagaaagcgtccttgtgtgatagttacgttcgcaaacgcgcacgccaggcccatggntgtaccttggcttttg

SEQ ID NO: 429210 - DNA, 371 bp, Homo Sapiens
  misc_feature (304)..(304): n is a, c, g, or t
  misc_feature (332)..(332): n is a, c, g, or t
caactaggatatcccctatggacctaccccttttgggatgggtggcactatgattatttactagaactgaggcaaacctggagttaataggctatctagtaccaaaaaggagtcagtaacctaacgggaaagaagaaaatcaacaggtaaaatataaagaatctctagggagccatatccaatgaaaaacaaaaccagccagacagagaatagtggaatgtataatcattcgatgcaaaagacagacacacattccattagcaacaacagcaaaaccggggagccattgggatcccacaaaatngacaaagcaagggaccagttgactgatnctaacagggagaccgatattgtgaacttctcttgaccca

SEQ ID NO: 429211 - DNA, 462 bp, Homo Sapiens
  misc_feature (405)..(405): n is a, c, g, or t
ggtcccagctgagtaggagatgggattcaacagtactggtctaatgtgctggagtggcccaggcggaggccaacttgcagagactaatgggagcctcaagagaaaatctaccataagaaaaggaccagtctgatagcaagcccagcttcccaagaagatagaaggttggaggcaagctgctgtccaggtatgtcccaaaccagccaacttgaaggtaagtttgctccctggggagagaagggctctaggtgtgaactaaaagctgtgtccatagacactgtaacactggagttcaaaaaatgttgctgtggaacggcccttctcatccaaacccagacggaatgttctcaccttgccaaagagtagttgtcttgtattgaggcacagtggtagctttctgggatncacaggcaaggccctgttggagtctcagaataatgataaatcctctggatgacctag

SEQ ID NO: 429212 - DNA, 235 bp, Homo Sapiens
  misc_feature (187)..(187): n is a, c, g, or t
agaaaaaaggagatccaataatacaaccttatagtcacagaagtaagaaaaaaaggtagttgttttgaagaagccaggataggtgtggaaagtactcaaaaagaaatcttcagggataaaataaagtgataatttaaaagaaatcaatgggattaaacatattgaaactgtcctataggcagtgggncattgagtcagctttcagtgcattaggaagaagatgcataggtgtcac

SEQ ID NO: 429213 - DNA, 117 bp, Homo Sapiens
  misc_feature (99)..(99): n is a, c, g, or t
atgtaaaaacagaagacacaatgctcaataccaggcatggtataggagaccagtattctttcattcttttttatgagatggagcccagctgggtaacangatgggaaggtacatctc

SEQ ID NO: 429214 - DNA, 165 bp, Homo Sapiens
ttcttcaggcttatttcaaggtattctctttgtctttggttttctggagttttaaggtgatatgctaggtgtagattagttttgtagtttttgggatttattcagtttactgttctctgggctccctgaatctgtggtttggtgtttgtcattaatactggaaag

SEQ ID NO: 429215 - DNA, 308 bp, Homo Sapiens
  misc_feature (30)..(30): n is a, c, g, or t
  misc_feature (51)..(51): n is a, c, g, or t
  misc_feature (198)..(198): n is a, c, g, or t
ggcgggggtatgggcacctggcagtgcacnacgcaagccttgactgtgagngcctggagatggggcctgagcttcagggtcactgaggcacctctgggatccaggccacctggagccccggacctcccagactccactcacccattccctctccccgcacggcactcacaccaggggcggcctggagccggatcgcanggcggcggccaggccactgcctgccttcctcctccctcccggctggcctgcccccttgcctgcctgcatgcagtttccagcagagccaagcttcttcagaagccaggtgg

SEQ ID NO: 429216 - DNA, 286 bp, Homo Sapiens
  misc_feature (256)..(256): n is a, c, g, or t
  misc_feature (270)..(270): n is a, c, g, or t
atgctagaaaataaaattgtcaagatatttattgtgttaacatgtgagacatacaatttgctcagtaaaaatagcacatgaaaaaatattataagcttatattcataaagaaatgggtatgttattacctctttttcttgccttgctcaggactattaatttgacaaggttggaatgtgcacagccagctgagacaccaccattttaacactgaatcactataccatgaactgacagaaccctgcatgaaggatgnaaaactcatacccnaagtccaggaatcaca

SEQ ID NO: 429217 - DNA, 320 bp, Homo Sapiens
  misc_feature (174)..(174): n is a, c, g, or t
ttcgttgagagcttactatgtaggagcatcaagcaaggtactctccatttaatccttacaagaaccctatgagtttggcactattattacccctattttacactttaggaagtcaaggttggtaaagctcagacatttacccgtgctcacagttaataagtgacagcacagggntatttaaacccagacaatctgactccagtatctgagctacaaggaagttcatagcagcattgtttgtggaaaaaaatagactgaatacaaacttaaataactgtggtttggggatctggtaaataaattatggcacatctacacag

SEQ ID NO: 429218 - DNA, 334 bp, Homo Sapiens
  misc_feature (201)..(202): n is a, c, g, or t
gcgaaagaaagaggctgctagattgaaggcaggcatactgaaagaagaaaaaggccaactgaaaactagatagtgagatgagaagaataaaacttcaagacatagcaaatctgggactgtctacttaccaaaggatactctagttgacccagaaaatgtgtgtacaacagtatggccccgtagactacttcctataatggnngaccctgagtttttttaaaagaagaaattaaatccagaacgctttataaaagggtaggaagaagacaatagatgttagaatttcatccaaaatgtttgagggagaggtgagtgacccaggttttaaccaaca

SEQ ID NO: 429219 - DNA, 206 bp, Homo Sapiens
ggcccaatattttggtattcttatctataaagtagtagaatattatgggatttttattgttttttaagcaggctatgtaataggcactagctgctcttccatcttgtttgaggatattatataagtacacaacaaggccgttctacaatattctgtaagtcagacagttgtctttacttgaagaagagggaagacagtggtatact

SEQ ID NO: 429220 - DNA, 132 bp, Homo Sapiens
  misc_feature (114)..(114): n is a, c, g, or t
tgacacccgtacccagcctcggtgaaaacctcagaggcaggcagcatattccctgccgagccggtagtggcgcagtcagataagcattaactaaatcacagctccctctccccntcagaatctttatctaga

SEQ ID NO: 429221 - DNA, 137 bp, Homo Sapiens
  misc_feature (36)..(36): n is a, c, g, or t
  misc_feature (38)..(38): n is a, c, g, or t
  misc_feature (55)..(59): n is a, c, g, or t
  misc_feature (61)..(62): n is a, c, g, or t
  misc_feature (95)..(96): n is a, c, g, or t
  misc_feature (99)..(101): n is a, c, g, or t
tcccgctgtggcctgcccgcctctcgctgtcctctntncccctcgccctctcttnnnnnannctttcacgttcactctgtctctcccactatctnngcnnncctctatccttgatacaacagctgacctcatttccc

SEQ ID NO: 429222 - DNA, 238 bp, Homo Sapiens
  misc_feature (57)..(57): n is a, c, g, or t
  misc_feature (174)..(174): n is a, c, g, or t
  misc_feature (213)..(213): n is a, c, g, or t
cattttgtagaaggatggccaacgcagcctgttgacccttcctggccatcacatganaatcagcgactcttccttcttacaaaactcggagcttctcaggataacttggtgaaacgtcccccgctgtgaacctcagtgagcccaccctgtaatatacaggtgagggagaaagancaggtaaaggttcagtcagagtgacactggaccccctgnaaatgatgggggacaatggaagtgt

SEQ ID NO: 429223 - DNA, 434 bp, Homo Sapiens
attgccaatagaaccatgaaaaataaacacttcattaaaagtaaacacatgtacttggaaacccattactgttttcttttcaagttgcaaattacaaaatatttaagcacttttatttgccttttaaaatgttaaacaattatattctttttacccaaaatgagcaggattcagcctggacacaatggtagagactggctgtactactccctcccccaacgattacacaaacgtggcatagtaattcatatcaatccatttattctaaaaaactcagcctgggtagttgctcaaattttaataacctataccagcctttggaaggcttgggaaaagcagttggactgtactttataggacagacttgaacttggaggcctatacataatgccaccctaaagttcagttctggcatatacacgtgcgtgtgtgca

SEQ ID NO: 429224 - DNA, 179 bp, Homo Sapiens
cagaaattaaaagttttggttgtacttaaccaaagcctctgcatggttaaattttctcttgttacctggaaattttctaaatgtccttaaatagggtacaggttaaataaattcttgtatggtacagccttagagctgtgatgaaagtatggaatcaaaccactgatatttgaaccact

SEQ ID NO: 429225 - DNA, 488 bp, Homo Sapiens
  misc_feature (239)..(239): n is a, c, g, or t
  misc_feature (244)..(244): n is a, c, g, or t
  misc_feature (304)..(304): n is a, c, g, or t
  misc_feature (455)..(455): n is a, c, g, or t
  misc_feature (466)..(466): n is a, c, g, or t
ggatactatcataggaatcagcaaagaaaatcatttcactataattctattggcattttaagaacattcaatggaaaacataaatttccaatttattaagaccttatttttgtacctaattattaaagagtaataccatctatgttctctaacagccccttcctaatccattgctttattaaatactcttctgattatgtctacttgataccaagcattatcaaacacttaaataatgnaatgnaatattttcatttccctttttgtttatgctgtttcttaattgttttatgagaaattgatntagttcaaagataacaaatgtaaatctaaaattaagatgaacacttgcattaatttattaaatacataaaattcatagaggtccaagggcaattagtgtgttgaaaacaaatattaatatatacaggaaggttccaggggttacaactctntatggttaccngggaaatggaggagtagcattc

SEQ ID NO: 429226 - DNA, 377 bp, Homo Sapiens
  misc_feature (246)..(292): n is a, c, g, or t
  misc_feature (295)..(309): n is a, c, g, or t
gcatagtgaaatttgcattttattttatagcaaatgttattattactccacctgccctctcttagatggaacaccaaaactaagagcgaaaatagaaacaatttaagaagagaacaaatattggaaacacttcagttaggcatcctcgcttgacaatactgaatttggcagccaggatagggcatgccaaaccttgatgctttctacctttcgtgtatgagtgtaccagctttccatttcaatcannnnnnnnnnnnnnnnnnnnnnnnnnnnnnnnnnnnnnnnnnnnnnngannnnnnnnnnnnnnncacgcgcacgtccaagtacttgtgtctactgttgcagttcaataaaggtaatttccacaagtgaaaaa

SEQ ID NO: 429227 - DNA, 491 bp, Homo Sapiens
  misc_feature (14)..(14): n is a, c, g, or t
  misc_feature (110)..(160): n is a, c, g, or t
  misc_feature (231)..(231): n is a, c, g, or t
  misc_feature (234)..(234): n is a, c, g, or t
  misc_feature (249)..(249): n is a, c, g, or t
ccaggatgaaagtnttaattttaaaatgcaaattgtacaagatatttaattgttgaaataacatacaagacattctggatgtagaatgttaagtctatattagaaaagannnnnnnnnnnnnnnnnnnnnnnnnnnnnnnnnnnnnnnnnnnnnnnnnnnttcaaatgctattgtcatgagtagatatccatgtcttttttctgagatttctaattttaaaatgcattgcnccnttaaccaatcctaanttatcataggcacatcaaggccattgaaatgaaaaaataaatggtattaagccttaatcatttacaaagaagaatgctctcttaatctgctataatgaacatgtacatggaattaatgaatattcacacttcttccaaaatggtatgtaaataagattttggataaattagacaaaaatatatggacattccataccatggtcattttataataagcccactacttttatacagtggcggta

SEQ ID NO: 429228 - DNA, 264 bp, Homo Sapiens
  misc_feature (214)..(214): n is a, c, g, or t
cttttaaaaggaactcaaatggaatttctaatattagcctgtgagaatgtcctgactgattactgaagaatggacaaacttctaggatagaattatgggtgttgctcagatgggtagcagagaaactggggaagctcttgtactggccattgaaatgttaacactgaaaccctgcagcagtggggagagtgtgcatgctttctgctgctggtangtggtaaggctgtatgatgttttaaagcacaggctcaaaaatcccaattc

SEQ ID NO: 429229 - DNA, 234 bp, Homo Sapiens
  misc_feature (144)..(144): n is a, c, g, or t
tgaatcctaaaaattagcaattgatagaattttaaataagtgagcatgcaaaggaagatatgattataaattgtgataaggattgtaatggaaaaataaaaacatatgagaaagggtaaagggacccattttatatccaatcangaagtatcttataggaagtaatattcaaattgtgatctgaaggatggataaaaatttctagacacagggcagagatttaatttgggtagg

SEQ ID NO: 429230 - DNA, 398 bp, Homo Sapiens
tcttgtgagaatcaaataaggtgtttaagtaaagtgcctagtactttggcactcagtaaagaaatggtagctgctaccattattgtcattattattttaatactttttttaaagcctcccttttcagacacgcataacatttcagcctgaattgagaaattctatggcattttgcataatgctataaaatcctggttttactctttcaagcaagaatttctaatgtttatttttaaacgtttgaatgagaaggtggtaggatataatagcatggccacctgaaaaaggtactggaaagtttgatcatcccttctcctcttgaagacccgcatttctgtctgtttacattttgaaaaggtctacaagggcccaaatgtatacgccatgatgcttatgct

SEQ ID NO: 429231 - DNA, 180 bp, Homo Sapiens
gggagacttaaatacaacctctgaccaaaaaacaaaggatataaacaataagctactttgacccagggttgactctcctggcaagacaggcttaaaaataaaaccacaatcatccttctcaatttgtaagatcatgagcattctcaagtctggatcctttcagaagtgatcaaagtatta

SEQ ID NO: 429232 - DNA, 230 bp, Homo Sapiens
  misc_feature (33)..(33): n is a, c, g, or t
  misc_feature (215)..(215): n is a, c, g, or t
ggatcacataggtattgtaacatgcaaccctgngatagcgaggtagtttaaaaataggtagtctacttcaaacttggaagaagtactgattgaagctgtgaggaatggcctttgtctccatttctgatttgtcggaatgatctgtcttaaaggctgcaggtaccttatgctacctcagacctatgaaggtaggacctatgttaaaagaaaggagnataattgctgtccaa

SEQ ID NO: 429233 - DNA, 317 bp, Homo Sapiens
  misc_feature (172)..(172): n is a, c, g, or t
  misc_feature (176)..(176): n is a, c, g, or t
  misc_feature (180)..(180): n is a, c, g, or t
  misc_feature (201)..(210): n is a, c, g, or t
  misc_feature (238)..(238): n is a, c, g, or t
  misc_feature (271)..(271): n is a, c, g, or t
  misc_feature (286)..(286): n is a, c, g, or t
tctgctactaatatggtatgtcctgatagagactgaatcttaccctgaatcccagcatcgcattgtggaactaagtgctgaataataatagttctgaggaagaaataaacgtttgttcttgcaagcctctgagaattcaaagatatttgctacccacattacaacttccagnaagntganagtacactttcaatgacctgnnnnnnnnnnactcaccttaaccttccaaatccacagntacagatagtagctcattatctccactacttgnacgaacttttgaaantctggatttggggaattttcctccaaatggg

SEQ ID NO: 429234 - DNA, 553 bp, Homo Sapiens
  misc_feature (49)..(49): n is a, c, g, or t
  misc_feature (61)..(63): n is a, c, g, or t
  misc_feature (186)..(186): n is a, c, g, or t
  misc_feature (401)..(401): n is a, c, g, or t
  misc_feature (445)..(445): n is a, c, g, or t
  misc_feature (451)..(451): n is a, c, g, or t
  misc_feature (478)..(478): n is a, c, g, or t
  misc_feature (522)..(522): n is a, c, g, or t
  misc_feature (539)..(539): n is a, c, g, or t
gcggcaaaaagaagaaaaacttacctaatcatcctccagtattaaattnataaaggattcnnnccagatcagcaaggaatgtcaaattcccctggtgtattatatcaacaggagccaaatgaaaaggatttcttgaaaaatgtgccatatgctcttgacttttcaattgcaatatggtcagagganattataaataatttaaatcttgatatgattgtaagactttttatcagcatgctcaagccagaagactgttcttggggtgtgaaccacatggtgaaagcatttcatctagcattttagcaaccctccctcctgctattagggggttccaaatggaccccgttaaacttccaggaaaatccccttttttgttaacacccctactgaaatttcctggngtgtttatttaacttctcactagaggttccagtgaagggtaacnattggngaattggaattttccactttttctccngtttgggacataccccaggggagagggtttcaataaaataggcnaactgggcaaatggggnggaatcgaccaagg

SEQ ID NO: 429235 - DNA, 455 bp, Homo Sapiens
  misc_feature (48)..(48): n is a, c, g, or t
  misc_feature (162)..(208): n is a, c, g, or t
  misc_feature (410)..(410): n is a, c, g, or t
  misc_feature (435)..(435): n is a, c, g, or t
ggacctgtttaccctataaaggtatactttcatgatctaaagttgacnataatgacaataatatgtgtcatttcagggccattgattgttttaattaccttctctttatgaaaaacatgaccagttaattatagctccaaataccccacaccagacccacannnnnnnnnnnnnnnnnnnnnnnnnnnnnnnnnnnnnnnnnnnnnnntatttccccggtctagttctgtattctactgttaagtccttattgagaatacttaaaatactcactgtgaagagtgctttggaaaatcttaaatggataatcataaagggatattgttttcagggtgtagcttccaatagaaaaaattgggggtttggtatttccaatgatactttggggtgtataatcgggagaggccccnttatgatagggttcccatagttccngtaaaaaccaggggtagttg

SEQ ID NO: 429236 - DNA, 230 bp, Homo Sapiens
  misc_feature (106)..(158): n is a, c, g, or t
gaaatcccatataaattatggaaacatttaggtctttaactggaattaattttatatgaatgctgggagatagaaataaatttttgcctgctttatcttcttactnnnnnnnnnnnnnnnnnnnnnnnnnnnnnnnnnnnnnnnnnnnnnnnnnnnnnaaatgtaactatatagctggtattacactatgtagcaactgagtgcttttgtctttttaaaagcatttcgtt

SEQ ID NO: 429237 - DNA, 170 bp, Homo Sapiens
ggacgataccgtccacacattaattctagttcctttgtaaatctcttcataaccacatattaagaatagtatgattagctgagtaaatcatgattagtaagatgacacttggttagaaaggagatagaacggtcatttagtaaatgggtcaatgtttttctttataattc

SEQ ID NO: 429238 - DNA, 526 bp, Homo Sapiens
  misc_feature (139)..(139): n is a, c, g, or t
  misc_feature (142)..(142): n is a, c, g, or t
  misc_feature (145)..(145): n is a, c, g, or t
  misc_feature (160)..(215): n is a, c, g, or t
  misc_feature (452)..(452): n is a, c, g, or t
  misc_feature (479)..(479): n is a, c, g, or t
ttttcattcatgaaactattaaaccttttaaaggggaaaaaatctctcttgagaatcttggaccaaagtctgcaccaaacatggatttggaattcaaatacattgttttccctgtctgtaaatccccaagttgagaaanttngtntcaaaatttctcctnnnnnnnnnnnnnnnnnnnnnnnnnnnnnnnnnnnnnnnnnnnnnnnnnnnnnnnnggtctacctgttataaccttcttctctcttttttgcagcaattatttttgttgaaagaattggttatttagacctttagcattttctacattctgtattttgctgattgcagagctgtgactttaatgtggttccctataaccctgtggatataatccatagctaatgattataacttctggtaattgtaccctccaatggaaaagagaacaactccagtatgagcaatctctctcnggccttttcagatttttccggtcaaanccttcaccttctggacagacctcaggacaactccaacttggtggctg

SEQ ID NO: 429239 - DNA, 205 bp, Homo Sapiens
  misc_feature (31)..(32): n is a, c, g, or t
gcaatcgacttcttcaggaatccaagcaaanngaaagccaagacaaaatgtacaaatggtgcccatgccattcatttgactgtgggtggccctctagtctagggctctcttagtgaatggttgtggaaatatgatttttctaagttccttccttttccttttgatagatgagtttgagatgatggagtaggagtggggccctcag

SEQ ID NO: 429240 - DNA, 193 bp, Homo Sapiens
  misc_feature (13)..(13): n is a, c, g, or t
gcacttagcagcnatcaggtaggcatcttctatttttcttcattccttaatttcctttgtatccctcaaatggttatttatttggctggagtctgttttgttcattaagcaaacatgtctttgctttgaacatgtctttgatttgatggatacttaaattcctcatcaaacattttgttgctatgcataaccg

SEQ ID NO: 429241 - DNA, 148 bp, Homo Sapiens
ctttctcatcacataattcagtaagaaataagtaacaaaaggaattgcaaatccataagcctatgaatcaacgagttaatcaaaatggcaaattataagatattttaaattggataatagtggaaaacatggatacagttaaaactgt

SEQ ID NO: 429242 - DNA, 115 bp, Homo Sapiens
  misc_feature (99)..(99): n is a, c, g, or t
gcaccgcgcctggccgtgtgtttgagattcctagagacattagtaaaaccctccaaaagagtggggaccttacaccagcctgccggttcaagctccatnctggacctccacctcc

SEQ ID NO: 429243 - DNA, 179 bp, Homo Sapiens
  misc_feature (12)..(12): n is a, c, g, or t
ggtctcgcgccngctgcttggttttaaatgaatcttggatacaggtggccagactaaatggtctctcaacttgtcttcaagtttaggattttaatttttgatatttttcacttctctctggaaatttgttcaattctcaattgttgggggagtgcgcactgcttcattatgagtttact

SEQ ID NO: 429244 - DNA, 189 bp, Homo Sapiens
  misc_feature (74)..(74): n is a, c, g, or t
  misc_feature (170)..(170): n is a, c, g, or t
aattactgagaaatgtgatttttacagccaaaagtaacagcagtgaagtcaagagtagttaagttgtactgtgntcatatttaggaagcagctacacacaaaatcaaccaaagatctccatgcacatgttatacaactgtatgctgtgtgtgttgtaggaaacacccagnaatctcaacctaaagggaa

SEQ ID NO: 429245 - DNA, 241 bp, Homo Sapiens
ggcacacttctccttgtgtctccaaaaggattccatgtgaaataggagtagagacctccaatacctcgcccatctgttaaaactgcagcgtgggtacctggcaggctcattagctgccgtggactgctgcggagtggctggagactgtcaggctacgctgggccgatcttctgggtaggtgtatctacacccgtgtatctagtgatttactctcctctggaagagaaacgcgggcacacca

SEQ ID NO: 429246 - DNA, 154 bp, Homo Sapiens
aaagtcagttttctcaagtagtatgttgtaacgtaagatgtaactgatataactagattttgactggtaaacttaaagtgctttttatatttgaggttgactttaaaaagccattgagcagtcctcagaggttatggactcctcaaggggcgac

SEQ ID NO: 429247 - DNA, 215 bp, Homo Sapiens
  misc_feature (42)..(42): n is a, c, g, or t
  misc_feature (50)..(50): n is a, c, g, or t
  misc_feature (52)..(52): n is a, c, g, or t
  misc_feature (79)..(79): n is a, c, g, or t
  misc_feature (89)..(89): n is a, c, g, or t
gaaggcttgtaattgtataaccaacgtgagtttataagcggntatctgancncaattggtttcccccggaaaaggttantggaaaaaantcacaagactgcaagtcaactctctctctttcttttgtgggggaataaacaagtataattacaatttctaaacctatggttttattctcaaatataattaccatttaaacaggatattggtagagc

SEQ ID NO: 429248 - DNA, 405 bp, Homo Sapiens
  misc_feature (11)..(11): n is a, c, g, or t
  misc_feature (34)..(34): n is a, c, g, or t
  misc_feature (41)..(41): n is a, c, g, or t
  misc_feature (61)..(61): n is a, c, g, or t
  misc_feature (215)..(215): n is a, c, g, or t
  misc_feature (257)..(257): n is a, c, g, or t
ggggcaacgcnacaaggccaacgcgtacaagtancctcagnttgtcccaggggcacctggncggacggagagtacaataaattttattcttttaaaatccaggcctttctgtgaccctgaagcagcccctcctcggccccaggcttccccaaacctcttagctgcctccatgggccctgccaacgctgggtgctgctggtgcccagagaggcttnacccccaagaaggtagcgggttgaggacccggggggcctcangcctcgtgtgggtgtggatcagggcagcctgcctggaggaggaggcctcaaaagctgttaggggggtgttgctggaagaggcaaaggctggccagaatcctccctcccatggtgatgaccatgtctgccaacgtctggccctggttgg

SEQ ID NO: 429249 - DNA, 200 bp, Homo Sapiens
gcggtaactaattcagtggggtatatcagttagctcaggggtggacaaatttccagtgaaacaagatatagagcctagaaagaaacctatccatatctgaagacctggcttatgacagagctggagatgatgctgagtggaaagaaaatgaacttcacagtacttggctctgaagcaaatggttatccacgtggaaaaac

SEQ ID NO: 429250 - DNA, 448 bp, Homo Sapiens
  misc_feature (195)..(195): n is a, c, g, or t
  misc_feature (219)..(219): n is a, c, g, or t
  misc_feature (265)..(265): n is a, c, g, or t
  misc_feature (315)..(315): n is a, c, g, or t
  misc_feature (364)..(364): n is a, c, g, or t
  misc_feature (386)..(386): n is a, c, g, or t
  misc_feature (418)..(418): n is a, c, g, or t
tgatgatcgatttataatgataaaaagatatttagatttaaatgagacattccaatatttttgaaatccctaacaatgcttccttgcttttaggattgagagaaatgattttcatatacttccaacattcagagatttaatgtttttaccttagctccagcctacgcttgtaaagtgaagagtgattctaagtcncgtgaaaccgtgggctgcctgggnttgggctgtgccactaacctactgcgcctggggggaagcatggganggggtacagtttgcatctcattagcatgcacaccactggttgggcaaatncataaaaaggtggcattggcacaagtattgtaaaattaaaaaatattcncccccaaaaaaggattaataantccacctttttaaaagaataatggccccttanaggtccccatggatttttccgggggtttaa

SEQ ID NO: 429251 - DNA, 321 bp, Homo Sapiens
  misc_feature (201)..(202): n is a, c, g, or t
  misc_feature (212)..(212): n is a, c, g, or t
gcgaatttgaagtcatgtcctctgatgctggagctaggaaatgaaaccattatattatattgtgtttctgtcaggtgacacatctctgagagaaatgctatcactaatatgatcatgaatagaagcattagattaaaacttgtttcatcagcctgaaatactgggctgaaatcaacaatcattctggtgtaattgaatcanncatcaaaatnggttactttagaacaggattggagagaactgactttccaggaggtcttgaaaaagaaatactggtgttattgttgaccacagtcagggtaacttagccctaggaaaaaa

SEQ ID NO: 429252 - DNA, 217 bp, Homo Sapiens
  misc_feature (116)..(124): n is a, c, g, or t
gggggtctttcagtgaaactgatcgaaaagtatctgaaatctggtttctatctagagtttgaataacacagtgaagttaaaactaacactgaactcatttaatgtaggcagctgcnnnnnnnnnggcatttgttgatactgtattttatgaaacattaatccagaaactgtgcttgatgaaagtcttttgtagacacatcttatttatttctttctt

SEQ ID NO: 429253 - DNA, 171 bp, Homo Sapiens
  misc_feature (73)..(73): n is a, c, g, or t
catggatgtggtcacctaggaggttaagaaaaattagatccagggatagtattctggaggagaatagcatttntaggatggacagaggaaaaccaggtgttagtagtcaggtagataggaagaaaattggcagatgaatttgttacggaagccagaattgggaagagtttc

SEQ ID NO: 429254 - DNA, 330 bp, Homo Sapiens
  misc_feature (116)..(116): n is a, c, g, or t
  misc_feature (177)..(177): n is a, c, g, or t
  misc_feature (188)..(188): n is a, c, g, or t
  misc_feature (278)..(278): n is a, c, g, or t
  misc_feature (286)..(286): n is a, c, g, or t
  misc_feature (294)..(294): n is a, c, g, or t
ttgaccccttcacggaactcgcggcaggggtgccttgtttactcagcccgccctgctcaatcccttgcaggagggagtgcgcaacgaactgactgcaggaacctgagcgagcgaangcaagggaaggaactggccactttggcaccagcaggagcaaactccatgtgggcccctcancagcgtccagntgtgggcaccagccacgccaagccccagaaggcgttgtaaccatactcttagctccaccggtccgcagaaaagcagtgtgttatcagctnagtgaggnccctttgnctccataacggtaagggcaacttgctttccggccag

SEQ ID NO: 429255 - DNA, 116 bp, Homo Sapiens
agattccaggtaagcagaatcacttaaatttaaaagagcacgctctgtgttgatatgcaaaactttgttaaagtatacgttttgatctttaattcatttattagttacaaatgtta

SEQ ID NO: 429256 - DNA, 316 bp, Homo Sapiens
  misc_feature (22)..(22): n is a, c, g, or t
  misc_feature (51)..(51): n is a, c, g, or t
  misc_feature (192)..(192): n is a, c, g, or t
  misc_feature (211)..(211): n is a, c, g, or t
  misc_feature (233)..(233): n is a, c, g, or t
  misc_feature (259)..(259): n is a, c, g, or t
  misc_feature (268)..(268): n is a, c, g, or t
  misc_feature (300)..(300): n is a, c, g, or t
gattcctaaagaaacagaatgntccagatcagtttcctgtattttttgtcnatctaatctaagagtcacaggtactgtctcctgcatttaacagtgtcagacatgtagtgccaaacccaggaatcttgctggcgttaggtttttgatttcaaaattaaggaacagattctatggcttacatttgtataagangtttagaatatctttattnttcttacattttccaaatatgnaatcattgtgctggttcttggctccnttgaatggnatgcaggggaaataaaatctggttcagaatgntacaaaccttgaaaac

SEQ ID NO: 429257 - DNA, 301 bp, Homo Sapiens
  misc_feature (113)..(113): n is a, c, g, or t
  misc_feature (152)..(152): n is a, c, g, or t
  misc_feature (155)..(155): n is a, c, g, or t
  misc_feature (275)..(275): n is a, c, g, or t
  misc_feature (288)..(288): n is a, c, g, or t
taatggtccctcagtgcccaccggtgatggtggcagattttccatccgcatggctcccggacatgcgatgtaaggtttcagcagttcccatcattagacacagttgccgtacngcggcttcttagtagcaggctcagtggggcctttgagantcntcatggctggtgccgccggactcactgagggaaactaatggggaagcactggtctccattccctgcacgcacagcccactgctgcgatggtgaagggataaggttgtgttcacgcgtcgnagtttgtgtccantggacacgcgggg

SEQ ID NO: 429258 - DNA, 180 bp, Homo Sapiens
aaaattaagatccaactacttcctgtaatggtagccttcccctatgcctctaacccttttttaaatcctgatttcaatcacaggcattgtgattctccaaagctctaactcttccttaggtctgaaagccacatgctatcaatcattgaaatcaagagagaaggcatccgtagacgggcg

SEQ ID NO: 429259 - DNA, 360 bp, Homo Sapiens
  misc_feature (160)..(160): n is a, c, g, or t
  misc_feature (319)..(319): n is a, c, g, or t
  misc_feature (350)..(350): n is a, c, g, or t
cattttctaatttataataacatgtgcatcttgttttccctgccaaactaaatttcgtgagggggtacatactgcacagttttttttgtcacatactgcttatgacacatgaatatgcagagcttgtcaagctctttaattaagtttaaaatgctaattnttgagtgaatcaaaacttaaccattatggttaggctaaaaatgtcagcttgtgtttatatagtgcttacctcagtattggaaatgccatgagtttagtatcacgaaggacattattactagtgcattttaaagtgataccacgtcatagtttgcaaaangaaaagtacacaatggggaaatggggagagnaatgtagggg

SEQ ID NO: 429260 - DNA, 184 bp, Homo Sapiens
  misc_feature (141)..(141): n is a, c, g, or t
  misc_feature (146)..(146): n is a, c, g, or t
ttgagaacagattcttaaaaataccctatctctgtagtgtgtccttgttcttatatatggccctgagttttgtgatcacctgaataattctaacatacgtttggctggctgactgtggagatacatttgagttacatggtngttanttttaaatttagggccacatggtttaaaaggagcctgt

SEQ ID NO: 429261 - DNA, 229 bp, Homo Sapiens
agcgccacccaaaccagtcctactgttataaaagcaaatcaaagcactcactcctcctttttgctatgcctctgatttactttcattctttgtcctttttccccttttataccacacttttattcattcactacaattatattttttcattctcttctatgttctgtttttgaaaaaatttggtaacaatttctagagtgacctcatcaatttaaagtacaagctttcc

SEQ ID NO: 429262 - DNA, 488 bp, Homo Sapiens
  misc_feature (114)..(115): n is a, c, g, or t
  misc_feature (117)..(117): n is a, c, g, or t
  misc_feature (119)..(119): n is a, c, g, or t
  misc_feature (121)..(122): n is a, c, g, or t
  misc_feature (124)..(124): n is a, c, g, or t
  misc_feature (129)..(130): n is a, c, g, or t
  misc_feature (133)..(133): n is a, c, g, or t
  misc_feature (168)..(172): n is a, c, g, or t
  misc_feature (174)..(176): n is a, c, g, or t
  misc_feature (178)..(178): n is a, c, g, or t
  misc_feature (180)..(183): n is a, c, g, or t
  misc_feature (187)..(187): n is a, c, g, or t
  misc_feature (192)..(192): n is a, c, g, or t
  misc_feature (194)..(196): n is a, c, g, or t
  misc_feature (200)..(202): n is a, c, g, or t
  misc_feature (205)..(208): n is a, c, g, or t
  misc_feature (211)..(211): n is a, c, g, or t
  misc_feature (221)..(226): n is a, c, g, or t
  misc_feature (228)..(228): n is a, c, g, or t
  misc_feature (230)..(230): n is a, c, g, or t
  misc_feature (234)..(235): n is a, c, g, or t
  misc_feature (237)..(238): n is a, c, g, or t
  misc_feature (240)..(240): n is a, c, g, or t
  misc_feature (243)..(245): n is a, c, g, or t
  misc_feature (248)..(251): n is a, c, g, or t
  misc_feature (255)..(255): n is a, c, g, or t
  misc_feature (257)..(258): n is a, c, g, or t
  misc_feature (263)..(265): n is a, c, g, or t
  misc_feature (268)..(268): n is a, c, g, or t
  misc_feature (272)..(272): n is a, c, g, or t
  misc_feature (274)..(274): n is a, c, g, or t
  misc_feature (278)..(278): n is a, c, g, or t
  misc_feature (285)..(285): n is a, c, g, or t
  misc_feature (288)..(289): n is a, c, g, or t
  misc_feature (295)..(296): n is a, c, g, or t
  misc_feature (315)..(315): n is a, c, g, or t
  misc_feature (329)..(329): n is a, c, g, or t
  misc_feature (343)..(343): n is a, c, g, or t
ggcaaaggtctggttgtcagtgatacctttacagctaaatttactccagagtgacagaaacaggtgcacctcggcctgccagacacttgtgcagagagatcacgcatctcacanncntnanncnccagnncancaaagctccggtcttcatagaaaaggagaggaggnnnnngnnncnannnngggnggggntnnngagnnnagnnnnggngggggtgggnnnnnncnanaggnntnntntgnnnggnnnngggngnnggggnnnaangggntnaggnagggtgntgnnggggtnnaaacttcctgggagaaggnagaaaggcactggntgagtttcaattgncaaaatatattttttaatctctaaaagttaattttgttgtcttgaaagaggcaccactgaggtaccctgttgttcacaaagtttgatggagaccatttggaatcagagccaacttcacttcaacagtggggtttggccttatgtg

SEQ ID NO: 429263 - DNA, 362 bp, Homo Sapiens
  misc_feature (310)..(310): n is a, c, g, or t
  misc_feature (351)..(351): n is a, c, g, or t
gggcacacattaaccaggcccccttctagaaccacagtacaaaagcctggatacatgcaacacattccactttgccattagacagtaaactatggggcggaaaggaaaaagttcgacaaaacgcacaaacaaagcaagcaaggaaggaagggatttattgaaaatgaaagtacactccacagtgtgggagcgggcccaagcataggggcttaagggctccattactgattttttgggagtttaaataccctccagaggattctattggttacctggggtacaccctatgtaaactgaggaggatgaagtnaaagttacaaagtcattttacttggggctacatccccgtanaagaaggggat

SEQ ID NO: 429264 - DNA, 129 bp, Homo Sapiens
ggattatcttcctaaattatcagctctttaaaatatgggtctctggcctgtataccatctgataaattaggttgggtaaatttttcacctgaaaaaattcattcttttgacccaggttgtttggcttgg

SEQ ID NO: 429265 - DNA, 459 bp, Homo Sapiens
  misc_feature (115)..(115): n is a, c, g, or t
  misc_feature (339)..(339): n is a, c, g, or t
ggctctttctcaatagttccaacaagatctgtaggccaaagttcactgaaccattttgaaacaggtaaccatccctagaccagtcacttagccaaaggaatgtagcatgctttancaggccaaggaacatgcgcacccttggagctcagatatatatgttgaggggaagaggaagtagtatcagctcccgcttgaattccatggattgagagttgggggatgaggagtttgccaaaacaacagtgctaggattaaaagaagtagaagcacgatgctggggaagcaaaatcttccagaagacctaagatacatggggcctgggtcagccctggcaacatngaggtctccaggccaatgtagcaggccctggaggtgggaggagagacaccgtaatttctaagcagctcttcaggttacagttcttgctttgtctgcctgtcattaagtggattaccacaa

SEQ ID NO: 429266 - DNA, 195 bp, Homo Sapiens
  misc_feature (163)..(163): n is a, c, g, or t
  misc_feature (182)..(182): n is a, c, g, or t
acccgaatagtttactcggctgtttaaaatgcatactcctacaaaatcagctcagcccatgatccatgatgaacaaacagtagttcttgctgatgtgtgattatgaatttaaaaggccagtatttctttaagcataagaccatatggaaaaaagggcctaagnccaaatcctgatggggacngaattccagtttt

SEQ ID NO: 429267 - DNA, 316 bp, Homo Sapiens
  misc_feature (182)..(182): n is a, c, g, or t
ggctgagagtgagcaaattgtcttgcttatgcacagcagtcttcacaacacatgacatttcagggaaacttcaaaggagtagcagagacagcagcccgagatgtggtttacatattggggagacaattgggagcttatttgcgcttatcttttttcaagttaaaaggcatgacatctactgnaaacagttcctgaaggtttaaaagtatacatctgaaaagagatggaatactttgtctaaattctacatttgtcttaatatgcagttacatgttgtcagtttacccacccggaaatgattgctagcacatgggcg

SEQ ID NO: 429268 - DNA, 466 bp, Homo Sapiens
  misc_feature (132)..(354): n is a, c, g, or t
  misc_feature (359)..(359): n is a, c, g, or t
  misc_feature (389)..(389): n is a, c, g, or t
  misc_feature (421)..(421): n is a, c, g, or t
ggtaaatatttcaaacatcagctatttcaaatttaaagctacagacttttaaataattcggaaccttgagaggaacgtggtcatgcaacctgagtccggtggcatgcaggcgcaacttctacaagttttccnnnnnnnnnnnnnnnnnnnnnnnnnnnnnnnnnnnnnnnnnnnnnnnnnnnnnnnnnnnnnnnnnnnnnnnnnnnnnnnnnnnnnnnnnnnnnnnnnnnnnnnnnnnnnnnnnnnnnnnnnnnnnnnnnnnnnnnnnnnnnnnnnnnnnnnnnnnnnnnnnnnnnnnnnnnnnnnnnnnnnnnnnnnnnnnnnnnnnnnnnnnnnnnnnnnnnnnnnnnnnnngtccntacttgagcccgagatttacatcacttggnatttccaagccctgggggacaaaagcaaggangcctttccccaaaacaaaaccaaaccaaacaaaatgtggctatac

SEQ ID NO: 429269 - DNA, 293 bp, Homo Sapiens
  misc_feature (25)..(25): n is a, c, g, or t
  misc_feature (162)..(162): n is a, c, g, or t
  misc_feature (266)..(266): n is a, c, g, or t
tgattataatttcacactaatttanatgatgtttactttagtagaagcataaatatacaaaaggaattatttaattccaaactgttctttatagtaatgaccaactacatgatgacaagggtgagtttaaattctgggtgattacttattttcttgttgcanacatattgaaaatctggaataaaatgccagtcataatatttacgatcagacacggatgttactttggcaaattacacagggtttacttttctaaaggatagaangggaagccagtacaatcaaatttgaag

SEQ ID NO: 429270 - DNA, 436 bp, Homo Sapiens
  misc_feature (49)..(50): n is a, c, g, or t
  misc_feature (280)..(280): n is a, c, g, or t
  misc_feature (287)..(287): n is a, c, g, or t
gggtgaaagacgggctgcctggattcagcctctggatcttagaccgggnnctacgaatgtaagatgaatttagtggcgcggctgcctccctgaatccgaacggtaatgatggatttatcaacggggattcgccttcagcccagcgagggaggtttactcagcaaatatgtcggcgagcacccacccaaatgcaatcatttgaccccctgcggacgatagctgccgtgccccttcccaccgctggtcctgcttggccagggtcgctgggggccagaacggncccggantgaccagagaggtggcctcacggatcccttggcctctcgccccctcctctgtttcctcctctcagcttgaggctctcctggcaagggggatcgatctggcgtgtaggtttggtggggagggagagggtggtggcggtgcagagcacaag

SEQ ID NO: 429271 - DNA, 121 bp, Homo Sapiens
  misc_feature (26)..(26): n is a, c, g, or t
  misc_feature (38)..(38): n is a, c, g, or t
  misc_feature (48)..(48): n is a, c, g, or t
ggagcttgggtaagtggctcagctcntctgagcttcanttcttcatcngcacaagggaacaatagtaccggcccccaggtctcttcacagcagcattaaataaaaatggtacactcacccc

SEQ ID NO: 429272 - DNA, 427 bp, Homo Sapiens
  misc_feature (47)..(47): n is a, c, g, or t
  misc_feature (270)..(270): n is a, c, g, or t
  misc_feature (324)..(324): n is a, c, g, or t
  misc_feature (373)..(373): n is a, c, g, or t
  misc_feature (379)..(379): n is a, c, g, or t
  misc_feature (396)..(396): n is a, c, g, or t
tttatgtattgtgagctgttgtcagggctaactgggtgccattgtgnctgaagatgttgcgcaaattgaggcagatggctcagattcagacacgtgtcatatagaaaggggcaaggggattggccctgcaaagtggggtcacagcaggtcacagacctctcctacacttgttagtgttttcaaaagctcatgtgcagcaactttgtttttctccagtcatccctgcaaatcaaaccccctcccccaaaaagtgtgtggaacatgcttcantgtggaaaagggaggcttgggaaggttcccgtcctcttccttcatgaccctgangctcaactgtgcatgcagaatgaattagcaggattgacaagaaattcgntatggnctgcaaaggtttttcantcaaattgcagtggctaaaaggctagttttg

SEQ ID NO: 429273 - DNA, 139 bp, Homo Sapiens
  misc_feature (20)..(20): n is a, c, g, or t
  misc_feature (31)..(31): n is a, c, g, or t
gcggggattccagatctcanttaaaatgagngaatctgaatctctaggcaatgatgagtgtttctgaaattcagattcaccagaaagaaattgaaagcaaagagaagacagtgttgtcaaattatcatataattcagct

SEQ ID NO: 429274 - DNA, 257 bp, Homo Sapiens
  misc_feature (135)..(149): n is a, c, g, or t
gaggcctgggcaggatttacagagggctccatgccagctccttcctgccgggtccacttctggtgtagggtaaacacctgcccattcatgtcctagtgttgatagaataatcattttctttcagtacagtttccnnnnnnnnnnnnnnngccccagctttttagatgtagcacttaatgccagttctcgagctccccaaacttaagggacacaggtcaacaagcagtaggtctttggaaagctccgctctctcacat

SEQ ID NO: 429275 - DNA, 267 bp, Homo Sapiens
  misc_feature (155)..(155): n is a, c, g, or t
  misc_feature (159)..(159): n is a, c, g, or t
  misc_feature (203)..(203): n is a, c, g, or t
  misc_feature (217)..(217): n is a, c, g, or t
  misc_feature (222)..(222): n is a, c, g, or t
  misc_feature (227)..(227): n is a, c, g, or t
  misc_feature (238)..(238): n is a, c, g, or t
cctggtagaactgtagctttattttttcctatagagaagtacatgtatgtagacaaatactatgtgcatttgaattagaagggcttgtaccctacgccaattctttttaggattttggaagtccatatgatctttcattgttaggaagctgcaantgangaaataaaaccaacttactaatgacaccttcattgggttcaagnggctttaatgctgnaccancttcnacagggagggncccaatttccaaagggaaacccttgggga

SEQ ID NO: 429276 - DNA, 235 bp, Homo Sapiens
ttgaatgctttttagttgcctgtaggtgtgctgagacagacattgccagcagggttttgaacacagggatagagatgtgtctgaatgtacgttacggtggtgagagtgagaaaggagacctctcctgagaaggtgaaaagcagctgttgaaaaagcaagaggcagtaaactgctcttgtatttcaagccttccaccaccatttctctaagtccagggggctcttccccttttaac

SEQ ID NO: 429277 - DNA, 414 bp, Homo Sapiens
  misc_feature (119)..(149): n is a, c, g, or t
  misc_feature (163)..(163): n is a, c, g, or t
aagaaaagttaatgatattggagagtactcattttctagtgttgaattgagaattcagggcaccaaattctatgtgtagtgggaccaatgaggatggatttgaagaaaagaaatggaannnnnnnnnnnnnnnnnnnnnnnnnnnnnnncgcgcgccccttangcattgtgctgaggaatgtggggagtatattgatgagatatagattaaatttatttcactgaataacatcagttcttattgaacagttatatatcatttttttaatgtttaaaccaatatactccatcaagctgctaatagtggatgcctcaaaaaagtgggatttgtgataaagtgtttcccattgttcctccatagattgtgtaatccaagagattttcaagaagctgataagatattgtaatttgaga

SEQ ID NO: 429278 - DNA, 418 bp, Homo Sapiens
tatagataaatttttaaagtactaattaggcattaacttttttcaaatgcacaggtttgttggtttttttaatacactttaattgactttctcaagcgtgctaggtagaaacgcagaattccacatcttcccgctctcagctctgagcatgtgcaaggctgtgtaggacccagtttctctgtatatactattccagttcccagtcatctatgtagaaagtgcactgtgctgccatcgccctacatcttcagctgtgtcattgcttcctggttggggtggggacggggtgggtcgggagggaggtatattgggaggagggtgggtcaaggcagaaggagaagctgttgaaatgagggccgtgaaatcagttctgttggtttgcggttgtgtttgggtttgtttgttctttataaaaaat

SEQ ID NO: 429279 - DNA, 298 bp, Homo Sapiens
  misc_feature (24)..(24): n is a, c, g, or t
  misc_feature (65)..(83): n is a, c, g, or t
taacttctttgccccctgctcccnttttgaattgagtggctaaattttagaggtttgtagctttnnnnnnnnnnnnnnnnnnntttatagatggtaaatgatgcttgtacattttgtacatgaatgaatacgtattttagcagacttaaaacattaacagtaattgaccttatacattttgggaaagaaaaattaaatcctcatgctactacgatttttttaaatgtggcatcaatgtttatttttaataatagtattactgacttaataaaccccaaatgtctccttaagcctgatt

SEQ ID NO: 429280 - DNA, 525 bp, Homo Sapiens
  misc_feature (372)..(372): n is a, c, g, or t
  misc_feature (434)..(434): n is a, c, g, or t
  misc_feature (496)..(496): n is a, c, g, or t
tattgcattagttaggacttccagtaagatgttgaaaagcagtgtgagagagggggcatccttgctttgttcctgatcttagtggaaaagcttctagtttctcaatttgcctcaattttcacagctggtattttgtcactggctactggctacctgctatgactatttcccctaataagttaagattcgtttcaatacaatgtataactcttgaagctggtgacttttagggaggcattgttaaacaaatgcaaatagtaaatccattttatcatgaaagctgaatttgatttagcatgctcagttgccaactccctttatccataatctccctttgcatggaataattttgaaacctatttgattcaatgntattttttgaagtattttcagtttttgaattcagtgacacctcttcaattaaatttgcctgnctaccaatgaccacaggattggactctaaacttgcaactactgaattgcctagtgctggatntgggcaattggaaatttccaagactccaa

SEQ ID NO: 429281 - DNA, 444 bp, Homo Sapiens
tatgttaacgtatgcaacaaagggtacaaattgtaggtacgcagctcattgaatttttatgtctgcacatgcctatgaaaccaacacccagagtaagatgcggataattttctgctcccctgaaaattcccttgtgccttttcctcatcagtacctccaaaggtaaccactattttgatttccattaccatagatgagttatacttgtttttgaaaagattatttgaaatgtgtaatataaataatagtggttgcttatcttacagaaatatcactgagaattcatttcttctctccttcatttattcatttgttcaaaacactgtctagtaccaacattgtccaccgggcattgagaatacaatattgaagaaagagtcactggcctgcccctctgggaaaaatcagaggattttgaaaggaatacacaccagtaaacaggcg

SEQ ID NO: 429282 - DNA, 459 bp, Homo Sapiens
  misc_feature (73)..(73): n is a, c, g, or t
  misc_feature (269)..(419): n is a, c, g, or t
cgtttaattgacttacagttcagcatggctggcggagacttcgggaaacttaaaatcatggcagaagcggganaaacctccttcttcacagggctgcaggaaggagaagtgaggagcaaggagggaaaagccccttagaaaaccatcagatcttgtgatacctcactcactatcagagaacagcatgggaataaccacccccatgattcagttacctcccaccgggtccctcccacaacacctggggattatggtaactacagttcaannnnnnnnnnnnnnnnnnnnnnnnnnnnnnnnnnnnnnnnnnnnnnnnnnnnnnnnnnnnnnnnnnnnnnnnnnnnnnnnnnnnnnnnnnnnnnnnnnnnnnnnnnnnnnnnnnnnnnnnnnnnnnnnnnnnnnnnnnnnnnnnnnnnnnntgtctggcacttccccctcactcattctctctctctggga

SEQ ID NO: 429283 - DNA, 450 bp, Homo Sapiens
gcagaattgattctacacttgtaacacgggcatatttggctgttattgcctatgttatccattttgacacctcccctactctcaaagcccctgcatgtcactcgcttcctctgcttttccccttcagattatttcacccatgttctatttggtcatgacctgtatgtgtacctcatctaagtgatgctttatgaattccataaagccactcatctttgaggtctccaagaacagagactattccctaatgatccttttgtgcagtgttagttgttaaatgtgctaacggatgccagcgtttgaaaatggtgctgatccatgacctcttctgacaatgttagattcctatccttcagagtgagaattttaggcatgaggctgcttgaggtactgggttgcccaagacaaacctgatctccagggctgaagtatgggcatctatgaatcaat

SEQ ID NO: 429284 - DNA, 240 bp, Homo Sapiens
  misc_feature (117)..(146): n is a, c, g, or t
  misc_feature (178)..(178): n is a, c, g, or t
  misc_feature (191)..(191): n is a, c, g, or t
  misc_feature (198)..(198): n is a, c, g, or t
  misc_feature (207)..(207): n is a, c, g, or t
  misc_feature (220)..(220): n is a, c, g, or t
aatatacagtaaaggtggagtagtatcaaaatcagaatcaatgagtttgaccagataaattttcatgttcctgaaatgttgatctatctccagatagatgtttaggccatataatgnnnnnnnnnnnnnnnnnnnnnnnnnnnnnnaactgattcctttaattatcctagtaaaaagnctagaaaagtcanttcaaanctgcaatanacttaaggagcanagtcaagtccctcactcagt

SEQ ID NO: 429285 - DNA, 408 bp, Homo Sapiens
  misc_feature (165)..(165): n is a, c, g, or t
  misc_feature (377)..(377): n is a, c, g, or t
tattttcaagccatcactcaaaccccagtgctaggcatgtccagagcgaaacctgttaccttgtcggcatgctcaccaaagtgcactgccaggggtgtgcactttacactcatagcacagatcacagtttgtgtctcacagtgaaaaagactgttcatatctttnggccacaccctgaaacacaaactgaatgatcccaccctcaacacaaaggaagttgagtccataatcgcatccacagataggatactcttagatatgacaaataacacccatttattttattccctttttcttctttcccctaagcccccggagagcctttctccagtttcatcacacactcctgactaagtagatgggggtgtagggggcantctccgaatgaggcacatttgtcttgtcatt

SEQ ID NO: 429286 - DNA, 333 bp, Homo Sapiens
ggtttctagctatttttatcttagttttgcttttattaatatttttatttgacacataatgattgtacatattaatggtgtacagaatgatattttgatacctgtatacaatgtataataaatcagggtaattattatattcatcacctcaaatatttatcatttcttgctgttgggaacatacaaaatttgttctttatagctatttgaaaatatacgataaattattgttaattatagtcaccctatagtgctatagaacacaaaaactgattccttaatctagctgtaattttgtattcattaaccaacttctggcaatgctcttccctc

SEQ ID NO: 429287 - DNA, 558 bp, Homo Sapiens
  misc_feature (453)..(453): n is a, c, g, or t
  misc_feature (462)..(462): n is a, c, g, or t
  misc_feature (472)..(472): n is a, c, g, or t
  misc_feature (480)..(480): n is a, c, g, or t
  misc_feature (493)..(493): n is a, c, g, or t
  misc_feature (529)..(529): n is a, c, g, or t
tttagatctaagttttatggcaaagtaacccttaagttactaaaatttgtgtatgtgttcatggagcagacatatattgagtgtttcttatataccaagccctcgtgctggatgtttagcatccagggatggataagacagctgtgccttcaaggagcaagaggccctggcgcagagaccactgcagcgcctcgttagcttcacaggcaggctcgtgctgtctgcacactcagcagtgacagcagggtgtggccagggcgacacaaccttcaggggattctggaagctcatactcctccaggaaagagggggctctaggcaaacatgaaggcctgagccccagctcatctgaggaaaagcaggtggtctggaagcgccgctaggcagaggtggggagcatgtgtagacgcctcccgggggaagggaccaccagggcagctcgggccagcgctncggtgtatnggggttaggntgtcacanaaccgtggcaggntggtgcaaaaagacagttaagaattggaatttgtgnatgttacttgttggagttgtgaataagac

SEQ ID NO: 429288 - DNA, 443 bp, Homo Sapiens
tctacttcctctgtttatttttcccctaccacccactactgtttctctttgacacacagcctcttcttattgcagaatctcagaggagcaaacactaggcccttttcacagaatcagtttaatatagactagtatgaatgatgattcatactattcaaagaactattaatgaaaactttctatatctggtggttcatgggttaaactcagttgtcacccgacatctccaaactgatttttgacctggatttgttccttacatatatgaccatctccttccattaactcaggttaagcagaagctaaaacagaatagagtaaaccaggggtagaggaccaatctcgattaaatctaacaatttgtacatctgtgcctggactttcatcacttcttatgattgcgtataaagtacctggctggttggaatgaggggattaagccc

SEQ ID NO: 429289 - DNA, 426 bp, Homo Sapiens
  misc_feature (149)..(251): n is a, c, g, or t
  misc_feature (256)..(299): n is a, c, g, or t
  misc_feature (328)..(328): n is a, c, g, or t
gatttagaagtcagattctaatttaagaggatatagggtttattcataaaaagagatataaaagatgaagatcagagtgcttgagtagattagggccacctagactagcaagagaaagaaaaaaatgataaggtataaagaagaaggcnnnnnnnnnnnnnnnnnnnnnnnnnnnnnnnnnnnnnnnnnnnnnnnnnnnnnnnnnnnnnnnnnnnnnnnnnnnnnnnnnnnnnnnnnnnnnnnnnnnnnnntagtnnnnnnnnnnnnnnnnnnnnnnnnnnnnnnnnnnnnnnnnnnnngatgttaggttgtgaagggaagacaaggnttaaagaaagacatacacacagagggcagttcaacaggaaatgcaggctttatgtccagcattaacacctacagaggtggggaaccagcctaatgcca

SEQ ID NO: 429290 - DNA, 429 bp, Homo Sapiens
  misc_feature (118)..(118): n is a, c, g, or t
agaagctgcttggtccctgttctgcctgctaggtcataaggatgaaggccatgtggtggggtacttatgtcaagtccagaatggggcagtgtccctctcctacctctctgcggagacnaattgaaggtcaagtagactcagtgtagggcaggcagctgtcatgctgcaaagaagtttagaggagtctttgggttggggaggtgacaggtaggtaggacaggatctcttaagatgggaaagatactggggagaggagggctgcttggccccacgggaactgcagtgacggtggaactgagctccgctccatgaatctccaaaggagcccatgctgcccggcttcccttgagtcattttttccagcatcctgtccagatccctcaatgtactgatttccccctttgtgttaacttataccgatattatttt

SEQ ID NO: 429291 - DNA, 405 bp, Homo Sapiens
  misc_feature (138)..(138): n is a, c, g, or t
  misc_feature (141)..(141): n is a, c, g, or t
  misc_feature (378)..(378): n is a, c, g, or t
  misc_feature (383)..(383): n is a, c, g, or t
tgccaaattccaaaattgtgtatagttctatagttgtctggtggagtcaatggaactttagttaccagtctaagaatgtgtctttgagattgtccagttaattctctatttccagtagctgtaataaatggtgaaaanggntttctgactcctggagaaagtttctaactccttatgactaatattcataacagacttgtgagttccttgaacatggatacacctatatgcaagagtcgtattccaaagctaactcagtgatctttccatttatctattcttggattagtggtgcctttgctctttccttctgtaaaatgtgaataagttaagagttgactgcagaagtggttaacactttgggcttccatggcctcngggantgttttgtggctttggggggtg

SEQ ID NO: 429292 - DNA, 531 bp, Homo Sapiens
  misc_feature (130)..(181): n is a, c, g, or t
  misc_feature (319)..(360): n is a, c, g, or t
  misc_feature (466)..(466): n is a, c, g, or t
  misc_feature (493)..(493): n is a, c, g, or t
tattttaagtgtaaaaatccatccctttattttataaatcctgattttgccatgaagcggtctctgaactcctcagctgttactgcccagtttatcccttaattccaattccacctaccatgtggttcannnnnnnnnnnnnnnnnnnnnnnnnnnnnnnnnnnnnnnnnnnnnnnnnnnngtaacatatgccacttttgatttctctaaaggaccaggtcaagtgctaggcacaacggtcgaatgtttaattaatccttcattaatataacaagtcacctgatgatttagatctttccttcaaaacccaccttacagnnnnnnnnnnnnnnnnnnnnnnnnnnnnnnnnnnnnnnnnnntctggatcatttagtctttccctggaatgactccgggtgggtggaagaggctcactttcctcccaaaacaggcccttccatctttcaggtcaactggctaatggtnatgaggctaagattttactggagtggnctactatggtttccagggatgggtgctaaggcctttta

SEQ ID NO: 429293 - DNA, 592 bp, Homo Sapiens
  misc_feature (78)..(87): n is a, c, g, or t
  misc_feature (377)..(385): n is a, c, g, or t
  misc_feature (429)..(429): n is a, c, g, or t
  misc_feature (479)..(479): n is a, c, g, or t
  misc_feature (552)..(552): n is a, c, g, or t
  misc_feature (568)..(568): n is a, c, g, or t
  misc_feature (577)..(577): n is a, c, g, or t
gtgtaatttttcatccatctctgaaataatttgcttgtcagactctatagggattattcctctgtatgtggtactttnnnnnnnnnnctttaaacatgtcaaataatggaaaagattggagaaaatatcataaggtgattcatacttaaggccatgacttatagatagaatacatacttaaatttgattggtgaaatattctgcagctcttctagatggcaggtgatagtaaatacacaaaaattgtggttctaccaatagcatattcattccttctataacaaagcttatattaatgagagaacagaagatgaaattaaaacagactttattatctcttaaaaagccatgagacttaacagaagttaaaagcgtgnnnnnnnnnaattcagggaagaggatcacctagcccggggtaggaagagggcnatcacccggtatgcttgtgtggtggccctggaaaactggcagagaatccnccaaaattaccagagcctggggttaaaccccactggagggttgaaggaacggtcccatggcagttcactggtngccaccttaaatggcngctggttcnggcatttttgatcgc

SEQ ID NO: 429294 - DNA, 410 bp, Homo Sapiens
  misc_feature (34)..(34): n is a, c, g, or t
  misc_feature (54)..(54): n is a, c, g, or t
  misc_feature (365)..(365): n is a, c, g, or t
  misc_feature (383)..(383): n is a, c, g, or t
ctcctccgctgtctcttcccagctgctgtgtttngttttttcttcctaataaantcagtgtatccctttcagtaatgaaaatttcatgtcttctcaatcatccagacctgcatgagggacaaaagtctttttcactaaaaaacatttttagacaacttaattagaaagacatattatatttaggaattggtcaggatgaaatcctgaatttttaaaacttttcaaaatgggcttatgttatctcccaccccttttgtcctgatcatttatctagtgggtagcctagaaaacatcagttcctttctggggacagctggattcaaataaccagactggacttactgaggtgttgtgtgtaccagganggggtggacaggggaagnggagggactagagtccagggtattaaa

SEQ ID NO: 429295 - DNA, 510 bp, Homo Sapiens
  misc_feature (381)..(381): n is a, c, g, or t
  misc_feature (391)..(391): n is a, c, g, or t
  misc_feature (430)..(430): n is a, c, g, or t
  misc_feature (498)..(498): n is a, c, g, or t
ggaaagcagattttgatatgaggagtggggtcagaggaagacagaaggaaataagaaccgtgacagcaatgagcagggaagagaggggaaaggggcccctcccacgtgggtgaaaggaactgagtgggcagatggtgaaactgacccacaaatgatgccttcacggctttgtgtcttgattccttttgtccttctcacagtcctgtcacggtggtctgcatgttgtgggagcacacaataactgttagagcttgatggccataaataaaatttgaaagaaggatttggctatatgagacaatttcccacttggcatgatttggcctggagcctgcagactatccacggggtgactaaccatcacttcttttactgggcaangagttttccngtgtgttttttttcccccttatctattttcatgggcatnttgagatgggggtttggagccaggacttcatgcagaagtgaagaacctggtgctcagcagaaggggantggcctgctttc

SEQ ID NO: 429296 - DNA, 223 bp, Homo Sapiens
  misc_feature (146)..(156): n is a, c, g, or t
  misc_feature (196)..(196): n is a, c, g, or t
  misc_feature (208)..(208): n is a, c, g, or t
aattcggcactagggaccttctgtgtggaaggatctgtggggcatggagagaatcttgtgttcttcccagagccagtgtctcttctccagcattctaattgccacctcttcttcccaaacccgttagttctttctttattcaagcnnnnnnnnnnnatcattgtctccccagttgctgctttgtttcttccctgcntgagcttccaancctaacctcttttgg

SEQ ID NO: 429297 - DNA, 568 bp, Homo Sapiens
  misc_feature (328)..(328): n is a, c, g, or t
  misc_feature (358)..(358): n is a, c, g, or t
  misc_feature (483)..(483): n is a, c, g, or t
  misc_feature (500)..(500): n is a, c, g, or t
  misc_feature (521)..(521): n is a, c, g, or t
  misc_feature (554)..(554): n is a, c, g, or t
caccaggatcatagttcagtcaaaatgacatcactccctggaactagatttcaactcactagtcccctggcctcataacaggaacttatgcaggtgagacacaagaatgacttcctgtgtaggactagtaggaaatctgcaagtacttagagctggccattacagaacttccttccagaagtgccctgtgacatgaaagtaggacttcacaactaaggtgaagatccctgccctaccacatgatttgagtctcttggattcaaaggacattaatgtcaacagatggttgccatgtcagtctgttgacacaattccattgcttcagttntcccctttctctctatatgtttggttgganttgtgctaatgtaaatacatcattcataattagaatggacattaattattttagtaataacacaggataaatagctttggggtgatgaccagagtctgtttatttatggtgtgtcatattttaantgtctctgtgaatggtntgattttgtgtgtttttttanatttgttgttacagagagtgaatatgggcaaanataaagagtccatg

SEQ ID NO: 429298 - DNA, 467 bp, Homo Sapiens
  misc_feature (194)..(315): n is a, c, g, or t
  misc_feature (423)..(423): n is a, c, g, or t
cagatcctaaagtctgatcgaataataatagcattcttacacattcacctcagcctgtcttaagattcagaaactttccaagactctagagaaatctttccagaccctaggccctagttaaagattagatgttgattgaatgcaacacttctgcttgtaggtgcagtcccacacataccgtggaccttaagatnnnnnnnnnnnnnnnnnnnnnnnnnnnnnnnnnnnnnnnnnnnnnnnnnnnnnnnnnnnnnnnnnnnnnnnnnnnnnnnnnnnnnnnnnnnnnnnnnnnnnnnnnnnnnnnnnnnnnnnnnnggagaatcgcgacggactgactcagcaaactcctcttttgtgtggttactgggactcctttgggagggaacattttaaattttccatttcaaagggttccattggcancttgcactgttatctctgcctacctgagattgagtctcctggac

SEQ ID NO: 429299 - DNA, 434 bp, Homo Sapiens
  misc_feature (121)..(121): n is a, c, g, or t
  misc_feature (303)..(303): n is a, c, g, or t
  misc_feature (327)..(327): n is a, c, g, or t
  misc_feature (355)..(355): n is a, c, g, or t
  misc_feature (376)..(376): n is a, c, g, or t
  misc_feature (389)..(389): n is a, c, g, or t
  misc_feature (399)..(399): n is a, c, g, or t
ctcagcgtgaggtggactgtgacagtcacgtgggagaaggagcgggagaggcctagcagctgtggcgtcccccaggtgctccttgaaccactgggcgctccttccctgggcccagactggnggccttccatcttggtagcttttggctctgaacaccaggccaaggggcagaggtcaggccagtgaccccaactttgagccttctggttaactggggacagtgactgggaggctggtttccgtcatttttattcaactgttaccagcctatgcggcaggaccctctgggatttgtgcctgagngttggcgcccctgtgccagctggnacacactccctgacgaggtctggagatnaggacgcagagggaaaacagncaaaagtggctgnttctagcctnagtgatgtgcggaccacgctccgggctggaacgct

SEQ ID NO: 429300 - DNA, 666 bp, Homo Sapiens
  misc_feature (230)..(243): n is a, c, g, or t
gcacaatatggattgaagttttgtggtaataggaagcttatacagtgttgaagactcatgtatcctagctgttgtggacacagacccataaatcattgatttactgcatgcaatttattctggaggacagtatctcatgtttgcagggtatcatcctccaaatatcactttagctcgaaactttaataggctattccaattgtctatcagactagctgtttgtggagatnnnnnnnnnnnnnncatatgaccagctaaagctactgtataaaccaacatttccctttccacctgttcctcatcttaacccatcacaggtaagagtcttaatcctaatactacagcacaccaagggttaccatcaccccactttaccactagaaatgaggtccttgttactatttggtgggtgaatgatcccgtaccggaattctatcctgaggtttgtaggttcagacctacaagtagctacaggtagcttctattttctaggggccactctctacatgctttcttagtttggatttccctaaatgcaatgggctaagacagggcctaggatgcagataatttgagggctgactgcaggaagcaggtctaagggagcaaggagagtaatggaagaacgtatgtcaaataaagaggctttgcttttctaactataaa

SEQ ID NO: 429301 - DNA, 601 bp, Homo Sapiens
cgtagctgagaaaggatttcaattcgaacatactaattcctaagtttacgtattctagaccacagtactaaggtgatttcctagccagagtgtgcaatagaatcatctgtagaacacatctcattgctttgtgcacctcattctgacaaattccccttgaagacaaatcagaattgggaaaggcccacaggttactttcctttccttgagaaccactaggtgagaagacttctgtggtgatgtcaaattacatttcatattacagatatgaacatagtagcgtgatcctgatgtgtgatagttacagatagatcactagctagtagatcagaataaccccataatattttcatttgagtaacattttaacatgtactaagttgtgttacctacactacagctggtatcagtggagagagggattgtagtgtaactttttccaaatgagtgaattaagactgaaattcatgagtctactaagaatgaatttatgaaaacataagtctggctgatctttttgaccacttctttctggaatgggcatggggttttagcttatgcaccaacttcagtgggcttgggaaggcaggattgggtagta

SEQ ID NO: 429302 - DNA, 303 bp, Homo Sapiens
  misc_feature (165)..(165): n is a, c, g, or t
  misc_feature (169)..(169): n is a, c, g, or t
ggaaatacatagagtaggtctgaattgaaatgtcaggcagctactagtatctgcattagttttactcatggccctattgatgtacttgtggagacagcaaaaagggatgacaagttgcatcaacactagaaacaaggggtctaagtacgatttttgccaagactngttntaagaaagcagcagtagagggaaaagagatgtagacagggataaaggagagatttctacctctccaccacagaaatatggaaactttgcagtcagcaaggtagtgatcatcgcttaatacccagtttcaaacac

SEQ ID NO: 429303 - DNA, 164 bp, Homo Sapiens
cgtgaatgctttaatctgaagatgactttgagctcattgaccatattaatctttcatcaaacaaactggatgttgtttcattaacaaaaaactcctccacaccaaggagtgtttagtaacttctgcacagaggactcatccatctcttgcttatgtttgggaca

SEQ ID NO: 429304 - DNA, 164 bp, Homo Sapiens
  misc_feature (134)..(134): n is a, c, g, or t
gagctgttatttttttaagtgtaggaatcagccacccccaactgtatatttctgattgagtgagctagagtgcagcctagatatctgtatgtctttaacactgtcagatcattatgaagtgtaatgtgtttganaactgctacagctgagcagttgtggttttt

SEQ ID NO: 429305 - DNA, 164 bp, Homo Sapiens
  misc_feature (34)..(34): n is a, c, g, or t
  misc_feature (38)..(38): n is a, c, g, or t
gaggtatacagattaactatttttgtgccgtggnctcnttgacagcccccaaaagcccgtggatcccatctcagaatgttttacatgtgtattacataatgctcacacattctaaattttatctaccgactcctagttagaaatcccttgcaaggggtgttagg

SEQ ID NO: 429306 - DNA, 141 bp, Homo Sapiens
aaagatgctatcaaaggaatcttatagatgattgatggcttagactacagtggtaatgggagaaatagatggattccagagatattttaggagtttgtaaatgactagaatgggtaattttgggggataccaaatttaaga

SEQ ID NO: 429307 - DNA, 481 bp, Homo Sapiens
  misc_feature (389)..(389): n is a, c, g, or t
  misc_feature (407)..(407): n is a, c, g, or t
  misc_feature (413)..(413): n is a, c, g, or t
  misc_feature (435)..(435): n is a, c, g, or t
  misc_feature (442)..(442): n is a, c, g, or t
  misc_feature (457)..(457): n is a, c, g, or t
ataaaaaagtttcttttctttaaggtagaatagtattctactgtgtatatatactatattttctttatccatttatctgttgatagacacttgggttgattccaaaacttgactattgcaaaaagtgctgcaatgaacatggaaatgcagacatctcttcaatatacaaatttcaagtcttttcagtaaatacccagatgtgagattgctaggtcatatgtaattttatttttatttttgttcagaaacttataagttttccataatggctacactaatttacattcctacaacagtgtgcaagtgttcccttttctacacatcctctcccacacctgttacatttcctcttttctgtagtagccattctagcaggtgtgaggtgatantcattgtggttttaattncatttncctaatgattagtgaggttganacttttncatatgtttattggncatttgtatgctctttgagaaatg

SEQ ID NO: 429308 - DNA, 120 bp, Homo Sapiens
tagtctaacaaattttattatgtattaagatgttgaaaacaaggcattctggcttaaagaataaagagataaaaagctttcctttattattaatcttgttcataagagacctgtgttgta

SEQ ID NO: 429309 - DNA, 465 bp, Homo Sapiens
  misc_feature (302)..(353): n is a, c, g, or t
  misc_feature (397)..(397): n is a, c, g, or t
  misc_feature (412)..(412): n is a, c, g, or t
  misc_feature (414)..(414): n is a, c, g, or t
  misc_feature (452)..(452): n is a, c, g, or t
gtttaagagttgtttactgagtccctgcttatgtctctttattatctttctggctacccacgtttgctcccagttagaatcctggactctaaccatgggatggaaggtggtgttggcacaggccactgctctttagcagcctaaaggattatattctcatcaggtagaaactttgtggtcactgaagtccttacatgccccatgaagacttgtgtgtggatttgctgcctgcactgagctaacacgttcctgtcctgaaggcttcttccacagtgagctcatcacagcaccctgtggaatgnnnnnnnnnnnnnnnnnnnnnnnnnnnnnnnnnnnnnnnnnnnnnnnnnnnnaaatgttccttcatgatggtcttctaggagtggggtgcaggagntgggcttttgtcaancnctcaggagatttgtttttttggacacaggtttgaaacntagcaattgcatg

SEQ ID NO: 429310 - DNA, 433 bp, Homo Sapiens
ctcatgctgtgagcagggctttttaggcacacaatgatgcagttcctgctgaaattctgaaggcagaggctacacctgagcagctcctaccggctcagtggcatttagcccatgggacgcggggggacactgctttccaaagttgagggtctgcctcctctatgcagaaacaacaggaagggataaggagtggggcttgagtgaagacagaagcagcaattctgttgagatacatatgagtgcagggtggatgctggtgtcagccatagagggccccaatggctggtgctggttagtcatgtatgcaggtccttctttttcctcctacctgttgctaatcccttggctttgcacttgggtagcatttgatagggactaaagggaggtgagtggtgtccatcacgtgcacacatcataatgaagagagggagat

SEQ ID NO: 429311 - DNA, 169 bp, Homo Sapiens
ccgtggcgtggacgtcagaggctaggacttcaggcgcgcatacttgactgacaatgtcaaatccatgagcagcctgaggtggctgaagttgaattgcactggactctggtacctgcccgaagagccgtgctgactgcaaaaactggaacactggtctgtgagccacaac

SEQ ID NO: 429312 - DNA, 151 bp, Homo Sapiens
ggcgtgcagcggcctgggaggagagtggggccgccggcgcacggttctcactgagcctgccgggaggtaagcgcctggtccagccgggccccggctgtacccgccctcggtccaacgcgccttcccaccccgggaaggctcccgagccctg

SEQ ID NO: 429313 - DNA, 124 bp, Homo Sapiens
cgtggacagctgataggaattcatcataatgcccgtcaccctgttggtcaaggtcgtgtaccgcacgaggttggttgtcgatgaacccaatcttcgatcttccagcgcggccgggtatacttac

SEQ ID NO: 429314 - DNA, 148 bp, Homo Sapiens
gacttccgtatctccgccgaccggactcggcctccaccagcatcgcggcaccatggccccaggcccgaaaccgagcggacctaagcatccgatcacgcaaccgcctccacaccaacagcagccaccgccaccaccgcagcagcacacc

SEQ ID NO: 429315 - DNA, 108 bp, Homo Sapiens
gcctacatgaggataagcacggcttatagaaggatgtcccttcaggatgaagcagcactataagcactctgagtcaagatgagttgtaaccatctcaataatcacatt

SEQ ID NO: 429316 - DNA, 157 bp, Homo Sapiens
ggtggaattgcctgacctctctctgggacagagtccgttccatgtgggggtacgtgatgcggtaaagtgtgctggtcttgttgctcctttgaatgacaaacttggccatgagatgaaccttttcaacaaggtctctccaaatgttccgaactaagtc

SEQ ID NO: 429317 - DNA, 112 bp, Homo Sapiens
taaggcatttatgaatctgatgactcatatcggcacacaacagagcgttcagtatctactagctatggtgtatgatatgctgcatgatactcagcagcgtgttagcaatttc

SEQ ID NO: 429318 - DNA, 106 bp, Homo Sapiens
ctccggaaaatccagtcttcgtcccagcgcctccttaagagccgaagataagcagcatgaggcacagaaggattcagcccgcgctctggaggattgcgatgctaat

SEQ ID NO: 429319 - DNA, 426 bp, Homo Sapiens
cactttagaacacagcttggctaaaacatccagagcactcactgtccccaggaccagcctcagcactccatgaagccaggtgggaaggccaacctagggcaaggaccaggcctcagcactgcaggcactctctgccctgtcttgtcttccaagaggtggcagcgatgccacctgatagggtctgtgcagttgacagatgtctcccagcagatgctcaaatggttgctctttatctccagttccattaactctttgtccttctgaatactgctaaccaccaaactgcaagaatatcgtctgcagctccttagcagctctagttcacacctgcccagaaagtaccactgtcctgcccccatcatacacactggcttcgtggaaatccttgggtgttaacagaagaggagcagggatcatggaggcccc

SEQ ID NO: 429320 - DNA, 145 bp, Homo Sapiens
cacctttgccttcggaggccggcttcactcccacagtcttgcggttaatacattccttgtagcgcaaggaattgctggccttcagtttattgggcctagagttgtaggtctgcttattcctcttgatcatgaaactggagcagtg

SEQ ID NO: 429321 - DNA, 146 bp, Homo Sapiens
cgttcaccaacattggtctccggtcaccagtacaggactccccattcacaacggaggaacacggagcatcttgtacacgtaaggcatgatgcaggtgggcacatcctgagtcctatactcagcatcccgggacagcacagccgtgc

SEQ ID NO: 429322 - DNA, 449 bp, Homo Sapiens
tgcggccgctcgcccgccacagcaaacttggagcagtctcccggccctctggaaagaaacttagggcaattgggattggaggcagcatcccattctcggttctggagcccaggagctgccagggcgtctggatcctccggggcaggagaaatgagctggtcgggtttggagagtcttcctgggggcatggagagaacctgccgcagtgcctggagcaaggattgcagcgtggctgaaggcggaagacgccttaggcaactgcctgcagccgagcctgatggggacccagggacagatccctggatcaggacccatgggacctatctaacatttccaagtggctttcttagagatggcagatgagatctggaattgtcatattcatttttttgggcagatagctactgacaaggagaagcacttttctggtttaaattttatagcagtat

SEQ ID NO: 429323 - DNA, 126 bp, Homo Sapiens
caaatagcactttttagatgccctaaatggagtccgaacttcaagcagattcggtggacaggtggttcagagccagcaacgcgggtcagcttaaccaccagtcacgccccagtggattttccagaa

SEQ ID NO: 429324 - DNA, 332 bp, Homo Sapiens
ttcttttcatttcctcgggtgttttcgcactggttccaccggaaaggctgtgcgctgcgcctctggtgactaggactggaaaatgggcggggagcggaagggggtccgtttccccgagcctgcggggcggcttcggcgttcccagtccgctcctctcctctccacggtggggtgcggctggagggagagacgcggacggggcgattttctaaagttgggaacgactgaaaggccttgagcagtttgggagcgtcgcacgtgaggcgccgaagctgggcagagggtcgctgggggctgcctccgcagaaagggcatgtccgtgggcgaaggtg

SEQ ID NO: 429325 - DNA, 404 bp, Homo Sapiens
acggatccgtacattgccgagaaagaataatttgccaggcatttgactggcagacgtccccgccgttggtgattaacgacggcgttttgattaactaacatgagaacccatacgacgccatgagcgacgacaattcacacagtagtgacacgataagcaacaagaagggatttttctccctgttactcagccaacttttccacggtgaaccgaaaaaccgtgacgaactgctggcgctgatccgtgattccgggcagaacgaccttatcgacgaagatacgcgcgatatgctcgaaggggtgatggacatcgcagaccaacgcgttcggagcatcatgatcccccgctcccagatgattaccctgaaacgcaaccagacgctggacgaatgtcttgatgtcatc

SEQ ID NO: 429326 - DNA, 269 bp, Homo Sapiens
cattttccatcacaatttattttctttcattaaacattcgttttaatcagaatatcagttacactgttctgattctgcttgttaaccagtgataaactcataaaccaaagatgaacatcaataatacagcacaggttattcaacagcaaaggcaaacaccaaaatcacaggctctcaaaaatcggaaaccgttagttagcaccttgttttcaccaccagggcactcgtgtaccttgagggagacactgggagcccagggagcctggaga

SEQ ID NO: 429327 - DNA, 339 bp, Homo Sapiens
atcattatcatttttattgttttgtgtccaattttgaaatggaagcaacagggtcactgggtttcagaggcccatctagtccacggttgttgacatcttagcatcagccagggtggtttagcggggcctccccaagcgttccatattgcataagacccctgggacctttgaccaatcttgtagcttagggagacagcctcactaataactaagatttaattccttgccaactggtaagtgaaatcttggagttggatataacttgatttagaaaaataatgtgtcaattcttgctgttgagtattatgttggagtaaaattcatgtcccttattgtggc

SEQ ID NO: 429328 - DNA, 121 bp, Homo Sapiens
gcgaggtagatggagcgcaactagcgtggggggccatagccgcggaggtggctgtgcaggggcgcaacggtgagcgcgggggatggggaacgtggggagaagcgtggggaggcaagtgggg

SEQ ID NO: 429329 - DNA, 220 bp, Homo Sapiens
aggtacaatgaattctcccttagtgaatataatctgaggtctgctaaggtcagttcaactgatgtcaaagtcgattatgcttagaatgatctaaggtatcaacaggagcgcctgaccgtaagggtctcgtactccagaatggtggacttcgaaaaagagacccccagttggtggttctacacgagagttcgtgctttgcagttacagtacggccatggac

SEQ ID NO: 429330 - DNA, 110 bp, Homo Sapiens
gaaaataccagacttttggtatttttcttttaacttcttactttgatataatttcagatttaccaaaaaattatgagaatcatatggaaaattattggagactttttgcc

SEQ ID NO: 429331 - DNA, 229 bp, Homo Sapiens
gtcagacgcagccgtagacaccagctccgagatcaccaccaaggactgtgtggagatgaaggaagttgtgggaggagcaggaaatggaggagacgcgcctgctagcggggaatgctaatgaggagaattggtggccaggaggctgacaatgaaggtcgacgaggaatgagaggaaagtgggggaagaatgagggggaggtagaaaaaggttataggtgatggagtagga

SEQ ID NO: 429332 - DNA, 164 bp, Homo Sapiens
gttctttcagtcatctttggctatggctccatggttctagttgcgtgtgaactcgatgtaatttgagattcccctttttggtcaataggtgcctaccactgtacagctcatccgaattccctaaatgtaaatccggggccccccatggtagtcagcagcttctc

SEQ ID NO: 429333 - DNA, 154 bp, Homo Sapiens
gggcaaggaacccaacctcggaaagaatttcgggtgtggtgtccagcatcgtcagaccgctctgctccagggcaattgcttccgctcagtgcttgactttctcagagccacattggcaagtgaaataatatgctttgatgtcccgaaaacggtc

SEQ ID NO: 429334 - DNA, 322 bp, Homo Sapiens
agagttttagcattgcacacatagcaaataaacatttattaattttatacttctctgcaaatacagcaaatcaacatttattaattttatacttctttgccataaacagggtgtgcatccctggatagcagtgagcccttcagtgacctctgccctgggtcaaccgacattcattcccattttaaagagggacagaggacagagaggaaagatcacctgcttcaggtgacacaccaggtaagaactggcatggaaactaacaactacgtctcttagatttcttacatcagaaatagatgtaacatcaaccagccctggttat

SEQ ID NO: 429335 - DNA, 295 bp, Homo Sapiens
aaacgagtacaagatctttctgcacataagaaccccaacaactggcataaaggaaacagcaatgtcttccggctcagaccgcactcttcctagccacctaattaggacgtctcctgaccagtggagaaacaccacttcagagtgtaagggtactggccatttgggtttttgatctggtcacgggttcaggaagcccagagttctccggggcatcgctctgtggattcccactccagcaggtccaaggagctcgggccatctcttggcctgagaacagctttcccgaagatggccg

SEQ ID NO: 429336 - DNA, 103 bp, Homo Sapiens
atggaaccgacgagaactaggaatgagcaccaaatgcatgggagagatggaagaggataaaacgggcctgcaacctcctccttctaacacaaaaaaggggaga

SEQ ID NO: 429337 - DNA, 466 bp, Homo Sapiens
tctccagccgctagtgcaagtcaggcctcccgcacagggctgcccaattttcttgagtgaagagatgagatgaatcctgcaggtggtaaacagggtggaggtaggctactgctgtctgtggaagtgccttcctcgagctacgtactgcacagcaccctaataccgacgcgtggttcaagaaccactagcctcagtgtcggccgggagcggtatagaaaaacacagagtgccagggcacccaaatttctcataagtttgagaggtgctgcacagtaactgaggaaagcatgcatggacgaacaaaaacctgtggcttttgtctcagagtccctttgctaaaatcttgccgattgcctctttccaagcatcaagacctgatatcctctgaaatctcagaaatctctaaagcgatgatatttgacagacttatgtggccttacgaaccacctggatacctcaaaggact

SEQ ID NO: 429338 - DNA, 205 bp, Homo Sapiens
agaaaccagtgcacgagaagaaatgagtgggcggaaccaatgggccccgcaagctggcttctggcagcctgccaagcgcagtgcagagagggactggcaacaagcaaacacaagcaaccagggtctcttcatagctggagtttgaaagctcagagttggcatttgtgaatctgacaaattttaaagtgtgccggagtccatgtac

SEQ ID NO: 429339 - DNA, 112 bp, Homo Sapiens
tcttcttcccgtaccatctaatcaacatttctttcggtgtatcagaaacatccttctccacagtggcttcactgagcatgagcccatcgacatgaataccaaagttgaacag

SEQ ID NO: 429340 - DNA, 511 bp, Homo Sapiens
  misc_feature (119)..(119): n is a, c, g, or t
  misc_feature (149)..(149): n is a, c, g, or t
  misc_feature (151)..(151): n is a, c, g, or t
gggccgcgcgctggttggacggccggtccgtcgtccgccatcccctcccgacattgggtgccgcgagggggctcgggctgacaggtgagccccgccctggctcccgcgggcgcgaggangcagaagccgggcaggagaagcgctcacgngncacagggcgcccccggggcgacgcaggccttctgggcgcggtgcagacgtggaaacagcgacggccgagtagcggccacctgtctccgcgcccgggcgcttccccctcggcggaatcagagggcgcggctttccctcgagcagtgcggaaggcagcaggctccgctcggcgtcccttctccgcagatgcggcgctgcccgcgtgcaagacttgcactccgcgcgcacccttagagctcccggcttctgcgcgcttctcccgacgcctctcgggcagggcttctcacttgattttggtaccaatcgcctacggctcagtttcagtcagtggggccgggaattgcaagacgattcctgcgac

SEQ ID NO: 429341 - DNA, 416 bp, Homo Sapiens
ccactcagactttattcaagtaccaacttgagccggtacaagctggtgatgatgctccgttaggacggccagctagcgaagcgaaccgctacctaggctcctgcttatccgtatttggagttcagacggtgctcacagaagctcaggaacttttccatagcaggcgtgcaccgagctgtgaactcgtcggggtggtggtccgacagtgctcgcccgcaggcagtcgcttagcagcttggcgtttacccagtccacccggatcttgtacgcctgccggtcgcttaatctcggacatcgtcgttgtcgcatgtcgtccacgtgcgcaactcgtttcttcatcgcgtcggccaccttcttgccgtagcccttaacctgggcagatcgattgctcagttctacgtgcggcgaagtaggtc

SEQ ID NO: 429342 - DNA, 310 bp, Homo Sapiens
tcacccgcaaagccgaggttggtgaactcagagacgatcacttctgaagcatctcacagctggtgctcgttcaacgggggtggtgtcagtcagactcgagcacagacgtgtcggcctcatcatgtgccagggagcttgtccacctggagatcaggcttgggatccgcaaccagatcatcctgtgatcggcagggcctgcgcgaatgggactcgtgttacatcgtgtggttgtaggtggccttgcacggtcacggctagagtagtgtgtgcatggaggatatggagctggtggccctggactaggttgctg

SEQ ID NO: 429343 - DNA, 305 bp, Homo Sapiens
  misc_feature (41)..(41): n is a, c, g, or t
  misc_feature (53)..(53): n is a, c, g, or t
  misc_feature (92)..(92): n is a, c, g, or t
  misc_feature (106)..(106): n is a, c, g, or t
  misc_feature (161)..(161): n is a, c, g, or t
  misc_feature (214)..(214): n is a, c, g, or t
gggctgaagctcacctcccaaggataaactgctattttagnggtgcaagaaantaataactaacatgtatcgagtacctaataagtgctggnagcactttatcagnattaattcatctgatcctcgcaacagcgctataaagcatgcactattattcactncattctctggtagaactgaggaaactgaaatatggggtactaaaattacctgnttaggtaacatgggagagccaggctttgaggccaagatctctgtcccacagcccatgtctggaccattaaacagatagctctaagcagcta

SEQ ID NO: 429344 - DNA, 650 bp, Homo Sapiens
  misc_feature (235)..(327): n is a, c, g, or t
cttctctaaattgtactgcaaggttttggcagccagagctcccactccttgccaccatcccaccgccaccactggaggtgctgaaggccaagtacaagccatccgggtggaaacctgtatttgaaggtctgcaccgcgggccactgtaggcagaaaatcaagttgggagtctgaggaaagctactctaatcatagaaaaattcttgtattatttgtgtttctcaaatctcactannnnnnnnnnnnnnnnnnnnnnnnnnnnnnnnnnnnnnnnnnnnnnnnnnnnnnnnnnnnnnnnnnnnnnnnnnnnnnnnnnnnnnnnnnnnngaatctgcgtcttgacaagatccctggctgatgcctgtacagctttacagtttgaagagcactggtctaaaggcaacaaatcatgaagattttatttcaaaaatccaagggcccttgggaccccagagaatgccacttcacttgaataaaaccagacctgggtgccctctctaccacgggggaattgccactttgaccctcctgaacactctacttaagactcaggtgtgtccctcttgtctcatccttcagtgagcccccacgactggaagcgcccgtgggcaaggacacaggtcacggggcaacctctgccctcatgtgtg

SEQ ID NO: 429345 - DNA, 663 bp, Homo Sapiens
tttttctcactgcagcttccttgtttcaaaaagagaatttttgacagcactgcaaaggcacaagaaaccaggcacagtataaaatatacaaataaaacaggtaccaaggaacttaaaacattcaacccataacgtcgtctaggtttttctgctttaagaaaattgactcaattcttccaagagaataaccctattaaaggctaaaaatggaagctcccagttatgtagaagatatttccatctggatccgtcttagaaagtgaaacaggaaatggcttaatcctagaggagaagataagactggagaaattactggggaaagggcggttaagggctttctgcaagtgcttgagactatccctgtggcaccccctaccacagccctaggaacaatagcataagatccttgcaccaataaatgtcacagaaaggatggagttttctgcctttaaatgtaatgtggactttggcattgagcatctcagcagccactgtgatgaattgaagaccagagaaattttcctattttctgggcactaggtcaaattcctggaaatatctggagggtaagaaccagtgaatgaaaagagatggttaatgctttgcagtgaaggaaaagtgactcgcatcagcagattactatgaagctgcaagagggcccag

SEQ ID NO: 429346 - DNA, 138 bp, Homo Sapiens
cctcgtgccgattttcactcactgcatcccatttgctcatttgctcgcctctctgcatctctgttcttcatttcaatgttatgaatattgatgatgagaacaggaatgcccatgtgcatgcgcgtgcgtgcgcgcacg

SEQ ID NO: 429347 - DNA, 528 bp, Homo Sapiens
gtctaaaggtaccagggatgacagtttccatatgttggaaaattaacatatggaaaatgctttacacttccaaaatgtattacataaacatgttttcattatgtattctcaatcactttgttaggatttgaactgatgcctctgacttcagaagttatacacattcaactgtactaagataactatccagtattacgcctaatgctatatgcatcactgagttcaaattaagcaaaatttatttcaaatatttaagtattttcagcatttagaccatcattccaaagtacttccacactgggccattaaatatgcatgcaccattctctggcttcagagcaccatacccatcacaaacttgtgtgaatcagaaggcatatgttaaccaggctaattttatgtggataccataacccataactgcctttggagagtggataatataggaagttattgctactaatagtcactaatatactaatttagaaacaaggtaatgatatatctttttgtagatatagatgtatc

SEQ ID NO: 429348 - DNA, 433 bp, Homo Sapiens
  misc_feature (115)..(152): n is a, c, g, or t
  misc_feature (195)..(249): n is a, c, g, or t
cgttctttgttttaaaatgtttcagactcttacaagcaaaagatactcaagttagatcaaattggtgggggcagggagtgtgcagggccttaacaacaatacatcatgtatgttnnnnnnnnnnnnnnnnnnnnnnnnnnnnnnnnnnnnnnctcgattcaagtcctgacatcgtaagtaagataactgatgtannnnnnnnnnnnnnnnnnnnnnnnnnnnnnnnnnnnnnnnnnnnnnnnnnnnnnncctgtgtctcagaggtgttaaggctcaaggggaaacctatgtagtatgtaacacaggacgctcacaggaggtgttcagtatatcggctatcagattttacaggaccaaccagacggggggtcataaagctgggctgaatttgaagtgaatttgccaaaaacggaggctgctctgcagaagtatc

SEQ ID NO: 429349 - DNA, 369 bp, Homo Sapiens
aatttagatcctgcagtctatggccttctgaaaaataacaagaggaaaatagacagaatctaagtggagtattgggtcatatgaatctgccttagaaatataatcggggttataaatcttaagaaagggactgaaagtatggtttcacaaagagaaattcaaggaaaacgtcattgggataggggaggcccatataggttgaaagtacttatgtttctatgaattagatataattgtgaagggtctatatatgcatgagagtgagagctgatggggcggggcagatgaaatgcagaaagcactttttaaatacttttttttggatgtgtgttgcttatacttatttgtcgtttggatgttctgtgaaga

SEQ ID NO: 429350 - DNA, 464 bp, Homo Sapiens
taaatattcttggaaacccttttctgccaatcactgtcagcggctactcaggcctgagcagatcagcagcagatgcacaatgagatatgcagacttggaaatgagctgtggacggtgcgtgggagggagcactcctctcacgagaaagagcagagaaaacactcaatgcgaatacagccttagacaaattctaatctaataagaatcattcttcaggtgcacagacgggcagaaaacagaagtaaacgcttcatcatgcagaactgatttcttttaagtaatcataggaatgtaattctccaaggaggtcgctgagattcatacatattgctaatatatttaaagctgaagagggaaagacagcagtccccaaacagtggtgctggaactaaatggaaacagacagtgtcagagctcaaggtgaggcttcatgtcccaagaggccaggaatcatgagagatgct

SEQ ID NO: 429351 - DNA, 352 bp, Homo Sapiens
tagaattaaggatggcacaaacattccttgctcttttgtctgtgaacaggtaatttttttaagtctatcttttcctatgggattgagaattggataattttacataggatggaacacagttcaagcttcctgcctcatgcaagatcaagtatacaggtattgtttttttattacccttcaattaccaaactcaccaaaagcgcaaaggctgttgaaatagcaacttttgcctataactctggcttttatcatctatcttaataatttgcctttggggacattcattccagcattataatgttaactacacaagtaaaaacacatttgttctattttgtataatattactaga

SEQ ID NO: 429352 - DNA, 599 bp, Homo Sapiens
agcaaaaatctccttaataaaagagtaggatccagggttagtttttgtagcctcggacggcccgtctggctctaggacagcacgaacttccgggtcttgtagcggacgtattgttttgtttggatatgggggttcctggggccctgcgaaataccggtacacctctcggcccttacgaggacaggagaggaggacagtgcaataacccttaggagagtccagggcgagctcgtcgtaagtaagtatcttatctcctgccctgaggatgcggttgctggcacggctggtcacacgcagtgaacatacctttagtgtgggtactactgaatcagcacattatcagttatggtcgcgaaaacatcgtcagtcttgtttcacgggcagaagcttcatcttccggatgatcgggaaagggaatatgcgcgctgttggtgcgagtcataacaaactcctcgacacaacgttgttttgatgtagcagtgggtctcctggccagaaacgtgttatagttcgccgaagagcgtcatgctagatgtcgagctcctttgagtccttacgcaggacataccggtcctctgtgatgaaggagtcacatccca

SEQ ID NO: 429353 - DNA, 456 bp, Homo Sapiens
ttctagtcaagacagagcgcctcttgtcgtccatcagtgccggccagcgctgtgcggggcagcggtcggtgtacagggccttctgggggccggtgcgcatgctagataccttaacgtggggattcgtgggcctcccagacattactaaggtcacagccgcagttagttcgggatgaccggctgactctagttcagtcccgcttctccggagtccgtgcacggctctcacttcggtccgaatcttgcgatgtgctgtcaatcttcttcaccacctcgatacatgtacgtcagcttcttgaatctgggctcccaatcgttgaggtatatcggtagtcttggtccccggaactgtgatgaagttctcggacctcgacttagccttatgtcgagcctaccactcgtcatcgaacccaccagggaatcaatcgtgcgtaccagtggggtcgtatcaagcag

SEQ ID NO: 429354 - DNA, 245 bp, Homo Sapiens
ttatgttgtcaataaacattttattagttccttgtatggataagaaacttaaagtcaatgactaattcatgccatatacacatattcctgttttagattttctattagcaaacatcctgttcaattgttgttgggagttttgagtacattcagaaaatgaaaccccacaatcactgtttacaacaaatgagtatgtatttttcctaataaaatgaagctgcttgaaaaaaacataccttaaaatt

SEQ ID NO: 429355 - DNA, 103 bp, Homo Sapiens
gcaaggagagagtcctgcagtaggcacattcaatgattcgctcttggtagggacattaagggaaaaaagtgattaaatatcatcattgaaacgaatgtctggt

SEQ ID NO: 429356 - DNA, 340 bp, Homo Sapiens
  misc_feature (236)..(246): n is a, c, g, or t
tttggtttttattttcccagaggaggggagaggaaggagagtgtttacaaagtcctgtagccacccactttgttttcacttttgccagtgtaactcgggtttggttttcttgtattatttaaatggttgtggtttcctttacccaggtagggttcaatagaagcctttgttggagaattatactaagtattgtgtatgcccaataatttgttataaatcccttaagtagtaatccnnnnnnnnnnncctggcttggtttagttttctaatgtaaaggtaattggcaatgcacttgatatatcttgcacaatataggtaattgagttgggttccattttac

SEQ ID NO: 429357 - DNA, 160 bp, Homo Sapiens
tgatagagtccatagcggcgtaatatgagttgtccttggagccgatctcccggaatcccttgatctcctgctgttgagcttgcagtgcatcgcgaattatctattgcatttactccttgctcagaatgatgctcctgtcatcctcgattatgaattgcca

SEQ ID NO: 429358 - DNA, 193 bp, Homo Sapiens
agataatgtgaaaatttgtctatctccattttcccaaagtcccattatcaaagatctatcatttgaactggagccaatggtaaatgtccataaatgcaatcatgtcactaacacaatagaaaaatattaactaaagctcataaatttataacaatcatgctgtaactttaacaaatatggaataatttacata

SEQ ID NO: 429359 - DNA, 369 bp, Homo Sapiens
  misc_feature (18)..(18): n is a, c, g, or t
  misc_feature (35)..(35): n is a, c, g, or t
  misc_feature (68)..(68): n is a, c, g, or t
  misc_feature (88)..(88): n is a, c, g, or t
  misc_feature (193)..(193): n is a, c, g, or t
  misc_feature (214)..(214): n is a, c, g, or t
  misc_feature (222)..(222): n is a, c, g, or t
  misc_feature (245)..(245): n is a, c, g, or t
  misc_feature (294)..(294): n is a, c, g, or t
  misc_feature (301)..(301): n is a, c, g, or t
  misc_feature (309)..(309): n is a, c, g, or t
  misc_feature (315)..(315): n is a, c, g, or t
  misc_feature (329)..(329): n is a, c, g, or t
  misc_feature (345)..(345): n is a, c, g, or t
tgaaggccagggacattnaaatgaatgcgccattnctgctctttgagaattgggccgtaatctctggnatgcatcccagggccgtggnttggaatgggtgtctaacaggaaattctgggcagtctatgcatacattacattcctttcccaccctgaaagagtggtcaacaaacacaactgtcctctgtttgantaaaagggggagtgttgggantggtaagnggccagggcacaaaccgcacagngttcaaaagcagatgtggctgctgagagtccaaacatccttttcttctngaaaagngactcagncactangggtcaccttttgngatacccagttcagtncttctcctatttccatgagataaa

SEQ ID NO: 429360 - DNA, 141 bp, Homo Sapiens
  misc_feature (98)..(98): n is a, c, g, or t
aatccaacagaaattgaactgaatgaaataatggccacactgcacaatactatatggcagagaatatggtcatgctgacttgttgtgaaggtacaggnatatattttttttatgtcatttagtaaattataataaactagg

SEQ ID NO: 429361 - DNA, 354 bp, Homo Sapiens
cagaatctctctgaccttctcttgccttcctttcacttccgcaagcagaactgtgggtcatataaacccttattccagagagggtcctgctccatatgctgggggaaagaatgccaacttaatgaagcatccataaaaacccaagaggactgggttccaagagcttctggatagctgaacacatggagggtcctggagggtgacacaccccgggaggactggagagctctgtgccccttccccaatactgtgccctatgcatctcttcatatgttatcctttatgattttctttgcaataaactggtaaacgtgttttccctgagttctgtgagctgcaccagcaaaatttaat

SEQ ID NO: 429362 - DNA, 423 bp, Homo Sapiens
  misc_feature (199)..(199): n is a, c, g, or t
  misc_feature (226)..(230): n is a, c, g, or t
  misc_feature (251)..(251): n is a, c, g, or t
  misc_feature (281)..(281): n is a, c, g, or t
  misc_feature (290)..(290): n is a, c, g, or t
  misc_feature (306)..(306): n is a, c, g, or t
  misc_feature (320)..(320): n is a, c, g, or t
  misc_feature (357)..(357): n is a, c, g, or t
  misc_feature (394)..(394): n is a, c, g, or t
  misc_feature (403)..(403): n is a, c, g, or t
tgggtctacttggcccctttagtctccaccctttgcctcccagatacagatcccatcactcagggccacacattaattttttataaaactctgtgtgtcatttctgctcacacttacctcacttattaaatggtaagggcagttatttctcaccttcacttttcctaatgagaaaaaactgacttcttgggacaatatnactatataactatcactccagggcaannnnntacttgttttgactgtttttngttttatccctctcctcctctaccattttnaaacatttntcccagttatgtaaangacacacacaaagngacaatactacaattgatgtggtttatatgtgtaagnactactcccaatctcagtatggttggccgtgtttggnttagtgggnctccctctacccggttaccc

SEQ ID NO: 429363 - DNA, 279 bp, Homo Sapiens
  misc_feature (179)..(179): n is a, c, g, or t
  misc_feature (221)..(221): n is a, c, g, or t
  misc_feature (244)..(244): n is a, c, g, or t
  misc_feature (258)..(258): n is a, c, g, or t
ctacccatccatgaacatgggatgtgtttccatttgtttgtgttgtccgttatttcttttgacagcatcttgtagttttccttgtggagggctaaaaacctctcactattgcctttgcttgactccattgctttaaaacccaagtaccctcagctatacacattcagaaacttattccnaatgaactacatcttgggagaaaaggaagccatagcaagggngctgtttgaggttcaacttgggnaggggctgtgggtntttcccgtgactccattaagg

SEQ ID NO: 429364 - DNA, 185 bp, Homo Sapiens
  misc_feature (57)..(57): n is a, c, g, or t
  misc_feature (82)..(82): n is a, c, g, or t
  misc_feature (117)..(117): n is a, c, g, or t
atttcagttaaaattattttgggttcaaatacatgaacatataattatatataaaanactatagttctcaatagtttacagngacatcttttttagaattagctgcttataatttgngtgtaaatgtattacagaaagctgctaaattgtttatatttctacttatttcaatttagctattaggt

SEQ ID NO: 429365 - DNA, 260 bp, Homo Sapiens
taaagtagtctatgatggatagtgcgttcggacaactgaccaaaacaaatgcagattctctggtgaattcactttgtcctaaaattcaaagaaataccatacattatttaccactgaacacgaaaagctacaaggaaatgaagtactatgaataagaatcatcagaaacactaagcagctgaatcaaccctacatagacattaaatattggaatgattggatatagagtaaaaaacaactatgcttacttaatatgttaa

SEQ ID NO: 429366 - DNA, 215 bp, Homo Sapiens
  misc_feature (198)..(198): n is a, c, g, or t
caagagcctcactcctgtctttagtgattgcactgaagcaggcctcatttttttgcagtcatgctaaaccacaagttagtcaacatttcactaattgacatttcattaggaataggtctccaaggtgaggcataacgtttggggtgttaatctgggattttcgcagttcatctttttgggggaaactgaaagttaccntctcattttgcatgttt

SEQ ID NO: 429367 - DNA, 333 bp, Homo Sapiens
  misc_feature (168)..(180): n is a, c, g, or t
tcatccacttcatttaaatatacattaagaatctataagagccaaatatcagtcattttaaaaatatgataagcacttaccacaggaaaagcacagatatagcacagaaaagttctagaatacatcactaagtaccactttttaatacttattagcagctttctggcnnnnnnnnnnnnnaagtactaaatgttcagtttaaaacaactgggaaatacaaagagcctacaaagaaaattttaaagtacctgtatccctagtattcagaagtaagctctactattaaataagatattctttctttttatatgtatcgttaaaataaataacata

SEQ ID NO: 429368 - DNA, 352 bp, Homo Sapiens
  misc_feature (26)..(27): n is a, c, g, or t
  misc_feature (53)..(53): n is a, c, g, or t
  misc_feature (253)..(253): n is a, c, g, or t
  misc_feature (309)..(309): n is a, c, g, or t
  misc_feature (316)..(316): n is a, c, g, or t
agaaggggacattgtggcaaatttgnnccagccggaagacaccccctcccccnagctggagtttataccatttatggcctcctaactcattcattcaggtatacactaactcatccattcaggtatacactaactcattcattcaggtatacactaactcactaactcatccaggtatgcactcactaactcacatatccccagggcctcctaaggcatctaaaatatgcaaatctttggtgagcccccagtnaggctcctggctctgaatttgactcctgaaagttgaggccctaggagagggggatngggactnagccacagaaagccttgctcagctcccctagaccgg

SEQ ID NO: 429369 - DNA, 354 bp, Homo Sapiens
  misc_feature (276)..(276): n is a, c, g, or t
gatgctggcctctgttgggcttccggggaggcctcaggaaactttcaatcatggcagaaggcaaacaggaagcagactgacatggccagagcaggaggaagagagagggcaggggagatgcttcacacttccaaacaatcagatctcgtgagaactctgtcatgagacagcaccagggagatgatgctaaaccattagaaaccacccctatgatccaatcacctcccaccaggccccacctccagcagtagggactacatttcaacttgagatttnggtgggaacacagatccaaaccatatgagtggcactaaagaagacactgaagaacatcacctaagagccaggcatggt

SEQ ID NO: 429370 - DNA, 163 bp, Homo Sapiens
cactaaggatgtacagtcataatattatgctgtcaaatcacctgaaataattcttctctgtgtgtttaagcctgccaatttcatagtgttaggttcatttgtttggttttggttttacgaattgccttatttattttgatttaaccttattttgtaattattt

SEQ ID NO: 429371 - DNA, 316 bp, Homo Sapiens
  misc_feature (54)..(54): n is a, c, g, or t
  misc_feature (235)..(235): n is a, c, g, or t
  misc_feature (268)..(268): n is a, c, g, or t
  misc_feature (288)..(288): n is a, c, g, or t
ctcaccctcccaacttacccctcatgaagtctggaaagaatgtacctacctggngacttcagttctgataaaaaataagtaaataatgtggagcagcacaaggcagcatatacaactggaaaaaggaatgaggaagagctctatgtacagtcatggagtgatcttgaggatgccgttaagtgacaaaagcgaagtgcaaaatagtgttgagagtatgttagcattttttctaagnaaaggggtgagtgcaaacatatatatagacagnaaaatgattttacaaggggnggaaggtaacaaggttgagagtacaggg

SEQ ID NO: 429372 - DNA, 164 bp, Homo Sapiens
gagaatacataaagagcacatttctccacattatcaggaaaacaatttgaagcacaggtcttgtgaattgggaagaccactagtattgccattagctgcttatttgtgtgtgtgttggaggatggattataatccaagtgtattcatattctcacactttaacc

SEQ ID NO: 429373 - DNA, 401 bp, Homo Sapiens
  misc_feature (359)..(359): n is a, c, g, or t
  misc_feature (390)..(390): n is a, c, g, or t
acttcggcacaggccttattaataaactacaacaactctaacaactgtttcttttaaatttattgtttaattcacaggaaaaatgatatgtatttacatgcacaacatgatgttttgaagtctatgtacattgtgaaatgactaacactagctaattaacatatgcattacctcaaataattactgtttttgtggtaagaacactttacatccactcttagtatttttatgactacctcatattattaactatactcaccatgttgtacagtagatctcctgaacttattccttctaactgaaattttgtttcttttggtcaacatctccccagcccaacatctaaacaccccgggtcncgataaccgccattctatgggagggcttctnaagaaattagg

SEQ ID NO: 429374 - DNA, 234 bp, Homo Sapiens
cgcattattttgaaaattgtctccaagatgttaggaattatttagtgctaatattcttgtaaagttacttttatgcaaggtcaacctgtgtagtaagttggagcacattagattaacaaaatgtgttcctggttgtttgtcattaaaaacattctttaggttgattccatacattggctactgtgattaatactgcaatatgtagtgggaatgggcgatacccctttgacattc

SEQ ID NO: 429375 - DNA, 378 bp, Homo Sapiens
  misc_feature (43)..(45): n is a, c, g, or t
  misc_feature (65)..(170): n is a, c, g, or t
  misc_feature (188)..(304): n is a, c, g, or t
  misc_feature (318)..(318): n is a, c, g, or t
  misc_feature (336)..(336): n is a, c, g, or t
  misc_feature (346)..(346): n is a, c, g, or t
ggccagtaactacaaggaggtgcctattaatttatttattgannnggggggtctcactttgtcannnnnnnnnnnnnnnnnnnnnnnnnnnnnnnnnnnnnnnnnnnnnnnnnnnnnnnnnnnnnnnnnnnnnnnnnnnnnnnnnnnnnnnnnnnnnnnnnnnnnnnnnncgtgccaccacacccagnnnnnnnnnnnnnnnnnnnnnnnnnnnnnnnnnnnnnnnnnnnnnnnnnnnnnnnnnnnnnnnnnnnnnnnnnnnnnnnnnnnnnnnnnnnnnnnnnnnnnnnnnnnnnnnnnnnnnatcagctaccgagnctgggagggtcgttactnaagtgaaaangtgcaggacagagatgtaggagctcaggcttc

SEQ ID NO: 429376 - DNA, 311 bp, Homo Sapiens
  misc_feature (41)..(41): n is a, c, g, or t
  misc_feature (160)..(160): n is a, c, g, or t
  misc_feature (204)..(204): n is a, c, g, or t
  misc_feature (218)..(218): n is a, c, g, or t
  misc_feature (245)..(245): n is a, c, g, or t
  misc_feature (253)..(253): n is a, c, g, or t
  misc_feature (255)..(255): n is a, c, g, or t
  misc_feature (269)..(269): n is a, c, g, or t
ccctgacatatgagcgagccatagcttagctctataagaanttctaaattcaaaatactcctttacagtattttgtagaccttaccctactttttatgataatagatgagaagtctgatgcctacttacagttgctttgtagttaacctcttttgttccnctgaaagaggggtagcattttctctttaccactggggtttaccnacctcaccatgatntgtctagggaacatctttttcccacantaatcctngnaagcacttgatagnacccttctacttgaaggcttaaggttttccctaactttgggg

SEQ ID NO: 429377 - DNA, 259 bp, Homo Sapiens
tccttaaaacaggctttaaactgataacaatttgcctttaatcacatacaaaaactctgcactttcattccttccttcccatgttttctgattttgatgtaaacttaaaatttgtgtcctttaacaatatactgtagctgcagttgtttttaatagttttgtctcttaaccctcctagtagtaataagattgcttcacacaccaccttaacagtattagagaattctgagtggggactatatattacttataccattta

SEQ ID NO: 429378 - DNA, 386 bp, Homo Sapiens
  misc_feature (332)..(332): n is a, c, g, or t
tctcactatatgagactgcatctttgtaaacactgcccctgcatttaataataaagcagaattcctgaaattatatgaatattgccagatgggacaatggttttgcttctgttaccagttataatcagttctgtttaggggaatcttatttttgataaccgggtaacacacaggaaaacactcccttgtttaatttaaagagcagaggttggcccagcattcacactgagagtgggcagagtccaagtcaagttgcggccaccagggtgaattgatctctatgggaacatgtagggagggcaaaccaacctaggcctttttaaaggcacaantaggagtcttatttaatttacacttttgaaggggcctttcataaaggtggaaag

SEQ ID NO: 429379 - DNA, 398 bp, Homo Sapiens
  misc_feature (378)..(378): n is a, c, g, or t
gtgggcacttcagcataggtttcgggtgctactgtgacatacagctcaaagcatcctaatacccctgagtctgagtaacatgttctcagaataggggctccatcaatcaatcatatcaacccattaacagcaagaggaaaatgatgaagtatatagccaagagaaaaactggattctgatgacagttgaaatgtgatgaagattctgtgaagcagagataatgtaagaaagatgcctgtgtggaaattaaatgtaaaaatgccaatgggatggaaattttctccaaatgtactagggcctcccctattaattttaaaatgggagctaaaccactttatggatggggaattatttactagggcatccatggcagggagnaagtctttcccaaaaacaga

SEQ ID NO: 429380 - DNA, 384 bp, Homo Sapiens
  misc_feature (215)..(215): n is a, c, g, or t
  misc_feature (334)..(334): n is a, c, g, or t
  misc_feature (352)..(352): n is a, c, g, or t
aagttatgttttccactggtttaatcattctctttcttttaataaaattgaagtaaaaatgacttagtgtcgttttgtttctgctgtgtttctacaggtcatattcagagttgactgagcaccataagtgttcagccgactttgattttatttttatcgcatgcctcataaaactgatttagaaacctaaaaatgtgtcactaaaatattaaatngtgaacagtcagagcttattgagtttccaaaatctaacaagaatgggctgggctatgaagggcaaacaaacattcttcaaatgtaggccagccacattttaaaaactattggggggggntcttggaagggttcggangtgtatggattggataccctggcccaattttc

SEQ ID NO: 429381 - DNA, 411 bp, Homo Sapiens
  misc_feature (190)..(190): n is a, c, g, or t
  misc_feature (392)..(392): n is a, c, g, or t
attcggaacagggagatggtgtgtcccttggtttaaagaagtcacaaccgctgtcatcgtcgactaggtgtctccaagacactctttttccaagttctggcaattgcttttttccctcacctcattaggcttagagctagtgacagctctcctgttactagctctggggtacagcactatctcagatggnttcctattctctgtacactctttgtaaattgattatttcctgaacctgtatcaaattattccaggttgactttatcatctgtttccttttagaaccctggaatgatatttgtaataatacaatataaagcctgggatgaatgcatcataattggactgcaatttttttcctattagtgttatttatgaattattttattagnttaaatgctatagcaaacc

SEQ ID NO: 429382 - DNA, 213 bp, Homo Sapiens
  misc_feature (59)..(59): n is a, c, g, or t
  misc_feature (166)..(166): n is a, c, g, or t
  misc_feature (178)..(178): n is a, c, g, or t
acaactgctgatacattttaaaaatactcttcattacttaatcacgtatgaagtctatnaaaatgtatcagcagttgtacctcaatgccacctatgttttccaaagtgccaaatgtgtaatatctgaggcattaatattcaataaatgccaaggtctagtgatccntacagactgaanaccataactgaggctgcattgggcatttgaaaaac

SEQ ID NO: 429383 - DNA, 140 bp, Homo Sapiens
gataccttgtattttaatgaaaataaatatgatttaataaacatgaatgttgtcaaattaactgaaggaatgttgcaaaataattgaattattttaaaaaatcattgcagctgacatttattagttttctatatatacta

SEQ ID NO: 429384 - DNA, 392 bp, Homo Sapiens
  misc_feature (199)..(199): n is a, c, g, or t
  misc_feature (207)..(207): n is a, c, g, or t
  misc_feature (223)..(223): n is a, c, g, or t
  misc_feature (231)..(231): n is a, c, g, or t
  misc_feature (271)..(271): n is a, c, g, or t
  misc_feature (381)..(381): n is a, c, g, or t
ttatgtaaggtctcagttccaacacctggctcctgcaagatcaggctttgtctccagttcttgtattaccattacaatatgtttaattttctggttttatgccttttagtctctttttattaagcactgggatttcctttactttttttcaaagctcttctttgcatgctgtttcatattctgcacagtgtaactgggntttgtagngagaggtttttcaggntatctagnctgctgtattacataagttctatgtagggaatgcacaaangtacacatacagaggaatacacctcttaaacttggaaaaatcttttctatcataaaaatgtcatggcatatttaaacaactgtgaaggggattgtcagtgggcctaatangttggtaggtt

SEQ ID NO: 429385 - DNA, 216 bp, Homo Sapiens
agaaaaacccactacttactcagagtgtgtataatattaacacatgaaagatataatcttagaaaaaacctccagtttcttattagttttgatattttctgtactcagaagcattttaggttgcaaaggatataattaagacaacaaaataacttagtgccaatttactgaataaattctttcactaggggaataattactaatagcaaacctatt

SEQ ID NO: 429386 - DNA, 347 bp, Homo Sapiens
  misc_feature (36)..(36): n is a, c, g, or t
  misc_feature (295)..(295): n is a, c, g, or t
gggacggccgccgttttagactgagctcctgcactncgccctaacataccacatcaaacaagaatggagtagtcacttgtgcgaggtgacacataatcaaactgaacttggaaatgggctagttttccaaaaaaacaggagattcacagcaatcaatgataggggatcactcaagttgagctggtatgataaggaagttccttctgctttaatcctctaaggaaagtaactgtggaatgatctatctgagttttgttccttgtttctgctttcttcagctttttctgcctatgangcctacctcctctgctcggctcactggggtaacctttctgtttcatagatgg

SEQ ID NO: 429387 - DNA, 356 bp, Homo Sapiens
  misc_feature (76)..(120): n is a, c, g, or t
  misc_feature (324)..(324): n is a, c, g, or t
atttctgacacccgtgggaatgaggccctttttattcatagctgcatcccctgtgtctaagagggcatacttaatnnnnnnnnnnnnnnnnnnnnnnnnnnnnnnnnnnnnnnnnnnnnngagtggggctgatgattgagaactcccagtatatcctacatatggacttgtgttttctccattccttcctccccaaaatatctggggcagcatgtgagagtctcttcattttctattggaaattggagtacttgaatccagaagtttaaatctatgaaggtgaaatgcggttaggctaagtggatgggcccttagttagatccnctctgggtggatttgtttccccagtggtactt

SEQ ID NO: 429388 - DNA, 379 bp, Homo Sapiens
  misc_feature (19)..(19): n is a, c, g, or t
tttggtctgtgcctgttgngtttccgggttgccagcttctctagaacccgatctgggatagatgaggcaataagaaagcccaagaaagtcactgctgtgttcttcctcaggttctgaggtccctggccagtccattctctctccaccttttagaactttcttatgtttgctttgtatataatatcccggatttttagttgtagttagtgagagcgataggagaaagtagtgctccacctttcccgtgacatcctggtgcttgacactgaaatcacacatcaagttgtggtatatatagggtttgtggtatataacctaagggtttgtggtatatacaggtcatttgtcctgaagatgaagcttgccaatttggataggt

SEQ ID NO: 429389 - DNA, 133 bp, Homo Sapiens
attgttattgtttacttttcctcaaaggtagccaaacagagttccctaggtcaaattttatttatagtcaacatatctcttcctctctcttcaacaacaaaagcaaaactgtggagcgtgtgatgcttttgtt

SEQ ID NO: 429390 - DNA, 421 bp, Homo Sapiens
gggctttaaaagataaaccaaaaaagattaattgcttaagcaaaatggtgtgtttccaattagtgtcatcctttctgttaattggagacaggttaataaaacatgggtcagtaacactacgacttttttcccccaacatccacgaaataaaatttattgttccactaggaaaatgtaagcggtgcattatcttttcctcaagtgcttaagcattatgtcctgtgatggatgggtacgacaggcagtggcggggtaggcaaaggaagtgggcaggcttgtttccagctgatgacctttgaaaagttcacgaccagcaaacattcatcctgctgtccaaaatagcggatgatttgcaaagtcacggtgttaaggcggggttgcttaaggaagtgttacggtttgaggctattgttgtaggctg

SEQ ID NO: 429391 - DNA, 269 bp, Homo Sapiens
  misc_feature (58)..(58): n is a, c, g, or t
  misc_feature (67)..(67): n is a, c, g, or t
  misc_feature (123)..(219): n is a, c, g, or t
  misc_feature (229)..(229): n is a, c, g, or t
ccccatccactttagccatcctgattttcgcctcattaatgtaaactcaggtgtcttnaagagtttngtaaaaataacaaaagattgtctgtcttccacctttattactcaagcttttcctgnnnnnnnnnnnnnnnnnnnnnnnnnnnnnnnnnnnnnnnnnnnnnnnnnnnnnnnnnnnnnnnnnnnnnnnnnnnnnnnnnnnnnnnnnnnnnnnnnagtgggaggnaaaccaaagtatatacatcatgaacgttcacataattgtt

SEQ ID NO: 429392 - DNA, 377 bp, Homo Sapiens
  misc_feature (252)..(254): n is a, c, g, or t
  misc_feature (294)..(294): n is a, c, g, or t
  misc_feature (299)..(299): n is a, c, g, or t
  misc_feature (311)..(311): n is a, c, g, or t
  misc_feature (323)..(323): n is a, c, g, or t
  misc_feature (348)..(348): n is a, c, g, or t
  misc_feature (364)..(364): n is a, c, g, or t
aaacttggtagagacccaggagactagaagggagcttagagaattttcgtggcagccccttttccacaacagaaaggcaggcacagaatctcattcagacagacctaacattagctctcattccacaggtcctgggctaccttatgtctccaggagaccgtgctagacatggcatttctgtagcccagcagcactggcatattagactacagtttgtgctgccaacataggtcacaattacaatgtgagaannnacactttgtaggtaacagttaaaacttaggatgaaccagnaaggnaactacctgggnacatttcaagtnggccagttttcttccacttcaacantttaacacaggggttncatggacatgagg

SEQ ID NO: 429393 - DNA, 356 bp, Homo Sapiens
  misc_feature (308)..(308): n is a, c, g, or t
cctcgcggtctgtagcatagaattgcctagttgacgtatggatcttttctaggttgtaggatttggtagtgtagatccccagagtcacactgtatctgttgcctatatttggctaggttgagtcatgtcaccaaatatagcctatgccttcggatgaatgtatgccaggcttctggttccaaattctgcagctggcctccagagactactgcttttcctgtcataatgttccttaagattagggctgctgaccaggcagtattttttatatttataacaaaatcaataccaagagccttcaaagattngaattttgctcatcaaataggttcacatgctgaaatcctaatgccttc

SEQ ID NO: 429394 - DNA, 261 bp, Homo Sapiens
ggaaggaatgtacctctaccaataaaggccatatatgataagctcacagttaacatccaatttagtggcaaaaacttgataccttttcctcgaccatttcatctgcttgggctattgtaagaaaataccttagactcagtaacttattaacaacagaaattattttacagtctggaggctgggaagtccaaggccaagttgtcagcggattcagtgttaggtgagggcttgttctttccttcatgttggcatctttctacc

SEQ ID NO: 429395 - DNA, 456 bp, Homo Sapiens
  misc_feature (381)..(381): n is a, c, g, or t
  misc_feature (395)..(395): n is a, c, g, or t
  misc_feature (401)..(401): n is a, c, g, or t
gcccaagccatccgtgatttggccccatcctgctattcactctcatctcctatctcacacaatactccattacatagatgtgttccagttacacgggaacacttgtcattgacctgcatccccaccttcagggttgggcacatgctgtttttttggcttagtaaaccctttccccaaatcttgtcctccttcaagatccaggtccaaagcttgcctcctccatgaatcctttcccaagtccggcaatcagaagggatctcccagtcgtctgaagtctcatagccctcatgcttctttcctgttctctctcactctctgctttgcagcatagttatcagtgtccacatacttcctcccctttgtgggtattcaaactccttngaagccagggaacntagggntctttgttacagtggtttaggcaggatttgagggacaacaagaaagattgattaa

SEQ ID NO: 429396 - DNA, 161 bp, Homo Sapiens
  misc_feature (144)..(144): n is a, c, g, or t
acttctcccctgggaccttgttcccagggtccgtgtggaagctggaacactccgcatgatctccctggccaccataggcaagctattgaagtttctttacacatgcaggttggcaggacattacagttttgtttccttttttgnaggcacctacggtagga

SEQ ID NO: 429397 - DNA, 262 bp, Homo Sapiens
  misc_feature (84)..(84): n is a, c, g, or t
  misc_feature (212)..(212): n is a, c, g, or t
ttcttcttattcaaacactcgcagcaggggcaaagaaagcgacttcggccgcatcttaagttttaccataactttctggcattntcttttcttccagttttcccagactacttaggggcagtgaagaattataacatacatgaattattagtactcccctcgagttaaagggggaggaaagcgcctcattttctatgccgccaagggacggnccgagcgggcagcctctaaacaatgtatttatcactttgcatctctttgg

SEQ ID NO: 429398 - DNA, 578 bp, Homo Sapiens
  misc_feature (92)..(92): n is a, c, g, or t
  misc_feature (255)..(263): n is a, c, g, or t
  misc_feature (329)..(329): n is a, c, g, or t
  misc_feature (352)..(352): n is a, c, g, or t
  misc_feature (360)..(360): n is a, c, g, or t
  misc_feature (411)..(411): n is a, c, g, or t
  misc_feature (421)..(421): n is a, c, g, or t
  misc_feature (435)..(435): n is a, c, g, or t
  misc_feature (458)..(458): n is a, c, g, or t
  misc_feature (502)..(502): n is a, c, g, or t
  misc_feature (513)..(513): n is a, c, g, or t
  misc_feature (530)..(530): n is a, c, g, or t
  misc_feature (550)..(550): n is a, c, g, or t
agcaattcactgagcacaggcttctctgttctattctgctgtcctgcactttgaattcagggcttggtgtcagcatggaaagcaccagcgtntctgatatggcagcctttggttatgttcccctcaagggatttatcatccacaacctactcaaatccctcccccaacagctaccaaaaattcccctggtgagaaatgctattatgagaaggggtggtggctgctttatgactcacactgtttcattaaaaagannnnnnnnncaaacaaattttcagtagaggaatccaaaggttttccaaagccacagcaaaacagaacagctcatnaatactatttcttcaaaggtctngccacttncatagggagatttcctattacctcaaaaaactgggaggacatttaggattncacttttccnttttgtggctgccntgggccttctggggtttgagggnaggcaagttgggaatgggttcattttaaacacaggccacatgantggggctcgtnagtttttaaggtgggtnggccgctaggtttgcaagtnaggcctttttcccgggttttagggttgc

SEQ ID NO: 429399 - DNA, 394 bp, Homo Sapiens
  misc_feature (343)..(343): n is a, c, g, or t
  misc_feature (356)..(356): n is a, c, g, or t
  misc_feature (369)..(369): n is a, c, g, or t
atgaattataaaggtagtagttgaaagatcagagaggttatggttggtgagtagctgaactcagattcaaacctggtccagtgtgttgtttttttcagcatcagagtccactagccaagttgatctctgcagtatctacatgtggttattccatttttctaaagtacatgtaaagtttgagctcagcagaataaaaccagggtagtcatattgagaaagccagtttgatataaatgtttcttctgcccgatgtttaaggcatttgctgggattatcagtgggctactgcaggtgagggtgatggcaattttaggatgcagttaggtatcatgcctcacggggntaattaggtaccnggcccatatacgnttggataccctctaggtcctcaccc

SEQ ID NO: 429400 - DNA, 313 bp, Homo Sapiens
  misc_feature (164)..(164): n is a, c, g, or t
  misc_feature (166)..(166): n is a, c, g, or t
  misc_feature (282)..(282): n is a, c, g, or t
  misc_feature (291)..(291): n is a, c, g, or t
tcctaatttgtaggttgtttctgttgtttcctttgttatacagaagctttcatatttcatgaaatcccattcatctctttttgcttttgttgcctgtggttgtagagtaaaattgaaaatgtaattgcccaaaccaatttcatgtagttttctccctatgtttntntctagtagttttacagtttcagattttatgcttaaggtcttcgacccattttgaggttaattttttcacatgatatgaggaaaagggtttcaatttaattcttctatatatagganatccaattntcctcaaaaacatttatgaaag

SEQ ID NO: 429401 - DNA, 328 bp, Homo Sapiens
  misc_feature (72)..(274): n is a, c, g, or t
  misc_feature (294)..(294): n is a, c, g, or t
cactgagtccaatcatggtgaagtaaaacgggacaggacacatataaatctgatgtgaaaagtttagcatannnnnnnnnnnnnnnnnnnnnnnnnnnnnnnnnnnnnnnnnnnnnnnnnnnnnnnnnnnnnnnnnnnnnnnnnnnnnnnnnnnnnnnnnnnnnnnnnnnnnnnnnnnnnnnnnnnnnnnnnnnnnnnnnnnnnnnnnnnnnnnnnnnnnnnnnnnnnnnnnnnnnnnnnnnnnnnnnnnnnnnnnnnnnnnnnnnnnnnnnnnacatatgtgtcccacggcgntgggccagcaagtattttttctagacagtaaggt

SEQ ID NO: 429402 - DNA, 121 bp, Homo Sapiens
gcctcacccaccaggctccttgctgtctaccttgtcacaagctgatttctgccctgctcatcagtccacacctcagcccagtttggtcccagcaaggaccaaaccaaaactatttatatac

SEQ ID NO: 429403 - DNA, 422 bp, Homo Sapiens
  misc_feature (354)..(354): n is a, c, g, or t
  misc_feature (374)..(374): n is a, c, g, or t
  misc_feature (379)..(379): n is a, c, g, or t
  misc_feature (412)..(412): n is a, c, g, or t
ctagacacaaaatggagccagcacagggcgcgtctcggcaatcctcctcagcccaggccccgtgcgtaaggagcgctccgtgtcagcgcgcttgctagaccccagtgctgttgactttaatgtgaataggaaataagttttgatgtttgtttgttttttaagtggggctcctgttttttaaaaatggatcaatttacctggagtgcaggctgctcctgagcttgaaggtggaagtcagttcatgcgtgaaagaagtcttgcctaattgaaacatggcatcacggttaataattaaaatgttatctgattttgagatcagctgtttttgtgagaatgctaatgtgggcattcctnattagtctgtatgtttgttntgttntgatttttcaatttctggggttgcaggagggancacagattat

SEQ ID NO: 429404 - DNA, 190 bp, Homo Sapiens
  misc_feature (56)..(56): n is a, c, g, or t
  misc_feature (69)..(69): n is a, c, g, or t
  misc_feature (93)..(93): n is a, c, g, or t
  misc_feature (98)..(98): n is a, c, g, or t
  misc_feature (103)..(103): n is a, c, g, or t
  misc_feature (108)..(108): n is a, c, g, or t
  misc_feature (135)..(135): n is a, c, g, or t
  misc_feature (157)..(157): n is a, c, g, or t
  misc_feature (173)..(173): n is a, c, g, or t
caacatgaataagtctcaaaatttattctcaaacagtagggtttctaggcaatttnagggtgttgtttnctctgtagtctaagccaaagcccnagttngagangggcnttatatcattaagttttgtggggtctnggctgtttatcttacggagttncctccccagtgttgtntgccgcgtccggcccgg

SEQ ID NO: 429405 - DNA, 388 bp, Homo Sapiens
  misc_feature (21)..(21): n is a, c, g, or t
  misc_feature (42)..(177): n is a, c, g, or t
agctatactgctaatacactnacttaccttggacaggtttcnnnnnnnnnnnnnnnnnnnnnnnnnnnnnnnnnnnnnnnnnnnnnnnnnnnnnnnnnnnnnnnnnnnnnnnnnnnnnnnnnnnnnnnnnnnnnnnnnnnnnnnnnnnnnnnnnnnnnnnnnnnnnnnnnnnnnnnntttgtgtctctcttattggtgctgatatcagaagtattattaaaggatattactatagttgatgttactgaaatcttctacaatgagggtgccaacatgtgttcctgagtccacttatcgtcatcaccattgctgccaaagcaattgttatgggctttgttgggcctccccatttaatttaggcaaattactgtaactcctttaaaccaag

SEQ ID NO: 429406 - DNA, 435 bp, Homo Sapiens
  misc_feature (402)..(402): n is a, c, g, or t
atgagttttagaagatgcttttattttgaaccacaatttttggaacactgagaagcttccaggccattttaccactattcacctcatttcgggggctcacttgttaacagatttaaataatgcgggatatgggaagtttcggtaaaaaaaggtatttcctcccctgggtctactcctgcctgatgtcttttttctgcaggaggaaagtgtctttcctcctctcttttgaaaaatttaactcaaatgtcccaagccctttggccaatgggtgcaaatttaggaatttagccacattctgctgtgttaatagtactccccacagaattgtaggagtctcccttcccttacagagttcttccactcatgtaaccccaacacacatgtttcacacgtgtggcacangcatggcacacacacacattattgaggctttca

SEQ ID NO: 429407 - DNA, 280 bp, Homo Sapiens
  misc_feature (229)..(229): n is a, c, g, or t
  misc_feature (263)..(263): n is a, c, g, or t
gtgtgtgtgacagcttcccaggtgcatagtccttcctcagtactgtagtgctgttctgggaggcactgcttctagaattccactgccggcatctcaccacccacttgctatgctggacctggaaggagaaatgaggttttcaggccatgacaggcagctagctgtttccaggggagagttaaaaatatttgagctcacttactgcttctttgtttattagtggactcanccctttttctgagtaaatacagaccccgtctttngtccgaagacacctctt

SEQ ID NO: 429408 - DNA, 365 bp, Homo Sapiens
  misc_feature (26)..(26): n is a, c, g, or t
  misc_feature (189)..(189): n is a, c, g, or t
cattttaaatttctcattccattttnccctctatagatcagaagttatcatctctacacctgttcttttaatgatgatcttaaccatgttaatatatattcctaacagtctttattatctgttccagttatcaactgatgtgtaataaaccaccccaaacctcagtgggctttaagtagcaattattanctctcatggttctgtgggctgcctgggttgaactaagcagtttttgcacggtatctcagggctatcaaatgggcagcagtggctaaagccatctgaagactcagtgtctaaggacggcttacttgcatggttgggcagctgggtgggcagttgctagcgggggagctcagcagagg

SEQ ID NO: 429409 - DNA, 420 bp, Homo Sapiens
  misc_feature (392)..(392): n is a, c, g, or t
  misc_feature (407)..(407): n is a, c, g, or t
aatctgaattagttcagtctaagataacatagataacgcctacatagatgtgtttgaaaagtgatcggtccctatttccagatttccttgtgaaggcagtttcccaaggaactttggtcttcacagcttcctctgactgataaattccgatgctgtcatcagagatatgatattcaagatatgaatgcaaagataagtacccaaaaccttggtaaacagagccttaaccattatattagaagatacctaggaacattcagctctctattatgttatcaatgggaggagagctctggttttctcaatatagaggaataggttttgaatcaattctatccagtattaggactttcaagccctgctcttaaaacataaagggggtttgtaattgncaacccatttgggtnttaatggtggttt

SEQ ID NO: 429410 - DNA, 172 bp, Homo Sapiens
  misc_feature (66)..(66): n is a, c, g, or t
  misc_feature (121)..(121): n is a, c, g, or t
tgacatccggcgcctgggcctatttccagttttatgtgagtcatgtaaaaaagccttggctctctnacctattaagaatgtctctttctctatatttattaaaggtttcaaactttattgnttcgatttttgtgggccctatattttagtattaggcacaccttgggtttgt

SEQ ID NO: 429411 - DNA, 383 bp, Homo Sapiens
ggatacaatatttgaccagctcaagaaccttcagtgcttgactgaaatttctaagactgatatttcttactgaaatgttcctttgggttttaaactgaggtttctattgtttgctttcaacagacatatgtttgacatacaaaatatggtaaagatccactacttctgcagtgttatatttccatattattcccttattggcctggatttcctcatcaatagcacaattcattcaaatgtggaaagaaaggcattgatacactgatcagagtaaggaaagtaatatcatatcatcaaaagtcacattaatctaaatgacaaatttattctctgttggtttccaaatctggggatgttttctaggaagttgcacaataaattat

SEQ ID NO: 429412 - DNA, 374 bp, Homo Sapiens
  misc_feature (125)..(125): n is a, c, g, or t
  misc_feature (166)..(166): n is a, c, g, or t
  misc_feature (239)..(239): n is a, c, g, or t
  misc_feature (302)..(302): n is a, c, g, or t
  misc_feature (351)..(351): n is a, c, g, or t
tctgggcccagatttacacccaggcagtctgacttcacagcccttgctcttggcagatattaaaatgccatgcagtaaatacaaggaataatgtgaatatgaagaaagaaactcctgaatggggntgggatggggatactgttgttagagaagggagagaaaagtngagtagagaaggttctccttagaactgactgtttgatctaagctgggaaggaagagtaggaatcattcacatngataaaggagagaagggcatcctaggtagaacatatggctgaagcacaaaagaacctagaatncttacataacagatcaggttttctagagtttgtgtggagtttatgaagngaggtttggggttagattgagac

SEQ ID NO: 429413 - DNA, 318 bp, Homo Sapiens
  misc_feature (238)..(274): n is a, c, g, or t
cggcacgaggcaaaattattgctaaaaaatgctaaggattatctgagccttcagcgagttgtattctttttgctcatggagggtcttcctccatgtagttggctactgactgattagggtggttgttgctgaaggttggagtggctgtggcagtttcttaagacaagacaatgaagtttgccacattgagccttcctttcacaaaatatttctctgtaacatgcaatgcagttttgannnnnnnnnnnnnnnnnnnnnnnnnnnnnnnnnnnnntttgagacaatctctcctgcaacctctgcctcccgggttcaagc

SEQ ID NO: 429414 - DNA, 403 bp, Homo Sapiens
taattatgcaagaaaatgctgcaccgtagaggctgatcttaagaatgccagtacaagatgtatgttgactctgtggcatgctcacacttgctttcctttcaggtgtacacctgctcagggaaaatccacccggtccaggcaatctgttttaagacttccctagctcgaggctcagtggtcctgtaattgggtgggggttttgtcctttgcacatctgatatcttcatacgctccctcctgctcatcatcaccagcccggtctctggacacacaaacacgcaaggctggccttccccaactccatctcggacgcatcttcttcctctctctggctcaacacaggagttccctgttcacacaccttgccattggctggacacaggccaatgggtggaaacttccc

SEQ ID NO: 429415 - DNA, 341 bp, Homo Sapiens
  misc_feature (154)..(154): n is a, c, g, or t
  misc_feature (178)..(178): n is a, c, g, or t
  misc_feature (247)..(247): n is a, c, g, or t
  misc_feature (261)..(261): n is a, c, g, or t
  misc_feature (300)..(300): n is a, c, g, or t
aatttatcaaaaaaaggaatcaattgtaaaggacatagacataagatttagtgtaaagttaaaaagtgtgttttgaacattttatatgaataactttgagaatgattaatttaaaaggcagggttattataaacagaaacttcaacagcctagnacaggaactttgctagcataaaantctgtattcctttatttgcttatatttgctacatgtaaagccattcatactacacacaaagtaatattnctcaatagtgtttnctagtatcatgggttcaagagggaaacacaaatgatttnctagggttactcagggcaaaatcacttcattgtaggcctaa

SEQ ID NO: 429416 - DNA, 454 bp, Homo Sapiens
  misc_feature (13)..(13): n is a, c, g, or t
  misc_feature (343)..(343): n is a, c, g, or t
  misc_feature (417)..(417): n is a, c, g, or t
  misc_feature (422)..(422): n is a, c, g, or t
atttcggcacagnggcatctctctgaggaattacacaaggcaagataaaaagatagatctcttttgctacaggaaagatgtgtatcttaccagcctggggtcaaaaatgttacctttaggggcttgatggaaccagaaaatagcagttatattcacttatttctcatcttgttatatttggaaagatctgaaaacaatcttttctgaattacaaaggctgagaaaatgttctattgagggtaatataacccataatataacatttactcagcctttgtaattactccatcaagaacagttaatcactagagataatttataagcagagggggttgccagtggncccttttactgacagatattgtttatggggagatggcaaggagtactactaggattcttactaaggaagcaagncaagnggattttacttactctctttgggcttacagga

SEQ ID NO: 429417 - DNA, 342 bp, Homo Sapiens
  misc_feature (288)..(288): n is a, c, g, or t
  misc_feature (293)..(293): n is a, c, g, or t
  misc_feature (312)..(312): n is a, c, g, or t
tggaatggatataaatttctatccagggtgggtaagacataaaacctagaatttgatatgtgcaaaacaatactgcacaaacaacacttgtgccttaaatgtctctttgaacaaccactagttagggaaaagatggatccgatttttactgttatatttttaatttttatgggtacatagtaggtgtatatatttattgagtatatgaaatattttgatacaggcatatggatgtgtaataatcacatcagggtaaatgggagtatccttcacctcaagcctttaccntttcnttgtgttacaaacaatccnagtattttttttagttatttctaaatgtat

SEQ ID NO: 429418 - DNA, 423 bp, Homo Sapiens
  misc_feature (220)..(220): n is a, c, g, or t
  misc_feature (235)..(235): n is a, c, g, or t
  misc_feature (246)..(246): n is a, c, g, or t
  misc_feature (346)..(346): n is a, c, g, or t
  misc_feature (352)..(352): n is a, c, g, or t
  misc_feature (368)..(368): n is a, c, g, or t
  misc_feature (373)..(373): n is a, c, g, or t
  misc_feature (394)..(394): n is a, c, g, or t
  misc_feature (401)..(401): n is a, c, g, or t
ccaacctctggactcctcatgatttggggaaatgcactattcatcattgtatcttcaccatctagcacggtgctaatcatatagaaggcattagtgaacacttattgaattaacaattgtaagtttaatgacttgaaactttgagccacaggagaaatctgtagataaacacagatttcttagtaagaggaaaattattccatccttacaaagacagaantctcagcagatcagntgaaaataccntagattatcataatgagggcacttgccaacctcttgaagggaaatatgtttttaggaaacccttattaaatactacaatatcggaagggctaaatttaanttaaanaaatgtggttcccaancattntgaggcacaacggggtgaccncaggcancattatttccttggtacctttt

SEQ ID NO: 429419 - DNA, 351 bp, Homo Sapiens
  misc_feature (41)..(41): n is a, c, g, or t
  misc_feature (43)..(43): n is a, c, g, or t
  misc_feature (103)..(103): n is a, c, g, or t
tgcagactaagagcccatgtttatcccattaaatatatttntngaatatagatacggtttttcattaatcttcacagaaggatcactatagatatctcatggntatatgactttatttctaagtctgggttttaatgacacttttgcatgtaggagtccatctctaataagcaatagcttgtgaaacaggcttttaataaggtcatgaaattctgatccagccccttggcagatgtctctgactcttattcagaggctctttttaaggcaacgtgtctctatagggctaaaagctataaccctaaaaatattttgaggaatttacatacatacatagggtacatcatatat

SEQ ID NO: 429420 - DNA, 218 bp, Homo Sapiens
ggggttccaaccagagctgggaagctgcagaggcagtcttagtgggaatggcttggcaggtgatccagtgtggtggaaagttaactaaactctaggatgggatctatcatcaaatggactccctcttaatgcatttcatccttaaaacaacttaattcttagacctacaagcagtgttgagttttaagtcttgcccatgtcctagaacactagagctc

SEQ ID NO: 429421 - DNA, 428 bp, Homo Sapiens
  misc_feature (112)..(112): n is a, c, g, or t
  misc_feature (132)..(132): n is a, c, g, or t
  misc_feature (136)..(137): n is a, c, g, or t
  misc_feature (142)..(142): n is a, c, g, or t
  misc_feature (155)..(155): n is a, c, g, or t
  misc_feature (216)..(216): n is a, c, g, or t
  misc_feature (353)..(353): n is a, c, g, or t
  misc_feature (384)..(384): n is a, c, g, or t
  misc_feature (391)..(391): n is a, c, g, or t
gtaaactgctctccaatccagtactgataaacgacgtggggaaagactatggaggttactttcaaaacaaacatttaccatgttccaggaaatacatgtgtttgtataaaangcaggtagcaattacataancttnntcctnctttatctatttnccaagcaattggctgttaaggtcttttctggttgcctttgggactttgtgtgcactctttnctgcttttaaaaacataatgcatggtaacccatttgccactgactggcattgtgaagagttggaatggggcagtgtaataacatgaaaggctgatgacaaatttagtatttgtaatttgggaatctcttctccagtnacattaggaagtcttccctatttaaagggancctgganacctccattttctccaagtgaagagtttgtcaacact

SEQ ID NO: 429422 - DNA, 427 bp, Homo Sapiens
  misc_feature (282)..(282): n is a, c, g, or t
  misc_feature (337)..(337): n is a, c, g, or t
  misc_feature (371)..(371): n is a, c, g, or t
  misc_feature (417)..(417): n is a, c, g, or t
tattatgtgtaattgaacattcacaggaaatttatgcttctatattatcattaacttttgttgttcttgttgtcatttttgagatagggtctcagtctgtcacccaggctggagtacagtggttaattcacagggtttcactgcagccttaacctactgggctcaagtgatcctcctgcttcaacctcctgtgtagctggaaccacgggtgcatgccaccatgcctggctaattttttgattttttgtaaaaatcaggtctcactttgttgcccgggctggntctcaaactcctagggttcaagcaatcctcccatcatgggcctcccaggcgtgcnggaatttatggggtatgaggccactgccccgggntaattattattaacttttaaaaatgtatgtcacatatgccataatncattccaact

SEQ ID NO: 429423 - DNA, 435 bp, Homo Sapiens
tcaattcaggtctagcgatttgggtgagcataggtgatagtcaggcagtggtaaccacagcccttgggtgagaccccagtaccatactagtttcaggtctgacccagcacagtcctaatagtggtgacaacaggagtatttgtgtcacctctcttctagcctagttagctcagcacagagctgagctgtttgggagaacgtaaggaaagagaacatgagtcttttcctgggtaatccagacaattcttccagatctgatccaagaccaccaagaagtatctctataagtctgcaagaaccatattgttactggggcttggggggtgctccctaatacagatggggggctggcagtggaccaggaaacttaggaggcacaacaccccaagtggcctttggaatgcttgggaaagcctttccaaagaagggacaggt

SEQ ID NO: 429424 - DNA, 136 bp, Homo Sapiens
gcgactttgcaacgtcccccatgttgcacatcactgtcttgatctcattgcctttgccgtcagacttggcaatcagcccgggcatcttgtagcgctagaagtggtctgcaacgatgcggttgacatcggcagcaat

SEQ ID NO: 429425 - DNA, 294 bp, Homo Sapiens
ccctaatcaatagatggagacgtacagacatactcagaccacctctaagaaatgcaagtaacgggcggaggatgcgaagccacagtgatgtttaggatatacagtgagatattagttcacgggtgaagcatgtagtgaggaaagtagagccgataatgacgtgaagtccgtggaagcacgtggagacaaacactgttgggccgtacatgacgtcgggtatggctaacggaagactcagagtaactctgaagcatgtaagaacgtaaaatagagagcccgatataattgtacata

SEQ ID NO: 429426 - DNA, 259 bp, Homo Sapiens
gcttggtcttggcatattgaatgagtgcctttcattgatcttagtggtcattgagtggtgtgcctttcattgatattagtggtcaaaaatgccagatattagattgcaaagtttcactcacagtctcaatgtcttggacaacatagtccatctggtaacttgctggatttactgttgtcacaggtgagctccaacaggatgaatccccggagaaagcctgcattgatgttaaatgcatgaggtcccagaatctaccact

SEQ ID NO: 429427 - DNA, 365 bp, Homo Sapiens
ccaccgtgcctggccgagctgtttcatgatttaataagataatgtataaatcacctggtgtctagtcatcctcttcctgtctttcctttatgcccacatcagtattactacaaagtaggatggagatgcattgcttgcaatatgtgaaaagtcttccattgtaggaatctcacatatttccttgttaatttttctatacagaatccagatgttgaattaaaaatatactttgctaaaataaggttgcctctttacagcaacagagaaattatggcccaagacctttataaaaccacgggattgctttaaaatatatttcatagattttatttctacttaatttgtgtgtgaagttgttttaattg

SEQ ID NO: 429428 - DNA, 131 bp, Homo Sapiens
gctggatgctccaaggatttcaccaaacttagataagtcttattgttaatttttcaaactaggaatgtccatgcccatagatgacataaatttggtcaggcttggagtttttagttttcacaggtgacttt

SEQ ID NO: 429429 - DNA, 334 bp, Homo Sapiens
  misc_feature (93)..(203): n is a, c, g, or t
ctgcctccagagttcaagcgattatcgtgcctcagcctcctgaatggctgggaactgcaggcatgagccactatacctggccaattttggcgnnnnnnnnnnnnnnnnnnnnnnnnnnnnnnnnnnnnnnnnnnnnnnnnnnnnnnnnnnnnnnnnnnnnnnnnnnnnnnnnnnnnnnnnnnnnnnnnnnnnnnnnnnnnnnnaccgcctgacgtgagctttcaataacctctctttataggcttctcattgtccttagcttgcagtcactggactctggcctctgtttcaatgagaaaatacccagcgtttgaagaatccagcaaaatctctc

SEQ ID NO: 429430 - DNA, 459 bp, Homo Sapiens
ttttgaccaaaagcatcaactaatggtctttctgtttctttttgggataggagacaaagcctttaccattcttgacttatagctaattttttacttaaagcagaaaacatcggtcaggactctgccatattaaaataaattctgttgaagcactatctctcgaacagtagatttaaacccctgagtttccacatgtaattttttgatgggcttcaggctcctctgtctgttggtggatggaatcagagcaagaagactcgtacgtctttagagtgagaaagaatgattttctcatgctaccactgcagaccagttaggggatctgggaataaactggaaggcggaagtgtgaagccatgctgctgtgagaacaatgtaagaaatggtcaggggcatttctgaagcttgggggaaattcacctgtagactgaaagtgtaagttgtaatgaatgaatgaat

SEQ ID NO: 429431 - DNA, 420 bp, Homo Sapiens
ttttagtaggagaaaagctattttaattacacacaggagtcccacaaagtagaggacttgaagaggggccagatgatagaagtttttatagcatcctgagctaaagaaaggagtaggggttggtggtttatggggggtggtgtctatacaagttgcgggggagtaagaggagggaatgcatggagaacaaaggttgtcttgttatacagataacatctctcaggtaataaaagttgtctccaaggatctcatcagaagaagaggtaatggatagtttgtgacaaagtctttctggagtgtggtgtctcctgtgagttaatcttccttcactgatgagattcccagggaggatacctatgacaattgtgtttctttttggaggctctatcttcagccacttaagggaagttcagagagagc

SEQ ID NO: 429432 - DNA, 370 bp, Homo Sapiens
gtatgcatcaccacacctggctaattattttaaattttatgtagagatagggtcccactatgttgcccaggctgatctcaaagtcctggcctcaagtaatcctgccaccatggcatcccaaagggcagggattacaggtgtgagcttccatggctggcccttgagaatatgcttcctaaccagttctcagaggatgctcatgctgctggtcttgagagcacacttggagaacatcttaactagttcatcttcacacttcacttagaggtgttcagtggtcatatgtaacggtgtatgttagtatacagattgttctttttcagatttcctacagaaaatctacttagtttaaattaaagaacactcccca

SEQ ID NO: 429433 - DNA, 169 bp, Homo Sapiens
aaagatcagatagttgtaggtctgcagtcttatttctggttcttctgttctgttccattggtctatgtgtctgttcttgttcaagtactatgctgttttgttcattgtagccctgtagcatagtttgaagttgggtattgtgacaccttcagctttgttctttttgcag

SEQ ID NO: 429434 - DNA, 139 bp, Homo Sapiens
ctaggaataattgtggaatcttgtaggagttgaatattagtccgccgaagtcggtttactcgtaggttcattaccattggttgccaattgatctgacgttaaggtatggaccgttgacctcgtctgttatgttaaggat

SEQ ID NO: 429435 - DNA, 171 bp, Homo Sapiens
ccgcagacatgtccacagggggtgagactggcttctggagtagcagccgcttagtcgcctcagagaacttctaatggctgcccaggttggcagccttgatatgcagacctgagcgcacccggctgccaggttagatgagcaggtgagtatgtagtgcagttcaaggttcca

SEQ ID NO: 429436 - DNA, 511 bp, Homo Sapiens
gttgttgaaagctttatttgtcctcacttagggtaaatgaaaaatttcaagatttggctacaacttcattctttgaaaagtaatattttacagaaagagagattaggggtactggctctgaagacaaagcttagattcaagctcagctcaccatttataccagtcccctgattttgccgtttccttatgatataaggcactcaggagcacaagccaagcacacagtaagtgttcaggaagtgctgacattatgaagttcaaacagcaccactggtaaacgaagttcagatttcagaggtggagactgtgtacgcagcctcacagctgagtggatgccgtggtgaaatgtttagatcataggcctttgagaaaaattatgagaatgttagaggaatgggcctccgttggcacccgaaataaacgttaaaggaggatatttcatcatataacaacttctggacttgtagaaaagtgaaaagagaggactgggtaaggaagatgaaagccctcc

SEQ ID NO: 429437 - DNA, 372 bp, Homo Sapiens
aaatatatacgccacacttgataaacttactctttacatatttccattaaatccctaagtcagctaggttccttttaggggacctactattgcccactcaccagacacaatagaaatcattgtatctctgggatttcctcacccgtcaagaagagtctattgagttttacttcctgtgagttgtattataaaatcactttctttcattttatacaacagagctgcacttacaattttttgaaggtgcttttttcaaaccatacccatgtgagatagctttgagggactgtgatacacccttcccatgagaggcacgtttcctaattgagaattaccgactggatccagtaattatgttgactgactctttgt

SEQ ID NO: 429438 - DNA, 279 bp, Homo Sapiens
gggtctaggagattagtgattattagttctagcgggttacagtgaccggtagcacaggagggattggcttcctttttctgaaggtgaaccgggtcttttctgtcctttttctaagtagcttaaataacacatggtcaataggcacaattttcacaggcctctaactcatgacccactaatcccctagacccccgttggaaaaaaggagaacgtgtaaccctggagatcgatgggtcagggctaaacccccaagttgcctttttagtttgaggggaggta

SEQ ID NO: 429439 - DNA, 216 bp, Homo Sapiens
ttcacaggaatgttttatagtctctgcatggacttcataccgtaacgtatgaggtagacactcaggaattatagaaatgagatgatcttggttgcatgaaatgaatccctcgtcctacgagtccaatgatggagaaatccctcattccttggaattggtgacgaccgccgagatggacaagcgataaggactcagcagggcgacaatggagaagcg

SEQ ID NO: 429440 - DNA, 382 bp, Homo Sapiens
tttactgataccggatagatacgtattttcagggtacctgtgacattttcatacatttataatgtgtaataatcaagtcaggataactgggatatccatcaccttcaacatgtatcttttctttatgctgggaacattcaaattattctctagtagctactttgaattacaaaatattatagtcactctattgaattatcaaacactaggtcttacttcttctatctacctatatttttgtacccattattcaacctctcttcatccccctctcctccctacccttcccagcctctaataaccaccaaaatactctctatcttcatgagatccacttccttagctcccacatgagtaagaacatgcgatatttgtctttttg

SEQ ID NO: 429441 - DNA, 187 bp, Homo Sapiens
cacaattggcctcaatgagatcccaaatgtccatttgcagaatggacaaaaacagcatttccaaactgctgaatccatagaaaagtttaactctgtgagatgaatgaacacaacacaaagcaatttctcagaaattatctttctagtttttatctgcagatattttctttttcaccatggacctcaa

SEQ ID NO: 429442 - DNA, 128 bp, Homo Sapiens
tgacactgacaccccgcctcagtctagctttttttgcaggtcagcaatagtatccattaatggtgacaaattttatgatgagaaatttttaggaaagttaaaacatggcttttagggctgggcattgt

SEQ ID NO: 429443 - DNA, 389 bp, Homo Sapiens
  misc_feature (42)..(84): n is a, c, g, or t
gatttctttgacaatattcctaaaagtacagccatataggtnnnnnnnnnnnnnnnnnnnnnnnnnnnnnnnnnnnnnnnnnnnctggcataacaaccatatgaagcatgaaaacgttattgctctagttgaccaaggccctttcttaactatgcttttccttatagtacagccactaaaacaaaaacaagagtagctattctgtttctatgaaaaccagtgatataaatcctgttcatactacgttcccacaaggtcataagtgcagtgcatggtctatgaaacttgggaagcctttggtaatgccaacagtaaggtgagttagcccaccgagaactaaagctagctctgcaacactcagttacatctcccccacctccagaagctct

SEQ ID NO: 429444 - DNA, 438 bp, Homo Sapiens
tcattctgtttgataagagcaaccctgctgtgcccagagaggcatctgaagatgggtccctctatgcatgtttgcaggttggtggccttgccatcccactgaagatgccacatgctgaagggagtaaactgcagagcttttcaaggaggagagggaaaggccccataggcttccttgtgatgacaggttggaaaatatcaccaagatgtgaactgcagtcacagttacctccctgctcttccctgggcaaactgctcatccaagaccatcaggactctggcaacaccatccaccgggagggattcatgtcatagtcagcctgcaggtcacagtgatgcttaatttaagtccttaccaacaaaagggaaacagcagccacacaaacccttacttagcgccatcccatccaacctaccctgtggacctgaattctggagc

SEQ ID NO: 429445 - DNA, 374 bp, Homo Sapiens
attgtgtccatgccaggttttggtatcaggatgatgctaacatcatataatgagttggagaagagtccctatttccttaattttttgcaaagttccagcaggtatgatacagcctttcttttacatttagtgaaattcggtgtgaatatgtctggtcctcgactttttgtggttggtaggcaatttattactgactcaatttcagacctcatcattggcctgtttagatattcgatttcttccaggttcaggatagggagggtgtatgtgtcccggagtgtattcatttcgtttagattttctagtttgtgtgcatagagttcttcataatattctctgatggttatttttatttatgtggggtcagtgatagt

SEQ ID NO: 429446 - DNA, 376 bp, Homo Sapiens
gtatccggatgggctcattttatatgtgttttaaactctgagctagaaggcaacactactttcttgtgaagcacaccatctgtccttggccctagggagctcctgccgtcggtcactgggtcccctgatgcacccctttcaacagacttttcattttggggtacgtcctgacttcctggcactgcagggtgctccagcctcctcttgcattccctgccctggcccgggaatcagccccttctccaaggagccccgggtccttttattggcaagtcttaagagagtgaggcctgggtgcaggcagggagcccaggtccttttattgggaagtcttagagagtgaggcctgggtgcaggtgggtgcaggtgggtcggt

SEQ ID NO: 429447 - DNA, 322 bp, Homo Sapiens
aaagactgggtctccctctgtggcctaggctggagttcagtggtacagtcatagtgaggtaggaggcaggacttgactccagaggtggggctcagacaccggaccagactgagaactagcacaaacagggcctgggtggaagcagctttccaatcagacacaccccctggtgtgccgtggaacacctgggagttaccacccctttctatggaaatgacccgatgccccaaaagttactacctcttccctagaattttctgcataaaccgccctttaatctgcatgttattaaaggtgagtataaatgttattgcaaaactgc

SEQ ID NO: 429448 - DNA, 358 bp, Homo Sapiens
gcgcttctaccttcacgtggccatctatctgtccgtccgctttggcaccgcgccgagcccaccgcgccctccccaggcctctccgcggcggcctctcccttcgctgccgtcctggagcacgtggccaccatgccggctctcttcaacaccagacactcaacacctccaacgacggcaaacaaagagcctcgggttggtgtaacgacgcgccgaccagcagcaccagcgctgtcacacacagcggcagttcacacacaccggaacgaggggggtcgcggtggtgtataggacacaacagaccctattgagtcactccgtctagccaaatcttagtcaagagctcaaacgcagcacacag

SEQ ID NO: 429449 - DNA, 382 bp, Homo Sapiens
tcggacacaagagaatttattattttgagtaactaaaatgtctaggtcccggagtacagccaacttcaggcatggctgggagcaagggcccataggatgttgacagaaatctgtttcagtctctagactctgcttgcctttgtgatggtttcattttcccgaaagatctccccacgaggttgcaaagatggcctctagcagctccaagcttgcaggaactctggcaataaatgagctttttttccagtaatcccagcagaagttctggctcaaggctcattggaccactgtgattgatatgcccacctgtgaaccagtcacagaggtggaggttagatgatgttagaggtacaataaattgattggcagacctggggcttgg

SEQ ID NO: 429450 - DNA, 409 bp, Homo Sapiens
taaattttacacatttataaatctttcagctctttctgccttgctgtaaattacttccatgacagaggacctgggaggctggttttctaggatggtgggagggtcagggacagtgtgggggacacatggagaagggtggcctcaggggcttcacattgtggactgccacggtgatgggaaacttcacagatctctcttggcagacactctgctgtcctcaaggctgatcagctggctggcttgggagagagccaatgactggaggggactcaggaatcagaggtggtgactcatagtgggaggccacagtctcagagtctggttctctgaaaagaaccacgccttccgatggtgtttggcacttccattctgaagggcctgctggctctggggtccaccggggctgagg

SEQ ID NO: 429451 - DNA, 192 bp, Homo Sapiens
ccttttaggatcctttctttatctttgacctttcagagtttaattattaaatgccttgaggtagtcttctttgaatcaaatgtgctagatgttctataatcttcttgtacttgaatattgatatctttctctacatttgggaagttctctgtaataattatcactcattaacatcctttttattcaaagggg

SEQ ID NO: 429452 - DNA, 183 bp, Homo Sapiens
cttgtcacaagggtttcattcactgggggggatactcccctgttttaaaagatgcaaatcgagtgagggcagttttttcgggggggctgcgggagcatcggtttcgcatctctgggtatggggatggggtccccaagttcagatacccggttccttgggcctttcacggggagggccccttca

SEQ ID NO: 429453 - DNA, 137 bp, Homo Sapiens
tgacaccgactaagacttttgaatatttatatgagagcagctaaggaaagcactggggccagtgtaacttcactgagcttatggcctattgttggttaactcagggcaatcagatgaatatctctttggatcttgtc

SEQ ID NO: 429454 - DNA, 152 bp, Homo Sapiens
atgagctatcaatcacgcccgggctgccaatattccaactgaagtagcaagttgtttttactaatgattttatgaaactctcttgcaaacaagtacatcatagacaaattatgtctgcacaacttttagagttgtttaaagtaacctaatag

SEQ ID NO: 429455 - DNA, 129 bp, Homo Sapiens
ccctctagtgaggtgttttgctttacatgctctctaggccataaatatttgtttggatttttgagtcagtgtgaggctaagagcttacccaaatcctgaattaatctgaaagccaggttaaaggaaact

SEQ ID NO: 429456 - DNA, 381 bp, Homo Sapiens
actttaaaaaatatgataaactttatggtgagaacatatgatttactatgccaagctgttttgttgatttagcttccagatgagcacaaaaataaaaggcagaagtgaatagtttagatcagagagtagatattacaaaccaaatgacaaatataactcctgaaaaatatgaaatgcagtggttaaaattaaatttagacctaattcccttgggaattagctgtatgtagaacattgtatatagaacattgagataatctttggcataaaaagattgtctcattgtaatcaatccagtggaaaaggaaaagtaagatggcccttactcagccatctttctctgtgagcacacaggccattcatagaacaaacattgctttc

SEQ ID NO: 429457 - DNA, 196 bp, Homo Sapiens
ggaaaaacaagaagaaccgggttaagaagaaggccatgccgccaaacggcctggcgaagagaaagcccaggcacagttcattcccggcgggaagcgcttttaagttcaggcggcgggaaaattcccttggcggggcaacgtcatgattgtaagtttcacagattttaagccaggctactggcttggccttcgctat

SEQ ID NO: 429458 - DNA, 443 bp, Homo Sapiens
atttgacatttgcatttatttgataatagatactataaatatttcaatgtgtaatatcttatttcagacaatttctctttgcttctatacatttgaccatttttatttttcattctattagtttactaatttagtcattcctagtctttccaagaaacattttagtgattgtaaatagttaacatatattataattatacttatttgatattacaagaagggaggcttccaacatctggtcatacaccacatcctttatttccaaatagagctagagaacaatctctctttagctgtaagttaggatactcagccaggcaggcaatgtgaacttctatgatactgttattagaagcatttaagagcctattctacatatatgaatactaaataacagcagctattttagaagtgaatgcacatctcctgagtggggaaagggg

SEQ ID NO: 429459 - DNA, 133 bp, Homo Sapiens
acgttagtccgccatactcggtgtacgcgtaggttcagtaccatatggtggccattgatttgctggtaagggagggatacttgcgctcgtctgttatgtagaggatagctaaggatgagggtgccaggatgag

SEQ ID NO: 429460 - DNA, 200 bp, Homo Sapiens
atgagactgcaactggccacgccttttttttgtttaatgaaaccaatgacaatgtaaaagtctgtgctttagaagttcttcttaaagaacgatgaaactctttgatgaattaagatggaagattagctgagctgaacttactattgatagcgtgtaaactggttgcatctatttggagttcttactgtgaggagaggtct

SEQ ID NO: 429461 - DNA, 195 bp, Homo Sapiens
ggcacttagtaggtatatatattttggggtacatgaggtgttttgatacaggcatacaatgtgtaataataccatcatgaaaaatgaggtattcgtcccctcaagcatttattctttgtgttacaataatctaattatactcttttagttatttcataatgtacaattaaattactattcactatagtcctcctg

SEQ ID NO: 429462 - DNA, 259 bp, Homo Sapiens
aataactttttttcatttgggggaccgggccggtttccaacctcaaaacttcgggaactggtcctgcggtcccggaaaccttgggaacacttaaccactttaaacaccactttcttgcccaaaccccgaaactagccccctggaacaatttcaccgattttgaggcccctaaaaaagggggaaaggtttacaaaaaattttcctatggcgtccttcaaaagggttgtccttgcgaatttcagccaaatattccccgcgg

SEQ ID NO: 429463 - DNA, 160 bp, Homo Sapiens
gggaaaaggggtgtaggtgtcccctgtggaaaaaaatgggcaagggcattttaaaccttagggcgaagcctttaatcactggaccccgccaaaaggggatggccacggacaggtttaaaaaaagtagggtgggtggtgaaaataagtagggcaggagccc

SEQ ID NO: 429464 - DNA, 288 bp, Homo Sapiens
tacatgtctaactgtagtgatctggcaatgaacattcattgcaatggtgttgatcctaatatatgatatacttcaactctaccagactttttcattctccagccaactgtctcctgtcagcctttgtttgaaatttcttaacttctggggattgctgccaaactcttaataccatgaaccccgcattatctctgtaagatttaaatccctgcctgtatactccagctacccagctcatttctgagccctatcaagtagcaatgtttgtataagttgagactaaaaccg

SEQ ID NO: 429465 - DNA, 271 bp, Homo Sapiens
tggatgtgtcttatgctgggtttcatatcagagtaactggccttgtagaattagattagaagtattccctcctcctttagttttcagaatagtttgagtaggactggtgttacttcttaaatgtttggtaaaattcatcagtgaagccacggggtcccaggcttttctttactgggagaatttttattatggcttctatctcatttcttgttgttggtctgttcaggttttgtatttcttcctgagttaatttgtatgtgtctaggaattt

SEQ ID NO: 429466 - DNA, 495 bp, Homo Sapiens
taaaaaaagcaagtctggccggagtttaaaaccaaagacaaatcacattgtcctgcatctctcaaagagtttacagtttagctaggtaagaccagaagcacgtgaaaagtaaaatatgtatatcagacataaccaggtaatgtcagagtacaggaatggtacagatagtaaaagttaaatccctagtaaagagagagtggatggataatctgtaaactttgacacatacagctacttttctgacagaggaaagaatctgaccaccttcctggcatcttctaagaaaggcataggcaggtctatctacttcgttttctcttttgcctcatcacattccattgtgacctgtctagttcttctgcacactgtcatgcttaaatgttatttctcatgaacatatttaggttttcctgaggatatttctcagagtcctgagtcacataatcaggacagctgattagggctaagagagactgatatccaatcagagttgag

SEQ ID NO: 429467 - DNA, 371 bp, Homo Sapiens
ggccctgaaattctttatctccaggtcagaaggaaacacagagttgtccattaacaaattttttaaatataaactgcagacatacggggtgggtgtgtttgcaaactaaaaggagaatcccatgggcagataacttcattttaatgcaggtaacttttcagtttaatgatcggctttataaacccaggttatctgcagctgctgatatctgtacagaaggagaacattgctggaggcagaatggaatcagctgaaccaaaaatcccatttaatttactcccctaagtagtcactatcttgcagtaacgtcattcaacaaggtgttggctacctctagctaaggtgtttatttacaggatctaaatcagaac

SEQ ID NO: 429468 - DNA, 130 bp, Homo Sapiens
ctaagagcctttcagtggactgctgaatgaattagatctgctgtttcgaatgcgacccttctttgatggtgacaaaaaaggcgataccaggcctgaaaaccccacaggttttccccaggacttgattgga

SEQ ID NO: 429469 - DNA, 337 bp, Homo Sapiens
tgatggattgggttaatttgaaagctttgtcttcgagatctgaagttctctcttctgcttgtttgattctattactgagactttccagtgcattttgcatttctctaagtgtgtccttgatttcctgcggttgtgattttatttattcatgctatctacttcactgaagaatttaccgttcatatcctatatcatgtttctgatatctttaagttggactttacctttctctagtgcctccttgattagcttagtaattgaccttctgaattctttttctggcactgcagagatttcatcttggtttggatccattgctggtgagctggtatgatct

SEQ ID NO: 429470 - DNA, 111 bp, Homo Sapiens
tttatggccagaatccattttgattggccagtgccatctacattgttaagcattttgagtattagccccagttagcacacagtaaatgagagagggaagagagggaaatga

SEQ ID NO: 429471 - DNA, 160 bp, Homo Sapiens
tgcttgctacatcttgggcttgctctcctggggctggaacagttgggtcaggtccacgatggaattccgcaggacgttttccagaaaggaaggcaaatacgaattcattgcgttttccaggaattgaaacatcttggaagtctccaatcacatgcagacg

SEQ ID NO: 429472 - DNA, 193 bp, Homo Sapiens
acgaaaaattaaaacttctattaaagaatcatgctggaccacaagatcagggaggttgtaacattgcaactcgagtagatccagggggcttggaaaatggcgttctccaaaagggttcccaaaacaacccctccccgaatttctgtgacaaaatgtgggaaggctacttgccttggaaggtactatgggggaa

SEQ ID NO: 429473 - DNA, 132 bp, Homo Sapiens
ttagggagatagttggaattaggattaggattgttgtaaaatatagtacagatgacacttggtccaatgctgataaaagggtagattactggttgtccaccgactcacgttaaaatgaggaagtctgctgct

SEQ ID NO: 429474 - DNA, 193 bp, Homo Sapiens
gggaaccgattaattaggggaatcattcatttgccaaggcttccgattagtaggggattgactatgagcagggattttacaaatgcaattggcctgtgccaataagcttgaaaagtgattctgttccctggaagtttagcacggtctggccactttggagtcggataaaggaggttgagaagctttgcctagg

SEQ ID NO: 429475 - DNA, 273 bp, Homo Sapiens
caaagaaggctatccaaggtgctcggcctcacagttcatcaagaagacagaatcagagcacaggcagcctccactgcacgcccaccagaagacagagagcagcacatgctgggccggaagtggccgctaaccatgggcggccagtgagcacctgaagtgtggctggcatgagtgagtttagctggtacgaatgagtttaattggcatgagtgagtttagctggcatgagtgagtttagctgacatgagtgagttagctggcatgagtgagttt

SEQ ID NO: 429476 - DNA, 301 bp, Homo Sapiens
  misc_feature (86)..(109): n is a, c, g, or t
tgaactgtaagaactcttagatgacaaatgaaagaaattagctctttatcagtcatttgtgctatacatttttttccacagattgnnnnnnnnnnnnnnnnnnnnnnnnaagagatggggtctcactgtacatacatcacacattttaagagatggaatgcaatggtgtgatcatagttcactgtaatctcaacctcctaggctcaagcaatcttcttggctcagcctctcaagcagctgggactacaggtgcatgccaccacattggctaatttttaaattttttgttgagatggggacc

SEQ ID NO: 429477 - DNA, 316 bp, Homo Sapiens
tggtcttaagatttatcaaattatattactgaagctagtcttaaaatgatgtttgtggaattcaaaagtgttagatggttatgttaatagaagcaatagaaaaaaatctctgtatcaaataatggctatgattcaaaataatacattctaaaaagtatactcattttacaaataaataattctgaaatattaacaaaatacatttccaaatcacaacaggaggattaaaataagtgtgtatctaatagaagttatcatcaaaattttagattgggcagcctgtgagtctaaatctagaatatatgtttccttggac

SEQ ID NO: 429478 - DNA, 339 bp, Homo Sapiens
  misc_feature (251)..(286): n is a, c, g, or t
gtttgcttttttttctcttaaggatgtgactttaatgcttatagttaattatggcctaatttggttattggtgctttcaggggagaagactctgtaaaagttccttgattatagagagtctttgtacgatggctttctcacatgtgattgtagtaaaaatatgcttggtgtgtgagcaaatttactgtctcctatagggttggaatggtagaggtcttgaagcttatctcattccccctatggcatggacnnnnnnnnnnnnnnnnnnnnnnnnnnnnnnnnnnnnactagtttgatggctcagtcttcaggccagtagttgaagtatccctgagtaga

SEQ ID NO: 429479 - DNA, 328 bp, Homo Sapiens
agtgtgtaacttaaagagccatggccttacttgaaacagtttactcagaatcatttagatattttctaagtattcttcactataagctccttttggcatgcgataaaatgaaaatgggccaaggagaacctagagagaaaatacttattccttatccctgtgttacatttgggagaacttaaacagacctcggaatactgaaaagaaataattgccctgaagtaaaactggttagtatgttattagagatcctctatgctagcaacagaatttgggaaaatagaaagaaaatagaactggaattcatagcacgacattcagatagtta

SEQ ID NO: 429480 - DNA, 303 bp, Homo Sapiens
cattctatcttgtgccagatctacaccgctgtgacatggattaaattccataatcagtccccaagaggaagcccacacaaagcaacaatcaaatttatgcatcatcatcaaatgatgcgtccacaaactaataacttaacctgatacagtcgtcatatggtagttttggggagggctcattctgcccaagagaaagttcctccttaacgctgagtaagctgtctaaacaattgcacgtaggtgaagatatgagtgctaactccagctggtagaggcttcatacagcacaaaagatggaagcca

SEQ ID NO: 429481 - DNA, 100 bp, Homo Sapiens
ttattgccagtgttgttcggactggtctcgaactcctgacgtgaggtgatctggccaccgtcagcgtcgcagagtggtgtggttataggcgtgagccacc

SEQ ID NO: 429482 - DNA, 409 bp, Homo Sapiens
cggggggttcccgagtttaattggggcacacccggacgagggccccgcacccaaaaaaaggtgttgggccccctgggggggaaacggggcgtgtgctgacggctcaggacccggtgtggcaacgggaacttgatcctggagcctgggaactgctttaaaaccggccgggacactggcgggccgcaatctcccccaccttcaagaactgaatggagtgggcccgggcgcggttccgggcacccaatgtcccggaaacacggggagaaaacccccgcggtggtcaggtcccggaaatcccggtaaaagttgtggatgcccccccggaatcaaagcgcccacagatcccgaaatttctcacccccagggtgaactttacaaaaaccggccaaagtagaaaatcccccccgaa

SEQ ID NO: 429483 - DNA, 136 bp, Homo Sapiens
gctatacaatttgcacactgtgagtcatgcaagctcaataccgtgtgttcagaatgagaaacttgtcttgtttcatttttgtatgttcccagtgcaaggtaagtttcttatacatttaagtgcacataaaatattt

SEQ ID NO: 429484 - DNA, 290 bp, Homo Sapiens
ggaaaagaaatattcctaataattcatttaatcatctggagagtgggttgaagttttgtaaaatttaatttcttcattatagactgtattattttaataaaagcttttctttggtgtcacccattgtgtgcagcactgagctggggccctggagctctcactattgtccatctggccgcaccactgtcagcactgctttcaatgaactgtaacagaatactgatgactcagcatttctgctgctgacaggaagtccctgagcgagtctctttgtagttcctccaagaaag

SEQ ID NO: 429485 - DNA, 458 bp, Homo Sapiens
tgcaaaacagtttattgcagggttcagagggcccttcagctccggaaagccgaaggggtatggagactgatgaggtcagatgctgatacccaaagtttatagggatatgggatcttggctatgattgaggaccatggcagatgagtgagtaagaggagtgctgatacaggagcttcaatgattacaaccacgtggcctggaccctccggattctgtggagggtctcgtcgttgatctctgatgtctcgtgtcactatatgtgacatgtttccaggagtctgcccatacctgcaatttgaaataatctgtggaatatagaattgtgaggttacagtcggattaaaggcacctgccttccaatgtggtaaaaatttttcgcagtttcgatactaggaacggtcaataggggttaccacagcataggctacgttgcaaaatttctacgatggaaggttatt

SEQ ID NO: 429486 - DNA, 411 bp, Homo Sapiens
atggtagtttggtaggaatagcattgaatctgtagattggtttgggcaatatgtgcattttaatcatattgattctttaattcacgagcatggaatagttttccatttgtttgtgtcatttatgatttcttttagagtgtttcgtaattctccttgtggagaccttttatctccttgcttaaatgtattcctaagtattttgtctttttgtggctatagtaaataggattgcattattgatttgggtttcagcttgaacgttattgttctatagagatgctactgattttagtacattgattttgtattttaaaacattactgaagttatcggtcccagtagttttttcacagactctttagggttctctgggtacagaatcatatcatcagtgaagagagacagtttttc

SEQ ID NO: 429487 - DNA, 138 bp, Homo Sapiens
ccaattttaaccccacatgctctagttttggccggcagtcttttgtcccgacttaagcaatggtgaggcagaataccctttcctcggggaagagaaactccatggtttgattgacccttgaccaaattaaccagaaat

SEQ ID NO: 429488 - DNA, 436 bp, Homo Sapiens
ccattggtttgtctttgttcagttgttcaattattccttaaatgttgatgtttcttggccttcttacatcagggctgacaaataggttatacttacacttctgtattactggcagttccctgaaaggactggatttgaaaggattttgagtggtgtcctacccagtgggtaggaatactgggatctgcataggtaggaaggaagggataacagaacatgtgtcacatctttgccatccctgctgtcttcttcttgggtactttaactgagattcatggcttctactatcacttacatgccgaaacatttaaatctctttatttagccaagatcttgccacttggcagttctttatatccatcttccttttacatagctccgcttggcatcccaccagcacctcagactcatgatgaggattgagcttatcactttg

SEQ ID NO: 429489 - DNA, 223 bp, Homo Sapiens
ccgcagctggagactctaggctctcgagtagacactggcatgaaatgccttcatcgtccggggtgacaggacttcatgtgtacacacacaggatctcagccgggaagacactggactgcaagggctggtcattgacatcgttgtagggggatctcgatcgtgcttcagtgcaacttacagtccgctataccgcaccacgtctcaggcacttgctgactgctca

SEQ ID NO: 429490 - DNA, 113 bp, Homo Sapiens
aagccactgtgattttgagcattatttgttacagcaaccagcatcaccttaaataatgtaacatcatacatgtgtgatcaaaaacttgactttatatcacttaccataatctc

SEQ ID NO: 429491 - DNA, 334 bp, Homo Sapiens
gtgttttttttgtagggttgaggggtaacatgtaatgggaagtagtgcttttgtccttttgtagccgtggacatcatgacaggaagagcatggattatgtgcttgtgtgttgacagtgccttaacgctgtttaccagcatttcatacacaatagtctggggtatttcctataatcctcacagtcattattatttcaattcagtcacgaggcagtggtggccagagagggtaaatgagtagttcaagaggactttaataaataactttgcatcctttctttctaattttgtacctgtctttatcttatctgcaaagtattagtagataagataaa

SEQ ID NO: 429492 - DNA, 205 bp, Homo Sapiens
aatgctaggcttgtacaggcttacttaaccttaatgaatacgctgataatctgtaagtggaggcagaagggaactgttatctcccaagattaagcttcacttttacaaaagtatgatatatgtgattttttcttatacctgtgcatacatttgtgattgcccatgtactctgggcacatttcactaaaattgtctggactataaa

SEQ ID NO: 429493 - DNA, 242 bp, Homo Sapiens
  misc_feature (65)..(73): n is a, c, g, or t
atagacttctggctattttaaaaccatagattaaggaaggattattataaattgcagttcaagcnnnnnnnnnatcttagagcactataactgaatgtctttgttgtatcattgtaaacacagcaataaatatgcagttcttccctccctttttctccaccagatgttaacagggaacgacatgaagacttttacgcagagcttaaaacagtcaaccctctctgttcttacaagtttttgcc

SEQ ID NO: 429494 - DNA, 106 bp, Homo Sapiens
ccgcacctggccaaaagcatggactttctaattggcctgcttgggtttgaatccagggcccacaacttccgtttcagtgacttaactatttcttaattttgctgtg

SEQ ID NO: 429495 - DNA, 131 bp, Homo Sapiens
ggggttattccagaatgatgttaatgtgccagagatgaggaatgaaacataggttaatcattcacatagggattaaaagtaggtattcatatgtatagctacacgtgacattaggtgttctacaggcaatg

SEQ ID NO: 429496 - DNA, 162 bp, Homo Sapiens
taatagtctttctgaatacagaggagctagtgaaaaacttgtctggatggtgaaagtgaagggaagtttcatctcaatgtagacaacatattgctgaaggatgtctcaggacacccagtgggaccaaaggtcacaaaaaggtggctcactctcattttcagc

SEQ ID NO: 429497 - DNA, 279 bp, Homo Sapiens
  misc_feature (62)..(70): n is a, c, g, or t
cctgtgcatctgccatagatattacagcttactttttcttgactggtattttcaatgagacnnnnnnnnncttaaagggccaagattttttcttaaagggccaagatatttaagtcatttgagataagaagttcaatttcttctttttataagaattgtctcatatttaaaatataagtacttatttatttttataagtcaattagaacaataatgcgttcaaatttaagagtttttgtaatctgagttatcagtttttcctggatgtaaacaaagaca

SEQ ID NO: 429498 - DNA, 138 bp, Homo Sapiens
accacaccaggtgactttccacaccagctcctttccaggggatgggggcccaagggactccttcaactcactcccaaggagaactccaatttgataaacaggcatcagagtttgcaaataccaagttaggaaaatatc

SEQ ID NO: 429499 - DNA, 173 bp, Homo Sapiens
gatagttctattgttatgactgtgtcttaatcttcactaatctttgtcctttgtagtatttaacctgcctttagtcccatccagtgtatttttcatctaaaatgttttaggtttcatctctagaatttcaacttcggacttcaacaaatgttttccaggcaggcccagtggcg

SEQ ID NO: 429500 - DNA, 464 bp, Homo Sapiens
  misc_feature (116)..(132): n is a, c, g, or t
gtgggggatgactttctctctgcgttggctggcttgtgaactccatgagggcagaggtgtgcctcattcattttgtatcccagaacataataggcattgaagtacctggtggacannnnnnnnnnnnnnnnngctcttcttcctaaatactgagttctctgtagagtagttattctgacgatgactgatgaagcatttccaaaccattctcaaagaggcatatggaggcatattatctggccaaacataaaagtatttctatatatcaggatctcgtgctcaccctcagctatcatcactgcctttcatcacttggtaaagacagtttctgattttgattagggcagagtattcccaactaatacatgaaaatttctgttgccatggacagggtcttttgtaaagacaggcacaggcacattttccacaagtatgttcctgtcagtgtaatcattcactatttg

SEQ ID NO: 429501 - DNA, 191 bp, Homo Sapiens
gttttgtgtatcccttgtaaattttggcatttgtcatcaacctgagacttagcatatatgaccttataatctattattttaagatgataatgatgctatttggatgaacaaagaagcaaaaagacaactaatagaaactctataccttaactttgttcccccaatttttaactttttcttgttttcattta

SEQ ID NO: 429502 - DNA, 363 bp, Homo Sapiens
caccacgtagtcatggccgatcacatcgcgcttacccttggagcggccgatgatgctgacattcaagtcagtcgccagctggtttgcggcggtgtgccaatgctcgtccagcgggcggtgatagcacagggtgatcatcgcgtcgccggccagggtggtgaggaactccacctggaacagcttatggctcagggcggcgctggcttgcaggcggccttgagctgcggcatcaactggttgatggcaggctggcgatgggaaattcttcgatcaggatcggcgtgcgcttgtcgtcctgggagaacatcgcgtagtggcgctcaccgccttcgcgccacagacgaaactccgcgcgcaggcgaa

SEQ ID NO: 429503 - DNA, 161 bp, Homo Sapiens
  misc_feature (74)..(100): n is a, c, g, or t
gaatttaatagatacttcacagttcaaaatatcagaaagataaatatcaagatatcacagaccttttctcaccnnnnnnnnnnnnnnnnnnnnnnnnnnncaaatgtagatgtttttctcccttatttcacaacagtaaactataatgattaaaaccatgt

SEQ ID NO: 429504 - DNA, 348 bp, Homo Sapiens
  misc_feature (269)..(269): n is a, c, g, or t
gacaaataatagtacatatttatggggtataatgtcatatttcaatgcatgtatatattgtataatgatcaaatcagggtaattagcaaatctttcacctcaaacattgatcctttcattgtggttagaacattcagcatcctcttgtgtagctatttgaaatatacaatgaattattgttaaacacaatcaccctactgtgcaatagaacccaggacttattcctctatctaagtgcactttgtacctgttgaccgactttcccatcnccctccctggctatatttctttactttatctttcaatgttggagacaatatctagtggagtattttaatttcaaaatgt

SEQ ID NO: 429505 - DNA, 124 bp, Homo Sapiens
gtccaagtgaaaaaatacacagtctgggggttagagtggactgagaagcatagtaatcatttttagaactctttctcaagctcatgcaatcatctaacaatactcttgacgggcttgtaatcaa

SEQ ID NO: 429506 - DNA, 210 bp, Homo Sapiens
ctgacaaattatctgcttatgaagggtaaattactttgagttggattctttttgcttttgcccaggctctgctttctactaagtagctcttgactaaattgcctgcttctggctattttcaaccacttttgttttaacccaacggtctgttttcggttcaattgtcttctcctttttgacccaattatctatcagctttagcgcattggt

SEQ ID NO: 429507 - DNA, 304 bp, Homo Sapiens
agcagaagtaaggagtcactttcattgcagtgggatacactgcctggggttgcaggagtggtaatgggaaaactcccttagctgcctttgctattgtctccctaggtcacatgccactctaatccactcactctgagccaagcccagcactagcagttggctatgaattgtagtccttatgtcctagactgcttttcaagtttacctaggacactagagcactttgtccctcagtggcaagacattcaagttccaaccattgacatattcaattctcatctgggtagatatggcctaaatgtcc

SEQ ID NO: 429508 - DNA, 317 bp, Homo Sapiens
  misc_feature (52)..(256): n is a, c, g, or t
aattactattgcgttattagtgatacctttttttaagtagtttgtttagtannnnnnnnnnnnnnnnnnnnnnnnnnnnnnnnnnnnnnnnnnnnnnnnnnnnnnnnnnnnnnnnnnnnnnnnnnnnnnnnnnnnnnnnnnnnnnnnnnnnnnnnnnnnnnnnnnnnnnnnnnnnnnnnnnnnnnnnnnnnnnnnnnnnnnnnnnnnnnnnnnnnnnnnnnnnnnnnnnnnnnnnnnnnnnnnnnnnnnnnnnnnnggtgactgtagggtttctaatattattgttaacttctcatgatctacattgaaaatggtgt

SEQ ID NO: 429509 - DNA, 510 bp, Homo Sapiens
ttcaatgcaaatagaagtttattattgcaagggcaactgttaaaaaaaacttcttattcacaacaggctgtgtgacataggcctttaacatggggccaatgtcgctaagaagttgaaaatacagtattacaaaatcagtagaaaacaagcaacaaaacaaaagtgtctatcttcttttctttgtccaacatgtttgggtagtagtattgaaggagctctgtgacaagtgcaaatgattgtaaaatgaatcagctctgctcagcatatacacagagactataaagttacttatacaaatatagctctactgtgttaattgccacaggacttagataggtatggcagaaagatggccagatttagatgacctagacactgatgtcacactaaactcttggaattggcttcttggctttcctctctgacaagtgactgaaatgggggtagggttgaattttatgaagatgtgacacttaacccaccacacacacgcacaaattattgtatttc

SEQ ID NO: 429510 - DNA, 396 bp, Homo Sapiens
gctattatacatggcattgctttcttaatgtcttttttgaatagttcattgttagtatatggaaacacaactaatttttatatgttaatgttatatcctgcaattttactgaattaatttattagttctaccagttttgttggtggagtctttagagttttctatatgtaagatgacgtcatctgcaaacagagacaattgccttcttcttttatgtttcggatggttttggtttctttttctttcctagttgctctggctagaactttcagtgctatggtgaatagaattagtgagagtgggcattcttgtcttgttcctaatcttgttgggcaagcttttagcttttcaatgtttgatgtcagctgtgggcttctgatatatgactttcattgt

SEQ ID NO: 429511 - DNA, 280 bp, Homo Sapiens
  misc_feature (191)..(236): n is a, c, g, or t
tctcttgacctcgtgatatgcccgccgacgaccacccaaagtgctgggatgacaggagtgacgatagaacccggcccatggtggattctaatatgattgggacacggagcacagcctcccaaatgacttggccagaatcttatcccaaaggtttactgtgaaagagacttgagagtgatctccagtttcannnnnnnnnnnnnnnnnnnnnnnnnnnnnnnnnnnnnnnnnnnnnntggtaaagctttgccacagagaattgttgggagcatgaataagt

SEQ ID NO: 429512 - DNA, 182 bp, Homo Sapiens
gtgtgagccaacacacggccaagttcccttttttatgtaagccagtctgaggtggagttttgtcacttgcagcattagaatttatctacaaaacatgtgataaatgacagtagcaataaactgtcttgcttattcaaaacactgattcagtgttgactgccaaaacattcagtaagacaagg

SEQ ID NO: 429513 - DNA, 350 bp, Homo Sapiens
atttcaccagtcagttaaactcactgtaagtcttgtcttactctgtggttggtggttcagttcagctctttaagcctttactgtgctactttgagtttgtcctgcatatacgtgaatcaaaggtcagtcggagagtagtggggtttagatagaatttggggattatcttctctgggtctcttccttctggaatttctctctcacttctcagtgatgtttgttgtctgggctcctttccctgattcttctggctagaatgatgaagggcttctatcaatgtttttgacacttgcactatgccatttctgcagttatggactgtgtttgaagaaaaaccacaataaacctgg

SEQ ID NO: 429514 - DNA, 139 bp, Homo Sapiens
gcctgtgggtgcgtgagtagtttgagtttgctaggcagaataatactgaagatataagcgcgtggcgacttatgacgatgactgcagaggtgaagattcagggggtttggaagagaatgactgttaatacgaaggatat

SEQ ID NO: 429515 - DNA, 243 bp, Homo Sapiens
tgacactgcacccagccaaagttcaaggattttgagatggaatttgcctgagcagagagtatcagtgagagggaatctatatagagaaaacgttccagaaatctgaaatggggtcctctcaagtcactgaagactaaatcgtgaacatgaggctaaagaatgtatgaggccaaggaaataatgactacaaaagtagagaacaactttccaagagcagtcagaacccacatgggctggtgagca

SEQ ID NO: 429516 - DNA, 260 bp, Homo Sapiens
ataagcagctatgcccagcccagaagtattttataggatgaagaaaagagtcgtaagacaactattcatctaagacacagatgttctcaatacaggatctagtaaatcactacttcatttttgccattagaaagtagatgtaactattgtgatatcatgcctgtttgctaggcacctttctgaaagtgcactaagccacagaggaggaaagcagtcccttggcttccgtctacttggatgcatgtgatgtgtgtggcaca

SEQ ID NO: 429517 - DNA, 160 bp, Homo Sapiens
atgtgttaccgatcaggaggtcgtgcttgataaggtagcgctggcagctctcataaagcttgttgctgattgcagtgcggtgatggtagactatacaggcggagggttgcacagagagggttacacgagcaggatggctggcgcaaataagggccacctt

SEQ ID NO: 429518 - DNA, 410 bp, Homo Sapiens
  misc_feature (88)..(273): n is a, c, g, or t
caactgacttttaatccaacatcaagactgaatttgtgagaactttaaccagcagttactcaaggaaatgcttatcgtgtagtagtcnnnnnnnnnnnnnnnnnnnnnnnnnnnnnnnnnnnnnnnnnnnnnnnnnnnnnnnnnnnnnnnnnnnnnnnnnnnnnnnnnnnnnnnnnnnnnnnnnnnnnnnnnnnnnnnnnnnnnnnnnnnnnnnnnnnnnnnnnnnnnnnnnnnnnnnnnnnnnnnnnnnnnnnnnnnnnnnnnnnnnnnnnnagtctagtttatgatgactacgctgatctttcaattctaggttgtcttctggtccactttttcgtgtctctttatggataaactttccaggaatggtcattttcttatgtcaggaattaggtgaccttctgttattc

SEQ ID NO: 429519 - DNA, 487 bp, Homo Sapiens
actcctggactcagcaatcctcttgactcagtctcccaaagtgctgcaagtacaggcatgagctaccttactcagcccattgcatgaagttttaaaaaccatgagtgaaaatagctgcagaaaatcatacatattttcaatttaatataaatatgaaatcatcctggaaatgtcatgcctagttttctaattaaagcatattttatgacttttaattatttaatgccttttgtagggtaaaagcccctgatagcaataacttaaacatatatttagaatgaccccagattgatgatgcacctgaatgtgtgtcctgagctagggaatccaggagtggccaatccggagattcattccttgtctatgagaaacatctgagcccccaacctgtccaatggaacatgggctgtacaggggattgatgccctgaattttgggttaaatggaggctgccaggtggagatcgttaaggggagggtgttaaatg

SEQ ID NO: 429520 - DNA, 411 bp, Homo Sapiens
  misc_feature (356)..(364): n is a, c, g, or t
gcagattatcagtgagctaagataatctgctgtttaccctcacctatttggaacacaggcaactgaattaattgaatcagcaataggcatggggtagtgactttgtatattttcattttagagccaaaagccagtgagttttagattagctttatagtaatattaaaaacttcatcttttatttttacaaatgtagccaagaaacatcattgctgttaaaatcattcagaaaaggaggctacttgctctttattgatttagtcattctgctcttggagtgagtagaaagtctttgaaagcttttcaaaaattagcgagtgatgaattttatgaattagtcacttctttgcagcagnnnnnnnnnatctctacctctgtaggacatagttcctgggccagaagccagatttc

SEQ ID NO: 429521 - DNA, 241 bp, Homo Sapiens
accaaagaaaaatatttgctaacttatttgtggtgatgagtataaatgtacactacatggtagttctagctgcagaggaccatggatcatcagttgtatatacaatatggccaattggtttggctaaaaagcttgtttagaactgttttcttgctgaaaaagatcttgtcttaaacagtaacaacgcttactgaatgttttttgctaaaactgaatgtttcaaataaaccaaatttttgcc

SEQ ID NO: 429522 - DNA, 293 bp, Homo Sapiens
atggggcacaatcaacacatttctaagccatcattaaaactggttactagaataattaaaatagaaattgaaacaaggtggcaaaagaagcacaaagccaaaactgcaactccaagggaaaattaaatatgggatcatataataatcattggaagagcctaccacaccaagaaaacacctatttctgtaagttatttttctgcagacaggccaccgtggactcttgcaatgcaaattgtatcccataattatgagcgtatgttatattcatgattcatgaaaatcacatggga

SEQ ID NO: 429523 - DNA, 228 bp, Homo Sapiens
tgaggttaatcgtgtgaccgctttggctcgcacgaaattcaccaaccctacgctaagtatagcttagtcagactttcgtgcctcgctagagggcaatcactgctgctacccgtagggcagtggctaagctaaccgtcactgaactgcattgctgcgagtcccaatgctagtccctactaatcgaagtcatttccagtctgaactctctggaaacggggatgcttgcat

SEQ ID NO: 429524 - DNA, 290 bp, Homo Sapiens
  misc_feature (49)..(61): n is a, c, g, or t
cgatagccttataatacagtttgaagtcaggtagtgggagggccgccgnnnnnnnnnnnnnccttaggattgctttggctattcaggctcttttttggttccatatgaatgttagagtagttttttctaattctgtgaagaatgatgctggtagtttgataggaatagtgttgaatctgtagattgcttagggcagtatggctattttaacagtattgattcttccaatccataagtatggaatgttttttccatttattagtgtcatcactgatttctttcagcaatgt

SEQ ID NO: 429525 - DNA, 205 bp, Homo Sapiens
ccagtacaacacggaccagcccacgcctgcgaagacagaaggacacgaagaccaggtcctcatcacagcacaccctgacccgggtaacagcagatttccagatccaagaaacaacacctcctccaaacccgaccactcacggaaagaagcaagcgacccccagccagaagaagcagatggaggtctgaagtcttggagagactct

SEQ ID NO: 429526 - DNA, 313 bp, Homo Sapiens
  misc_feature (71)..(111): n is a, c, g, or t
  misc_feature (259)..(259): n is a, c, g, or t
  misc_feature (301)..(301): n is a, c, g, or t
tccaacaggaagaatggaaagtctaagatataagaagcaataatgagtaaagaaagtggcaatatttgggnnnnnnnnnnnnnnnnnnnnnnnnnnnnnnnnnnnnnnnnnaagtgggaatatttgtgttaatctaagtattaattgcttgaaataataatgtctcataactttaaaagtttggcagaaaatatgtgaaaatatagcagatcagtcaaaaaaggacaacttccaaatttttgtactggaaatccttggnatagttggggaaaaaggaaaaaggatacctataaaacttaantttggataagtt

SEQ ID NO: 429527 - DNA, 359 bp, Homo Sapiens
  misc_feature (49)..(182): n is a, c, g, or t
  misc_feature (255)..(255): n is a, c, g, or t
  misc_feature (294)..(294): n is a, c, g, or t
  misc_feature (323)..(323): n is a, c, g, or t
  misc_feature (332)..(332): n is a, c, g, or t
aataggaaaccatgatttcctgtgatacagattattacctaatgaattnnnnnnnnnnnnnnnnnnnnnnnnnnnnnnnnnnnnnnnnnnnnnnnnnnnnnnnnnnnnnnnnnnnnnnnnnnnnnnnnnnnnnnnnnnnnnnnnnnnnnnnnnnnnnnnnnnnnnnnnnnnnnnnnnnnnnnaaacatcattagtaatgggacacacagaaaccatgggccacttcatagggtacagtaagaagttggctactgngatagtcctggccaaaggtggtacagctggctctaatcncgggggaaacattaggaccaaatcccaantggaggggncgttatttttaaaaattacagtccttg

SEQ ID NO: 429528 - DNA, 272 bp, Homo Sapiens
  misc_feature (168)..(168): n is a, c, g, or t
tactataccagcctaaataataaagaaccagccaccaggtttcagtggaaagtattgcctcagggaatgcttaataattcaactatttgtcagactttcatagctcaagctctgcaaccagttagagacaagttttcagactgttatatcgttcattatgttgatatnttgtgtgctgcagaaacgagagacaaattaattgaccgttacacatttctcagacagaggttgccaacgcgggactggacaatagcatctgataagattcaaac

SEQ ID NO: 429529 - DNA, 161 bp, Homo Sapiens
  misc_feature (148)..(148): n is a, c, g, or t
catagaacctcagagcttcacccctggagaaggcttgagtccctagaatcagtggacttgaagagaccatagtagacctggagagtgggcatcttggcattaactggtacagaccaacactgggaggtaggggaatagaaacacaggnattacaaagaatt

SEQ ID NO: 429530 - DNA, 298 bp, Homo Sapiens
  misc_feature (59)..(61): n is a, c, g, or t
  misc_feature (164)..(164): n is a, c, g, or t
  misc_feature (229)..(229): n is a, c, g, or t
  misc_feature (284)..(284): n is a, c, g, or t
tacacaggtgacagatgaataacagaaataggaaccagcaagggaaaaattagagggannngctgccaccggtaggcctgaagaacaaaaggaagaggccaacttatcacggcaggcattagttccacctggatatttccccgtcacattccctctggtgccanctggtcactgcaatggtcagctccccctgcagagcccctactgcttggggaccacttgggtgggncaggtgttggcgcagagcagttgttccagagctgtggctaagagccagttgtttntcctcaagggtact

SEQ ID NO: 429531 - DNA, 345 bp, Homo Sapiens
  misc_feature (35)..(35): n is a, c, g, or t
  misc_feature (39)..(39): n is a, c, g, or t
  misc_feature (131)..(131): n is a, c, g, or t
  misc_feature (292)..(292): n is a, c, g, or t
  misc_feature (297)..(297): n is a, c, g, or t
  misc_feature (325)..(325): n is a, c, g, or t
agatgaggaaatacagactaagaagtctaccagcnaganggcaagaacccaggacttaacactcattcttctgattaatccatccataagaactccctgagcaccaaggtgatgttttaacttcatgttanaaacccaggcctcctttatacagttcaagaagcagaaaatcaaggtcttttagcctcttatctagcacacttggtggccttaagtattttgagtttatgttgctttaaattgcacagtttaattgctctcagttccctaacacttaatttttttacatttnatatnttttttcagtaacacccggaaaaaacangaaagtagggaaacttgtct

SEQ ID NO: 429532 - DNA, 290 bp, Homo Sapiens
  misc_feature (257)..(257): n is a, c, g, or t
  misc_feature (270)..(270): n is a, c, g, or t
caactccatcatgcaagactgacagggaagaatcacaacatgtaaaagctaaaagaaaccccttatacagtccagtgcttacaacctttaaaacacattaaaagcttgaggaatttgttaacatgcaaattcccaggcctaaccacagagacactgatttagatgatatggggtagatcccagtaaagcagcccaggtgtttttgaaatagatggatcatgaaccaaactttaggaaataacaatatactgcctcanttttagattaagnaatttaaactcagagagctt

SEQ ID NO: 429533 - DNA, 263 bp, Homo Sapiens
  misc_feature (100)..(215): n is a, c, g, or t
aaaggtggttatagatcataaatagacacggatgggggatgaatatcctacagcaattcgaagatattagtaagtttgggaattagaatctggagaagannnnnnnnnnnnnnnnnnnnnnnnnnnnnnnnnnnnnnnnnnnnnnnnnnnnnnnnnnnnnnnnnnnnnnnnnnnnnnnnnnnnnnnnnnnnnnnnnnnnnnnnnnnnnnnnnnnnatgtcacagaactcttcctatatggctggtgtcaacactgggttgcta

SEQ ID NO: 429534 - DNA, 326 bp, Homo Sapiens
  misc_feature (270)..(270): n is a, c, g, or t
ggaaagaaattccaccagggcacaaatgccaggagatgggtatcagtggagaccatctgagaagtccgcctactaaggctttccatgtctacctccgaacaagggaatctatcatgattattgcatgtgccctgagcactgggtttagatgacattaagcagaatcaaggtaattcttcaggaaaccttcagcgggagagtctgccctgtgtctagtttctcttttgcttcagaaaatacttacttgaattgtttctaacttaataatantttgtggttacctgaggggtctctaaaggcttggtaagcatcagaaacaaaaaatt

SEQ ID NO: 429535 - DNA, 375 bp, Homo Sapiens
  misc_feature (263)..(263): n is a, c, g, or t
  misc_feature (285)..(285): n is a, c, g, or t
  misc_feature (291)..(291): n is a, c, g, or t
  misc_feature (296)..(296): n is a, c, g, or t
  misc_feature (359)..(359): n is a, c, g, or t
gcttaacatggtgcattagaatcttaggagtaaaatatccctcacaaaatttgatatcttatctgattagttaatacagacatattacatttttcaactaattttttttcttaagaagaattctttcagaaatggagaagcatgtagtaacatactgattttaaggaacctatgctaacaattttaagtagtaaaacttaaaactaaacttaagaagtaataaaaaggtgataataggataattactatttgggcatcctacnaagatatttagttgggcaattnaatttnaaatntacctgggttttctctggatattcacatattattaaatggcaatttccatttaaagcggctcnactaaagtggttaggg

SEQ ID NO: 429536 - DNA, 360 bp, Homo Sapiens
  misc_feature (346)..(346): n is a, c, g, or t
tgtgttgagtgtagggaagttaggaaggttcaagtcaagcagggctgtgtgggaacaaaatttagggttgaggacgagctgcaagactagaagattctggagacatgagcagccccacatgccaacacagctgtaggcagagtaaggctgggtactcagaaaggctataccagcagggtttgtcaaaaggttaagtaggaccagatagtcttagaagcccagatgaaaccttcttcagagggaaaattcttcagcggttatttatttatttccaggttgttttccacctttccaatggtgccaagttggcaacaaagtgaaaactagacccccaaaaaataattcncccatttctaaact

SEQ ID NO: 429537 - DNA, 365 bp, Homo Sapiens
  misc_feature (284)..(284): n is a, c, g, or t
  misc_feature (307)..(307): n is a, c, g, or t
gggctatatctgttcttgccatcttaattggctaccaatcaaagacgtcaataaaagcataaatgtaaatgaaaactcttgagctagccctggtttttaacaccaattttttatgatggattcacaggtgaatagtttcccttctccaccaagacttacattattagaactgtaagaggcagcaaaagtgttaaacaggatggattgtacaaagcattaggctaaaactggatattcattttctgcgtaactgaacaatggcataaaaccagtgtcttggggangtctagaagagcagtcattctgnctttggatttttggaatcacgtaattttcagggatggagttcaaggtacagttaattt

SEQ ID NO: 429538 - DNA, 387 bp, Homo Sapiens
  misc_feature (257)..(257): n is a, c, g, or t
  misc_feature (267)..(267): n is a, c, g, or t
  misc_feature (298)..(298): n is a, c, g, or t
  misc_feature (313)..(313): n is a, c, g, or t
  misc_feature (355)..(355): n is a, c, g, or t
catgtcctaatatagtcaaagtttggggctctgcactgtgcaactctgttttacacatgagggaatggagactcagaatccttagccacacagcttgcaggaggcaggatggtgcctcagcctcaggccttcagagtcttcctctggtgggcttctccccaagcaagacagagtcctggagacttcataaaagtgttatgctggcaggagattgctggtgtgcccgtggggttggaggtagactggactccagggancaggaacggnctttcagtaatttatccctggttagagctgnacctttttcacacanttggtgggcaaggactcattttcaatctggccaaagtggggnagtttttcaggagtaatggagtaaaggtcgta

SEQ ID NO: 429539 - DNA, 451 bp, Homo Sapiens
  misc_feature (13)..(13): n is a, c, g, or t
  misc_feature (376)..(376): n is a, c, g, or t
  misc_feature (391)..(391): n is a, c, g, or t
  misc_feature (438)..(438): n is a, c, g, or t
taatttggaaaancatttttaattaagctgagcatgccttaaaaaaatccttttaactcccttactatctgactctagcagtgccaagtggccaatatttatggctttcaaactttattaaaggctcacagaagggaaaatccaaagtggttcgtggaggggaagagaattaacagatagcaaaggtcgcacagatatcaaaccagaaagcactcattccctaagctgggattgaacccagggccgccattgtaaaatggcagcaggctagaacaaaatattgccaggtggttgtaggtcttggtttcaaggacttaaaacaagatgggagggcctgcggaaaagtttgctaggggaccatatagaaagttcaggncaaaacacaccagantgggctatagttttaagggccaacctcacaaatcctttcttacattnaaaactctaccgt

SEQ ID NO: 429540 - DNA, 356 bp, Homo Sapiens
  misc_feature (148)..(149): n is a, c, g, or t
gggatacagaatacttcaacacatgtatacactatgtaaggataaaatcagagtaattagcatatccatcatctcaaacatgtattatttatgttgtaaacattcagaattttctcttctagctttttgaaaatacacactaaattannattaattatattcactctacaatgctacaaaatactataacttattcctcccatagagctataattttgtatgcataaccaacctctccctatcttcctctctctactactctactcaggcacttaataaccacagttctactctctaccttttataaggctcaattttttcaactcccaggataagagtggagaacatgtgatggt

SEQ ID NO: 429541 - DNA, 278 bp, Homo Sapiens
  misc_feature (13)..(13): n is a, c, g, or t
  misc_feature (91)..(91): n is a, c, g, or t
  misc_feature (119)..(186): n is a, c, g, or t
  misc_feature (210)..(210): n is a, c, g, or t
  misc_feature (215)..(215): n is a, c, g, or t
gaatgtttgtatnattcgttaatattacttgtgaatacagttagttgcattactgacttttatgatgtttgttaacttgtctgaacctcanctatgacctagggcaataatagccacannnnnnnnnnnnnnnnnnnnnnnnnnnnnnnnnnnnnnnnnnnnnnnnnnnnnnnnnnnnnnnnnnnncctgcaaactctctctgcctccantttcntcttaaacatttggcttgggactgtggaaacatacagtgggggcacttgcacatgtggtgtgg

SEQ ID NO: 429542 - DNA, 206 bp, Homo Sapiens
  misc_feature (21)..(21): n is a, c, g, or t
  misc_feature (52)..(52): n is a, c, g, or t
  misc_feature (64)..(65): n is a, c, g, or t
  misc_feature (106)..(106): n is a, c, g, or t
  misc_feature (117)..(117): n is a, c, g, or t
  misc_feature (185)..(185): n is a, c, g, or t
tggcttgaattttgcttttancttaacattttctaattcagtgtattcaganatcttgtcccannggtaagaaaatgatgcacttcaaaccactactaagtcacanggctttttggnaccccaaaatccttaatctgaaaaagtagttgaggagatcttttcaagtttccattgcctagtgatcngacagcttcacaaactaaata

SEQ ID NO: 429543 - DNA, 364 bp, Homo Sapiens
  misc_feature (114)..(114): n is a, c, g, or t
  misc_feature (212)..(232): n is a, c, g, or t
  misc_feature (298)..(298): n is a, c, g, or t
  misc_feature (328)..(328): n is a, c, g, or t
cctgggggatgcaacacctgttgatgcttctcagttttccactgcctttgacaggttggtggtttttaagccctttccactgtaccatccctactgcccctggtgcgaaagatncatcttttgctcttgatctctaggtgggtaaaacctgcctgattagtagtgattcagatagtgtgacctccttcagttttctaagggctgaaactccnnnnnnnnnnnnnnnnnnnnncatgacttcagaggtaatcaggctctagggggactggattctctctaaaccaaactctgggagacngaattgtaaatccacatggcaaggtttttnaatttacagtggggaggttatacccatccagagatt

SEQ ID NO: 429544 - DNA, 441 bp, Homo Sapiens
  misc_feature (27)..(27): n is a, c, g, or t
  misc_feature (125)..(125): n is a, c, g, or t
  misc_feature (263)..(263): n is a, c, g, or t
  misc_feature (356)..(356): n is a, c, g, or t
  misc_feature (370)..(370): n is a, c, g, or t
  misc_feature (385)..(385): n is a, c, g, or t
  misc_feature (391)..(391): n is a, c, g, or t
  misc_feature (398)..(398): n is a, c, g, or t
  misc_feature (411)..(411): n is a, c, g, or t
  misc_feature (417)..(417): n is a, c, g, or t
tccaaaaagtggtatccacaaagtgcnaaaggaacaaagaataaaaacaacatgctggggaatcagaaaggctttatagggtttgtagctcctaggatgcatgggcctgaaggatgagcaggctntcttttctctgtataggatttcaatggatgacagcattaaaagaaaagtttaaagaaggaacaaagcaacggaagccagaaaatactagaaaagtgaaggatcaccaaaatcaaggctgcttgctttaaacagccttntggcaacacccaatttcccttgtccaattctttgcacatcaaggacccttcttatagtaatttgggtctctagagcagagcagggaaggggcnccatgcagatcccngggataggtataccncccacnggaaacnaataacctggcangggganttacaattcagtcgccagagtttt

SEQ ID NO: 429545 - DNA, 344 bp, Homo Sapiens
  misc_feature (55)..(55): n is a, c, g, or t
  misc_feature (223)..(223): n is a, c, g, or t
  misc_feature (225)..(225): n is a, c, g, or t
  misc_feature (243)..(243): n is a, c, g, or t
  misc_feature (306)..(306): n is a, c, g, or t
  misc_feature (331)..(331): n is a, c, g, or t
gaatcactggggatgctactaagggtgcctctgggaaagacaaaaacactcattngaagacctccagggaccccataacggcagaactcggcactgcacggtatctgccaaggttggagaccgcggcaggcgctgggactggcccattgccaggctcgacaggagggcggcggcagatcctccagccccttgaggacctttccccggccagacttggcgtcantncaagggtggggtggcacnccggaccatctgtcgcttaggggctggactcgacgatacctccagtggcgaggagggtccttnctgcgagatttccagtcctcgcggncgagacgaggcga

SEQ ID NO: 429546 - DNA, 422 bp, Homo Sapiens
  misc_feature (153)..(153): n is a, c, g, or t
  misc_feature (155)..(158): n is a, c, g, or t
  misc_feature (396)..(396): n is a, c, g, or t
tgggtaaaaatgccctgggttgaaacaagaaacattatctttccacaccactgactaaaacacctgccagtggtttctttaggctccaccttttgctccgtaaactgtagactttcagactgaaatctaatcttaagtgacctcaattaaggnannnncacaaaaggctacttatagtgtagcattattgccttaaatcagaaagccctgggaagaggataaaagatatagaaatgagaaggctctgaagttataggcatttcttgctgtttaatagttacatgatcacaaaaacaatccctattcatgattgaggactatgggaaatagtgacttcttgagggagggcaccaaactttcctagaactgggtactcccagatagtgggccgctatngcccatccaatttcagtgacgtaggt

SEQ ID NO: 429547 - DNA, 166 bp, Homo Sapiens
  misc_feature (63)..(63): n is a, c, g, or t
  misc_feature (112)..(112): n is a, c, g, or t
  misc_feature (114)..(114): n is a, c, g, or t
ttatatctggtcagaaataaatcaaaatgttcagaattggttttggcaagcatgaagacatcnagcataaagtatctgcattaataataacctattgcatatgcaatttaanancatgatgatgatgatttggcctcctcctctccccctccaaagcaacccattc

SEQ ID NO: 429548 - DNA, 391 bp, Homo Sapiens
  misc_feature (22)..(22): n is a, c, g, or t
  misc_feature (123)..(123): n is a, c, g, or t
  misc_feature (136)..(136): n is a, c, g, or t
  misc_feature (138)..(138): n is a, c, g, or t
  misc_feature (172)..(172): n is a, c, g, or t
  misc_feature (258)..(258): n is a, c, g, or t
  misc_feature (278)..(278): n is a, c, g, or t
  misc_feature (328)..(330): n is a, c, g, or t
  misc_feature (339)..(340): n is a, c, g, or t
tttacacagcccacattctgancgggagagacagatggtaaacaaatggctaattaaatatacattaggccaggcactaggagaaaaggcaggcgcagtggacacagctgtatcccacaatanccatttccccttngncctaataaactaatcaatgctccaatttttaggngaactcaggcctcccagaataaagattccatttccagcctcccctatagtcggatgcaggcatgtgaccaagctctggccagagangaaagtgagagtgtctcagnagcttctggagcctcccttaagagacacagctattctgtggctttcctgnnnctttgccanncctccttcccgctgactggaggacaggcagagtggccggagatcctgcaat

SEQ ID NO: 429549 - DNA, 241 bp, Homo Sapiens
  misc_feature (192)..(192): n is a, c, g, or t
tcccacaaagtttatgcctgaaatgtgtgtataaacaacatttgaaagaagaaatggaaatctcccatcactacatctcagtatgaagagatggagggaagttaagtcctaaatgaccagatttggatgttacatgacaggtggcttctgcacagtaaactgaggcagaactgtaagtgatgagtaggtatncaagaatgaaagagatcatgaccaaggacagccacatccgaccattcgt

SEQ ID NO: 429550 - DNA, 356 bp, Homo Sapiens
  misc_feature (107)..(107): n is a, c, g, or t
  misc_feature (137)..(137): n is a, c, g, or t
  misc_feature (142)..(142): n is a, c, g, or t
  misc_feature (217)..(217): n is a, c, g, or t
  misc_feature (239)..(239): n is a, c, g, or t
  misc_feature (247)..(247): n is a, c, g, or t
  misc_feature (257)..(257): n is a, c, g, or t
  misc_feature (263)..(263): n is a, c, g, or t
  misc_feature (292)..(292): n is a, c, g, or t
  misc_feature (344)..(344): n is a, c, g, or t
atcacaggataagcaatagattgtgtgggaaataataacacaagagtaaagatgctgaaggactcttctggaactcaaagtgacagttttgaaggttctggcacagnaggaaaggatcacaacccatataaatggcnaatgntgaatttctctgaacactgtcacatatggggcatcaatttggaaaactctcaattgaggccccttccctaagatnacaacattgataacctgtcttnttctctcncttctttacnatccgnccaagtctactattccaagtttaaatatngttcagaaagttgtcagccttgttagtcagaaaaactcccatttagagccanccaaactaggca

SEQ ID NO: 429551 - DNA, 253 bp, Homo Sapiens
  misc_feature (56)..(57): n is a, c, g, or t
  misc_feature (135)..(135): n is a, c, g, or t
agaatttattttgaggaatactttgaagttcaggtaacttcattcagagaaaattnntatctaaactaaactcttgacttcaagaaccacaatttttcaaacaccacagatagtgggaattctagctgaaaatcngcatggttatgagttttcagggataaaatattttctactccactacctgacaagaatttttgcattcattttcactgcagtttctgaagtctcttggtagcaagtattaagagtattg

SEQ ID NO: 429552 - DNA, 363 bp, Homo Sapiens
  misc_feature (45)..(45): n is a, c, g, or t
  misc_feature (48)..(48): n is a, c, g, or t
  misc_feature (338)..(338): n is a, c, g, or t
tatttcaatttctgcttagcagagatagaaaagagaaacatcttncgngatagatttttaggggtcttgacaataagttaaatccagaaataaacagggctcatcttagtccattggtgctgctattaaggaacacctgaggctgaatgatttgaaaagaaaagaggtctatttggttcatggttctgcaggctgtataaaaagcatggcaccagcacctggcatctggtgagggcctcatgctgcttccactcatgggggaaggtgaagggatccagcctgtgcagaggtcacatgggcgaagaggagctagggggtggcaacggggctcctttcancagcagattcagaaactaacagtaa

SEQ ID NO: 429553 - DNA, 286 bp, Homo Sapiens
  misc_feature (31)..(31): n is a, c, g, or t
  misc_feature (44)..(44): n is a, c, g, or t
  misc_feature (66)..(66): n is a, c, g, or t
  misc_feature (79)..(79): n is a, c, g, or t
  misc_feature (89)..(89): n is a, c, g, or t
  misc_feature (91)..(91): n is a, c, g, or t
  misc_feature (201)..(201): n is a, c, g, or t
  misc_feature (252)..(252): n is a, c, g, or t
  misc_feature (264)..(264): n is a, c, g, or t
  misc_feature (270)..(270): n is a, c, g, or t
aggggattttgctgcccaccaaatcactgangaatcctacagtngagttaccagcgttgttgtacnagaatatttttcntagtcaaagngnataccaaagattatgctgtttaggaatccaacttggaagaacccatgagaagtgtgtctgttcccaggactgctgggttttgcccttttaccctcaactcccttcacacntttaaaaataaacgatagatttgatttcacagaaactgcatctgtatatgnataatgatgtgnctttantttgggcagtaagctt

SEQ ID NO: 429554 - DNA, 119 bp, Homo Sapiens
ctgtcttctcctgattatttaattcccattatgcctattatcaaagttaaagtagatgtaataagttttaacatcactgaatttaacatcttaaccaacagaaatatagaccatactca

SEQ ID NO: 429555 - DNA, 298 bp, Homo Sapiens
  misc_feature (71)..(71): n is a, c, g, or t
  misc_feature (77)..(77): n is a, c, g, or t
  misc_feature (80)..(80): n is a, c, g, or t
  misc_feature (105)..(105): n is a, c, g, or t
  misc_feature (198)..(198): n is a, c, g, or t
  misc_feature (211)..(211): n is a, c, g, or t
  misc_feature (227)..(227): n is a, c, g, or t
  misc_feature (235)..(235): n is a, c, g, or t
agcaagtgagccagggtcaaattcccttctccaggggaatgaatcaagcccaatctgtaacagctaaatangtggangtntttgccggtcatcagctctgggcanaactaatttgttttattggttctggaagatttccaaaaagccagaatttattattataacagtgtccactccactgccctcacagttgtgtanaataattataaangttttaatgatcctgnttaaggangaccctagacaaaggcaattccaccttccggagtaggctggcctggcccttaatggggtgttt

SEQ ID NO: 429556 - DNA, 242 bp, Homo Sapiens
  misc_feature (23)..(23): n is a, c, g, or t
  misc_feature (29)..(29): n is a, c, g, or t
  misc_feature (31)..(31): n is a, c, g, or t
  misc_feature (77)..(77): n is a, c, g, or t
  misc_feature (124)..(124): n is a, c, g, or t
  misc_feature (170)..(170): n is a, c, g, or t
  misc_feature (180)..(180): n is a, c, g, or t
agaaagattttatttagtataanactagnangtttatatgattcacttgagaataagattattaaatttacccttgngacaggaaggaaagttttaatgatatttcatggaggtttcttccacnttattaacaacattctgattattggtgaatattcccatggctcacnaacacctgtnagttagatctgcacggacggtgagcacaggactgtggttacccccttagccaagcaaacaac

SEQ ID NO: 429557 - DNA, 456 bp, Homo Sapiens
  misc_feature (36)..(36): n is a, c, g, or t
  misc_feature (109)..(109): n is a, c, g, or t
  misc_feature (161)..(161): n is a, c, g, or t
  misc_feature (343)..(343): n is a, c, g, or t
  misc_feature (370)..(370): n is a, c, g, or t
  misc_feature (386)..(386): n is a, c, g, or t
  misc_feature (408)..(408): n is a, c, g, or t
  misc_feature (428)..(428): n is a, c, g, or t
  misc_feature (440)..(440): n is a, c, g, or t
ggaagtaataaaaaatactaccttgttctagcaagngctcagtgaggttggcattctctttcactgcttgggtaagtgtataactctttctgggaacatatattaaganatttatatatttacatcctctgatttcatatgtaggaatctaactcaagganatttttgtatgttgatgtgtatatataaatgtcttttggtggtagaaattatgagggttttcagcttctcattcttttctatttcttccacacttctttaatgatcatctcttactttcttacttttctttctacttacctcccctctttttctctgttcctcccagtacttcattgcttgntttctctgagtattaaaatgggtaggncggcgtggtgggttcntggccggtaattcccggcactncggggggcccaagccggggntcactgggggcnggagtttggacaccgg

SEQ ID NO: 429558 - DNA, 388 bp, Homo Sapiens
  misc_feature (49)..(49): n is a, c, g, or t
  misc_feature (177)..(177): n is a, c, g, or t
  misc_feature (228)..(228): n is a, c, g, or t
  misc_feature (334)..(334): n is a, c, g, or t
  misc_feature (349)..(349): n is a, c, g, or t
  misc_feature (372)..(372): n is a, c, g, or t
gattttgtcccacttaatatatggcttcataatctgaatgatcttgggnaaactgggataactcatcttgcacactacacactaacagggaattattaaaggtagtaacctaaattggatccataaatacatcggtatcacgagcaaatttttttctgctaggtaggagaacttacntacttgtattgttattggactctgatgacaacaaggtgagaaacgaagtgnaacataatttaggaggctcctctccctcactccggaaatacacatggatttcacaattctcgctatgttctatggaaatccaaggacaaacattgttgtgtattcncacacacatgaggtnttcccacttccggggttaacttnaacctagagggcaaag

SEQ ID NO: 429559 - DNA, 293 bp, Homo Sapiens
  misc_feature (21)..(21): n is a, c, g, or t
ttagtgcagaaccttacatcnccattccattaccgtggtcaccattggtgtacagctgatgaggacttgctggacacatgccctttaattagggtgattttctaggatatttggctgagaaatgagtaaacacacagaaacacaaaaattgcacatgtgtacacatgtatatgcaaaacaagtgcatactgatagctaaatgggtgttttggctttgaattagcactcagattggagatggcacagtggaaattggaaaacaggtgaaaatctgtttacacggacaaccgtat

SEQ ID NO: 429560 - DNA, 303 bp, Homo Sapiens
  misc_feature (27)..(27): n is a, c, g, or t
  misc_feature (91)..(91): n is a, c, g, or t
  misc_feature (236)..(236): n is a, c, g, or t
  misc_feature (269)..(269): n is a, c, g, or t
  misc_feature (276)..(276): n is a, c, g, or t
cagctaggaaaccaagttccatagggnaccagcttgctcagggtcaagattcacattagcatttatagccatggatgttgattagctgttngtcactccctgtgtttatctgcctccccaaagaggaagaaccaagaagaaactcttactgctctcaggatgactggtatttggtttcctgatgccacttctgcctggaaacagatcatatacatcacagaaacatggcttctggnaattaacaacaaaactatggcatttaaagaacnttgttcntctgaagacctaaaataatttcataac

SEQ ID NO: 429561 - DNA, 176 bp, Homo Sapiens
  misc_feature (114)..(114): n is a, c, g, or t
  misc_feature (136)..(136): n is a, c, g, or t
ctgccccttctgtgttttcagctcactcaaggctccagtcataccataattctccctttcctcatcagacctgggagtgtattctgttcccattgttgctaaaccttgaatgcnttcactcggtttccctcaatancttctctccaaaatcattttctccttcgctgataccatga

SEQ ID NO: 429562 - DNA, 309 bp, Homo Sapiens
  misc_feature (28)..(28): n is a, c, g, or t
  misc_feature (37)..(37): n is a, c, g, or t
  misc_feature (138)..(153): n is a, c, g, or t
  misc_feature (242)..(242): n is a, c, g, or t
  misc_feature (255)..(255): n is a, c, g, or t
  misc_feature (279)..(279): n is a, c, g, or t
  misc_feature (286)..(286): n is a, c, g, or t
ctgtttacatttctcctgtccacttaanaacatgtcntctttctcagtttgttttgacattggtatttgccagttttttctaaggcctaagtggttgtaatttctttttcgttgcggatatccattttcgttcctggnnnnnnnnnnnnnnnncccgagagcgctccaaacagcacgacgatcccggtggcccgcagagtgcgcgcagtcggggagtgatacgtcgcactccagcgcctgcnaactcgtcgctgncgtctctggcgccccgcactgggnacgtggngcacggccacgtggaaccccccc

SEQ ID NO: 429563 - DNA, 226 bp, Homo Sapiens
  misc_feature (34)..(34): n is a, c, g, or t
  misc_feature (154)..(154): n is a, c, g, or t
ttttgaatcatattagattcttgtaaaattacanatattttatttatagctactatgtcataaaacctttgctgtcaaattatgtctgtctatatgcttgactatgcagaatgactagcaaatattacatttaataagttggaacttaaactcngagtaataccttatcaacctcattcagtatgatattgtaatatttccaagatatttcaatcattgtgttttc

SEQ ID NO: 429564 - DNA, 349 bp, Homo Sapiens
  misc_feature (86)..(86): n is a, c, g, or t
  misc_feature (120)..(120): n is a, c, g, or t
  misc_feature (143)..(143): n is a, c, g, or t
  misc_feature (211)..(219): n is a, c, g, or t
  misc_feature (222)..(222): n is a, c, g, or t
  misc_feature (238)..(238): n is a, c, g, or t
  misc_feature (246)..(246): n is a, c, g, or t
  misc_feature (251)..(251): n is a, c, g, or t
  misc_feature (276)..(276): n is a, c, g, or t
  misc_feature (283)..(283): n is a, c, g, or t
  misc_feature (290)..(290): n is a, c, g, or t
  misc_feature (297)..(297): n is a, c, g, or t
  misc_feature (338)..(338): n is a, c, g, or t
gcattcttccttccattcattgctaatgttcaacaataaagcattttaattctaaaggaattgttgcttttaacttgagtgtgatnattttagatcacattttagagccctcatgtaggncaatgatacttagaattttttangtcagattaccatttttaaatgttcacacctaaaattagtctaccagtccaagataaagaatggaagnnnnnnnnnggnactccatttgatttgntcaatacntcacnttaatcttcaagatccaggtatatnatttttnaaattcnaaaggcnaatgctggaaaagccacaatccaggtaacacaggaaatggnataataacacc

SEQ ID NO: 429565 - DNA, 147 bp, Homo Sapiens
ctatacagaaaactactcacatgataagaaaggaaaacacttgataatcctaccaattatttaaggatacaaagatataaaatgttccctctacactttcaatccactttatttgaaactgcaaaccgccctcccatctcctttctc

SEQ ID NO: 429566 - DNA, 252 bp, Homo Sapiens
  misc_feature (15)..(15): n is a, c, g, or t
  misc_feature (21)..(21): n is a, c, g, or t
  misc_feature (85)..(85): n is a, c, g, or t
  misc_feature (91)..(91): n is a, c, g, or t
  misc_feature (123)..(123): n is a, c, g, or t
tttacagcaatgaanacgtanatgaatctgctcacttaagggagaccaagctgtgcagaagtggtgaatgttaagccaacttgcnagaaantgatttataaaccagaatgctgattcattatntgaaatgggagatgaatctggtaagataaccggcatcaatcatttgaacaggttactccctcttaatgaataagctcattgaagaaactaaattgcagatcagaaggatttttggtacagggaattaga

SEQ ID NO: 429567 - DNA, 332 bp, Homo Sapiens
ataataaatgagaactcatttttgagtagaggtcacaacttataatattaacttgaccagaattatgatggcagtgaatttctgtgaatcactgagtataaggatttccatacactgggtatgggaaaatgcattgttttgatgaatgaagacgccggatgtcacagcagcaattgtcctctgtaataatcaggccaagccactacctgcaacatactgagcaagtaggtaatcagaaacagtgcgatgcattgaaatgacaagaaggatctgctaaaaatcagggcccaacaacatcacagtcaccgtcttagtctgaggataaaatggaa

SEQ ID NO: 429568 - DNA, 210 bp, Homo Sapiens
  misc_feature (32)..(32): n is a, c, g, or t
  misc_feature (35)..(35): n is a, c, g, or t
  misc_feature (71)..(72): n is a, c, g, or t
  misc_feature (80)..(80): n is a, c, g, or t
  misc_feature (87)..(87): n is a, c, g, or t
  misc_feature (96)..(96): n is a, c, g, or t
  misc_feature (100)..(100): n is a, c, g, or t
  misc_feature (107)..(107): n is a, c, g, or t
  misc_feature (132)..(133): n is a, c, g, or t
  misc_feature (148)..(148): n is a, c, g, or t
  misc_feature (152)..(152): n is a, c, g, or t
  misc_feature (155)..(155): n is a, c, g, or t
  misc_feature (164)..(164): n is a, c, g, or t
  misc_feature (168)..(168): n is a, c, g, or t
  misc_feature (182)..(182): n is a, c, g, or t
  misc_feature (190)..(190): n is a, c, g, or t
ggagagaaaacctatggatgccgcggatgtgngcnagctttctttgagaaggcacagctgattatacatcnnagaattcntacaggngagagaccntatnaatgtgntgaatgtgggaaatctttcacaagnnagtcacaccttatgnggcntcngagggttcntacnggagattaatactntgggtgcnatgagtgtgggaccaccttc

SEQ ID NO: 429569 - DNA, 439 bp, Homo Sapiens
  misc_feature (37)..(37): n is a, c, g, or t
  misc_feature (386)..(386): n is a, c, g, or t
cattaccaactgtgatggctatgggacaaaactcctnctgcttgagaaaagcagagaaaaaagtaaaggggactttgccttgcacctaaggtaggatcgtggccatagaggtatagagcaccaagtgggcctttgaggtccctaattacaggacttgacccttggatggcatttctggaccagccctgggccagaggggagcccaaagcccttaaagggtgagatctagggcaggcagcattcaccaccagttgactgaaaagaccttgagccttaaggagacatcaccctcctttaaccttctacttctacctacgcctaatcttacttccacctgcaattcacactacttccccatattcttaacaacgttaaaaattaaaatngacagtttggaacatacaaaacccaccccatttcttccccacattcattggcc

SEQ ID NO: 429570 - DNA, 269 bp, Homo Sapiens
ggtacttaccactgtgttccagttttctaaagtactcagtacagtcacatgctgtaccagtttgtagcctaggaacaacaggctgtaccatacagcagaggtggagtaggctatgtactctaggtttgtatgagcaccttctatcatgttcacacaatgataaaattgcctaaaaattcatttcctagaacatatccccattgttaagcaaggcatgactgtatttggtgactgggaaaataaattcctatttggaatttatttatgcc

SEQ ID NO: 429571 - DNA, 114 bp, Homo Sapiens
ggaaacatcacttgggcaaagcagtgaatggcttggtatgctatgctaaggacctttattctgcaggaatcggagtcctataaactattaataagcagaatacaaaaacttcat

SEQ ID NO: 429572 - DNA, 470 bp, Homo Sapiens
  misc_feature (16)..(16): n is a, c, g, or t
  misc_feature (401)..(401): n is a, c, g, or t
  misc_feature (451)..(451): n is a, c, g, or t
ggaattctaattcagngctctaccttgaattactcaactgccaacacagaactggtgtcactggactgttctgaagggcgggcatgcttgcaactagcttcacatgtggagaaagatcattctgtccaaagattgctctcttgctcttagcccatgtaaagaaaaagaatcactccattaccacactataacttagttaaatcacaggtggtttgcctttctaaaacatttagacatttggttaaattatgtttattaccaatattcaaagaatctgatatgtgatgatgtgcattaggtacaagatcagtttgcattcccggacacaccaggatattgggcaggcaagtcattttctgtgggaaatgtttgggtatttaaaacatacaaaattttggcantcttgggcaaagggaaaattaataaccagctaagtggcatggtgggttcnggcaggcaccttggagagg

SEQ ID NO: 429573 - DNA, 430 bp, Homo Sapiens
  misc_feature (17)..(17): n is a, c, g, or t
  misc_feature (29)..(29): n is a, c, g, or t
  misc_feature (161)..(221): n is a, c, g, or t
  misc_feature (343)..(343): n is a, c, g, or t
caagcaggtgttacagntctcctcctccnagggagcttgcagtattttacccagtttgtggagttccatttgaggattgctgggggttgtggaccatccagagatctttccatggtaaagatcaagcatcgtgggttgccatgatctattgtcagattgannnnnnnnnnnnnnnnnnnnnnnnnnnnnnnnnnnnnnnnnnnnnnnnnnnnnnnnnnnnngggttcaagggaacctgtaaaggaaaccagtagcttatctgtaccagtggcatatctgtataatctcttagaaaatcaagggttcaaaatcaaacaccttggctagtttgcgattcagtggnttcaagaatggaattctggcagttggggagggactctctagggccctttcagtggtttccactttaacttttttctggctctttatt

SEQ ID NO: 429574 - DNA, 352 bp, Homo Sapiens
  misc_feature (48)..(48): n is a, c, g, or t
attcggaacgaggagcggcagtaaaggtccctattggctgttgctggncttgtagttgctctgggatgttctctgctgtccctgccccaggccttttctgcccacatatcatcactgccattgcccctctgaggtgccagctctttggagatcctagacttgaagcaggtcagaatctaaaagggctttggtcactaagaagccgtctggtcacttcttttacagaaaaccaagtctgtattttgaccaaagtctctcaggtggcaccaggggggatcacagtgcctgcattaggatttgtaggctttgtttccttgaggaaagaaacagttgaaactcagtaatttcaggg

SEQ ID NO: 429575 - DNA, 417 bp, Homo Sapiens
  misc_feature (13)..(13): n is a, c, g, or t
  misc_feature (43)..(43): n is a, c, g, or t
  misc_feature (377)..(377): n is a, c, g, or t
  misc_feature (396)..(396): n is a, c, g, or t
gccttgaaaaaangaagtgtctgaggcacttaagtcagtatgncaacaataatgattattaaaactgaggccacctgtttcttatagccctcttgagcatattttgggaataggagaaataaaagttaagagcatacaattaagacaggcatggagaaccagaaggcctccatggtagctttgaaggagtcccttatctcttggaatcacagagcaggtaagggtgaggagcctctggtagacacattcttctaccacctacctggtaacaggttgactatattcagtctcttgtcatggagggtacaatgctttgtcctcacgggatattatttatgggatatgggatttgccttccctggaacttcagggcttcnggatgggcacactgttagnatttttatggggtgggacttc

SEQ ID NO: 429576 - DNA, 393 bp, Homo Sapiens
  misc_feature (29)..(29): n is a, c, g, or t
  misc_feature (48)..(48): n is a, c, g, or t
ccgcttaaggtaagctatgacttgcacgnaatagacttcttaacctanatttaaactcaccttattcccttttagcaacttttcttgaaatatgtcacagtttccatacttttgcagccaaagtctccttttcagtcgaacgttcagagacctcattttgttctgttttttcaccgaatctttatagtggatgtcactgctttttttctctctactcacagtagcttctcctccagccattcctcaccacttctagtgtcagacagtcctggctttgttttcccagacttggcattctctgtctggcattccttactttcttatgttggtagcgttaggaattatgtgtgtttttattataaggccccggtcatttcagaaggtaacctctaa

SEQ ID NO: 429577 - DNA, 394 bp, Homo Sapiens
  misc_feature (364)..(364): n is a, c, g, or t
tttctgagtagcatgacatttctgcaggcaaaggaagtgagtatagactcccaattctcttcttttccaggatgtacactagaatctgaagcatcctcttcaccctcgctccccttcaagtttccgaagccactaagttggcaatgaaattattttgtttatgcaaggagcaaaatcacatgtcaagctgataaataatgtatgaaatatcatttagttaatttcaaaggcgccaagactatgacaccattgcatccattcagatgaaaccttggttctccctgtgttaggggagagatctaaatgaagtatgtcctttatatttagatggactagatctgtgggccctcctggcttgtttttncaggggcccttaatacggatcagagaattt

SEQ ID NO: 429578 - DNA, 424 bp, Homo Sapiens
  misc_feature (298)..(298): n is a, c, g, or t
  misc_feature (341)..(341): n is a, c, g, or t
  misc_feature (378)..(378): n is a, c, g, or t
  misc_feature (386)..(386): n is a, c, g, or t
  misc_feature (408)..(408): n is a, c, g, or t
gattcgcgatcactatccgcgtcccgtagtgaagttctattgggttcaggcagaaattattgcgatggcaaccgacctggcggaatttattggtgcggcgatcggttttaaactcattcttggtgtttcgttgttgcagggcgcggtgctgacggggatcgcgactttcctgattttaatgctgcaacgtcgcgggcaaaaaccgctggagaaagtgattggcgggttactgttgtttgttgccgcggcttacattgtcgagttgattttctcccagcctaacctggcgcctggggtnaaaggaatggtgatcccgagtttacctacttcggaagcggtcnttcctgtgcagcaggcgtgttaaggggcgacgattanggccgcangttgattttatttggcactccntcgctcactcagcatt

SEQ ID NO: 429579 - DNA, 179 bp, Homo Sapiens
  misc_feature (88)..(88): n is a, c, g, or t
  misc_feature (133)..(133): n is a, c, g, or t
  misc_feature (142)..(142): n is a, c, g, or t
tcagatgattttaacaactatgcttccatgacttgctgggctagatgatatgactggtaaaatggccaaacccacggttttaggcatncaagttaagccaaattggttaaatgggtaggcgctggctctggcntatggactnagtcttggtggcttttaaaaccccaaatatttgtttg

SEQ ID NO: 429580 - DNA, 166 bp, Homo Sapiens
gtaatacattgccctaaacagagtgctatgaagcatacaagagaggtagacagactggattggtttggtatttttaattatatgtcataaaatcggttgcatactgttgaattttcttgccctacctagattttccccagctttgttatacctttcttgaagtaat

SEQ ID NO: 429581 - DNA, 320 bp, Homo Sapiens
  misc_feature (230)..(230): n is a, c, g, or t
  misc_feature (246)..(246): n is a, c, g, or t
  misc_feature (293)..(293): n is a, c, g, or t
  misc_feature (305)..(305): n is a, c, g, or t
cttgtatattctagatattatttccttgttaaatgaatactttccaaatattttctcccattcggcaggttgcctcttcactctgttgattatttcctttgctgtgcagaagattgttagtttaaaacagtcccatttgtctgttttttgatttgttgtctgtgctttggaggccttagccataaaatctttgcctagactaatgtcctgaagtgtttcccctgtatttncttttaagtcggtttnagagttctgggtctacaattgaaatctttatcttggagttagtttgngtatatggtaanagttagggatccagt

SEQ ID NO: 429582 - DNA, 452 bp, Homo Sapiens
  misc_feature (98)..(113): n is a, c, g, or t
  misc_feature (214)..(279): n is a, c, g, or t
gaagaatctccatacagctttttgtgtaactactggctatttgtatgtcttcttcagaaaaatgtctagttagaccttttgctcattttaaaattagnnnnnnnnnnnnnnnngctattgagttgtatgaattccttatatattttgagtattaactcttgtcagatatatggtctgcaaatactttctcccattaagttgcctttaactctgnnnnnnnnnnnnnnnnnnnnnnnnnnnnnnnnnnnnnnnnnnnnnnnnnnnnnnnnnnnnnnnnnngatggaatcccacttgtctatttttgctgtgttgcctgtgctttggtgtcatggccaaaaaaatcttttgccaagaccaatgtcaagaagcttttctcctatgttttcttctagcagtttcatagtttcaggtcttacatttaagtcttttataccttttgagttgacttttg

SEQ ID NO: 429583 - DNA, 419 bp, Homo Sapiens
  misc_feature (49)..(94): n is a, c, g, or t
caagagtaggctctttcggaagtacttgcccgtattacactttaatttnnnnnnnnnnnnnnnnnnnnnnnnnnnnnnnnnnnnnnnnnnnnnntccaaagaaagagacttggacataggcatcaaggaatcatttcactttataatttaatagaacactggtgtatcattcattaattctgaaagtgagaactaaatgtaaaataattttgtaaggtttgtgaattgttgcctaggtattctggtgatgtttactttagtgattttatcattaatgaaagcaatgtgtttttttagaaaacatattattagggttcataacgttgacattctgttggtgcaatcataatctcctgttttgttttagtcctagctctacagttgaatgaatccaagctcacctccaggccttttgctat

SEQ ID NO: 429584 - DNA, 136 bp, Homo Sapiens
ttttacagtccagctgggatggcaaaaacctaagcaaatataatagaaaaagatagaaagtagaatgggtgtacaaagagggaagaaactgatttgtcttgaagacttaatggataactactatttgaacttggtc

SEQ ID NO: 429585 - DNA, 423 bp, Homo Sapiens
  misc_feature (20)..(20): n is a, c, g, or t
  misc_feature (124)..(158): n is a, c, g, or t
  misc_feature (221)..(221): n is a, c, g, or t
  misc_feature (365)..(365): n is a, c, g, or t
gaaacgtccacgggcgaagntgcgggggatgggtgcctgtctggtcagtgctccaagggaagcccagggatgtttggtgattcagcaggtggcagccttccagctctgaagacatgccgtggcnnnnnnnnnnnnnnnnnnnnnnnnnnnnnnnnnnnctgtgcctgctgtcggaggcgccactttagggggaacctccaggtgctgccttctgcctgtgnacatacacttgtcttatcttgcttcctgtttagctctggaggccctggtatttcgagtttccttactgcgcctcttaaaatatacagcaatatatagcatgtttttgaagtctctgcatctctgtgacctgctgggtagcagtnggggtggctgctgccgccatgcagttttaagtagttactctgcagaaagtgacagtga

SEQ ID NO: 429586 - DNA, 412 bp, Homo Sapiens
  misc_feature (31)..(31): n is a, c, g, or t
  misc_feature (300)..(300): n is a, c, g, or t
ctttgtattggtacatgaccaattttagaangttcttctcaacacaaacagtctgaccgcatccatcgtccctcataagtcacctggagtggcttgaggagagccatagtgcttctctctgggacttttccctcaaccatctaatgtactggggttcatcctgcccacttaatgccgagaatcacagaacacaggtccttaagaggaagaaccacatcttttgcctctgtatcagatgccactgtaaagttcaggatggagttgggaggtcaaagggcttggttgtagcctgcaggctgntggttcaatgtaggggctgtacacttgggacttgacctattaaatctcttactcatgggtgagtaaaaaatgctaatctccacgttaacagatatccaaaatactcctaagg

SEQ ID NO: 429587 - DNA, 194 bp, Homo Sapiens
tgaaggactatacaaccaaaggatttgttttcttcaaagtgatcacatggaggcgcagtccaatgatgtcaaccttgctgagatgtttgaaatttcttttacaagtttccatgagaacctttgaagaaagccttctccaactatcctcaatgatggaaatgtactcattctttaaggatgggtttgattctggg

SEQ ID NO: 429588 - DNA, 169 bp, Homo Sapiens
ggaacaaaattctagggttaatagcatgggatattagttcaaatggaccttcttctctactttccaacctcactgtccccctacagctttatttattcacacaaatatcctaaatactgaaaataattgagattaaaagatctagtgtaaatatccacaaagaggtaca

SEQ ID NO: 429589 - DNA, 242 bp, Homo Sapiens
attttttatgtagtacagggatagcactaaaggtaaagtaaaagaaatgtaggacactatctcttccttttagttgattggtagacaagacctgcacattaaaatattagacaatacattcaatattttgctacacagaacattatagttaataaacgttggaaaagaggaaagtcattgctttctggaaacttagccagagtcctgtggaagagatgggattgaacaggatttgataagag

SEQ ID NO: 429590 - DNA, 394 bp, Homo Sapiens
  misc_feature (171)..(312): n is a, c, g, or t
  misc_feature (319)..(319): n is a, c, g, or t
  misc_feature (346)..(346): n is a, c, g, or t
  misc_feature (353)..(353): n is a, c, g, or t
  misc_feature (360)..(360): n is a, c, g, or t
  misc_feature (371)..(371): n is a, c, g, or t
  misc_feature (380)..(380): n is a, c, g, or t
ccaatctgaagtgggtctcttttagtgtaagatctgtcatcccaacactcgtcaccactctacctccaataccactcttcctccagatggagcacttctatcattttgaaaggaactaaagacaagatttcactgggaaattacattaattccaactggtatagatggaannnnnnnnnnnnnnnnnnnnnnnnnnnnnnnnnnnnnnnnnnnnnnnnnnnnnnnnnnnnnnnnnnnnnnnnnnnnnnnnnnnnnnnnnnnnnnnnnnnnnnnnnnnnnnnnnnnnnnnnnnnnnnnnnnnnnnnnnnnnnngcacaanaaggctgggcacagtgggctccatgcntggtaantctcagnactctgggganggctgaagntggggttggatcac

SEQ ID NO: 429591 - DNA, 304 bp, Homo Sapiens
tagatatacacccagcagtgggattgctggattgtgtgtcagttctttttggtttttttgaggaaccttcatactcttctccattgtggatgtactaatttacatgccctccaacagtataggattcccccttctccacatcctcaccagcattcattattgcctgtcttttggataaaagtcatcttaattgcagtgagatgatatctcactatagttttaatttgcattttcctgaggattagtgatgtggagattttcatacacctgttgaccatttgtatgtcttcttctgagaaatgcc

SEQ ID NO: 429592 - DNA, 417 bp, Homo Sapiens
  misc_feature (34)..(34): n is a, c, g, or t
  misc_feature (350)..(350): n is a, c, g, or t
ctgaagtgtaataaattatattccagtggcaganaccaagtgacagccagttggacctgccccaaacgcactcacactgagatgcagacgcacaccgtggcgactcgaggggctctgcgaaggcctgctgccaggtgagttacaacaatgctttccaaaatagccgcgcaggggtcaggggtcaaagccacagctcagcacaacacaaaaccctgactctaccacgtgagaacgcgggtgggaagccccaggagctcctaaccaacgttcctccgatgccgccttcctgaaccttccttgcagctggaggggaccgcagtcagcaccagcaagggcagggtcccaggctnctggccttgacacttggtcccagctaatatgggctgaagtatttctttagtgtgagagtgtaaccat

SEQ ID NO: 429593 - DNA, 455 bp, Homo Sapiens
  misc_feature (344)..(344): n is a, c, g, or t
  misc_feature (372)..(372): n is a, c, g, or t
  misc_feature (398)..(398): n is a, c, g, or t
  misc_feature (411)..(411): n is a, c, g, or t
tagtctcaaaacacatttggcggcaaaatctgaacctcacatgagattatttatagtctttatatatataatctcaattaattttcaactggatatttttgctacagaaacattcataatatttgactatacagggttctatcccaaacctcactggaggtgttatacaagttatatgcaccataatgcctttctaaaattcaaaaaattaggattctggaacatctggcatgaataatttcttaaaaggcatacactctcaacgggggcaatatcatacccaaagggcaaaataggtttgtcggcgagggagaaaaaaagttagacgttagaatggtgcgtanccctccaaagctcaaccttaccccaacnaaatcttactattacatggagcaggnctgacagtggacntcatgggagggcagcccaaatatatgcagggttctatggctacc

SEQ ID NO: 429594 - DNA, 320 bp, Homo Sapiens
  misc_feature (82)..(82): n is a, c, g, or t
  misc_feature (267)..(267): n is a, c, g, or t
gcaccatcacatccaatttgtgaagatataaacacaaattggaagtaagctataaacaaatgtctagggataagagactcancattgagtagttgtgattaacattatggtactcatagctatgtaaatctgcgaaacaattgccattaactaaagaagtcatgactgttgggtgccctagagtctagtcagcactaatacagtaacacagaaatcactaagtttagcaagttgggagaagtattgaaagggccaggagtggctaangcttcctggttcatttgttgccaattatattaggtccatttttcacactgcta

SEQ ID NO: 429595 - DNA, 339 bp, Homo Sapiens
  misc_feature (57)..(57): n is a, c, g, or t
  misc_feature (227)..(227): n is a, c, g, or t
  misc_feature (234)..(235): n is a, c, g, or t
  misc_feature (290)..(290): n is a, c, g, or t
  misc_feature (321)..(321): n is a, c, g, or t
accgaaacgaggaaaactccaggatgaagcacactaaataaatctccaactggaccnaaaggttaccaaacgcaggctctgaagcactttcaagtcctaaaggcagaaaaatactcaggagaaagcgttactgcaggtgaatcgtgacagcatactgctgttgggttcaatgcagggaaaggatcatgagctgtgagaaaacacctgagcatggctttataaatcanaggatgnntgtaaataaatgagaacttcgggatttaaatttagatagagacggctgtgctccntgtaatcctgtttcaggattacatttggggntagactgaaccgttccta

SEQ ID NO: 429596 - DNA, 453 bp, Homo Sapiens
  misc_feature (322)..(336): n is a, c, g, or t
ggctgcatagtattccatggtatagaagtaccacattttcgttacccagtctgccattgatgggcatttagattgattccatgtctttgttattgtgaacagtgctgtaatgaacatacatgtgtatgtgtccttatggtagaacagttttgtattcttttgggtatatacccagtagtggaattgctgggttgaatagtaattctgtttttagttctttgaggaattgccacactgctttccacaataagtgaactgaatacactcccaccaacagtgtataagcattaccttttctccgcaatttgccagtatctatcannnnnnnnnnnnnnnagtaataggcattctgactgtgtgagatggtatctcattgtggttttgatttgcatttctctaatgatgtgatattgagcttttttttccaaaagcttgttggccaccctcgtgccg

SEQ ID NO: 429597 - DNA, 655 bp, Homo Sapiens
  misc_feature (573)..(573): n is a, c, g, or t
  misc_feature (594)..(594): n is a, c, g, or t
  misc_feature (640)..(640): n is a, c, g, or t
ttttactgagaatctcggagtgtttctgagcattatacggataaattattaggactagaagttggtgtagagaaattattaggactaaagttctcagatagtaaaccaggtccttacttcctagtgataatgattcatgatgaggaggggttggatgaagaggcacaggatttgctgctcagttttgaatttttatttggagaatatggagagagcaaagaggacaccctaggatgggaaagaaaattaaaggaattgtaatcttttttggaagagaagggggaagtcaaggtaatagctcaacttctctacatgagggaactaggcaattatttttcattttagctaagaaagggtcatggggcatggagaattgtggatagtcataacaagggatttgagggataccagaatggcttaacaaagagaacttgctggaaaagcagttctgtgtactggggagacatctcgattgtattctgtccaaaggtagagggttggatcatataatcccccaaatccacctcttcctacatgagaggggttctaatccttgttagaaggaacctcccnccagagactggcttggtcagncaccattgaattccacaaaaaattgaggtgaagccaggaaaaagancattgtcatatggga

SEQ ID NO: 429598 - DNA, 136 bp, Homo Sapiens
  misc_feature (102)..(102): n is a, c, g, or t
ttgagcaccacgccccgcctgggaatctgaatatgttttatgagatagaaccaacaagactttcttgacagtttgggatatggggatgtgaagagaaaggangtccagggatgaactgcaaggggacctaaaacta

SEQ ID NO: 429599 - DNA, 237 bp, Homo Sapiens
  misc_feature (163)..(163): n is a, c, g, or t
gatatgtttactttcattcttactaagtagagtactcagaaggtgtgtcttcttctgaggctttcacttggcaaagataaaattagtagtctctaacgtatagctagtagagaccaagcaaaatatgatttgttgtcagttgcatcttttctcttgccagagnaatatgattactgaactcgttataggtttaggagtgttgaagatcatcagtatcataaccaaaagggaaataaa

SEQ ID NO: 429600 - DNA, 280 bp, Homo Sapiens
  misc_feature (29)..(29): n is a, c, g, or t
  misc_feature (32)..(32): n is a, c, g, or t
  misc_feature (172)..(172): n is a, c, g, or t
  misc_feature (179)..(179): n is a, c, g, or t
  misc_feature (216)..(216): n is a, c, g, or t
  misc_feature (252)..(252): n is a, c, g, or t
  misc_feature (266)..(266): n is a, c, g, or t
tgttccctcctgcagaaggcgaggcagtncanggctgcttcctgattggcagaaaaacagcaggaacttgattcctttcttaacccttccttgcggtttctgccacctccactgttctaagtggctgactgtgacaatgtctcgttcccactcccctctcattccccaggcntggagangacctactgggtttctatttaggatcctggtgttatnagtcctgtttttcatgcttgtttaataaagacatgngaccccaagggctngggtaaattttatt

SEQ ID NO: 429601 - DNA, 190 bp, Homo Sapiens
  misc_feature (98)..(98): n is a, c, g, or t
cggatgctgacccctgaactcctaactggggttggaattcaggtcccttgggaacactgggcacctagggatgtgggagcaggactggccacagccangtttcccttagaaacagactggttgaattaatgaactgaacaaatgaaccaatgtgttttgccccagagaaaagtgagctttgtccccgggt

SEQ ID NO: 429602 - DNA, 265 bp, Homo Sapiens
  misc_feature (237)..(237): n is a, c, g, or t
atacactgcttaacaaatgttagctaatagtttatattaggctttatagcagtgtacttttattgttgaactccttatgtattcttttacttgtttaatccttttactttgagaaagtggtaacttgtagagaggaaaagatactgataaatgtaaataatccattgcaaatggctgagtgaaaatcctggaaaatggtttaattgaactttattgatgtaatataaaactattcanatatctgtcaataaaggggtcggagtgt

SEQ ID NO: 429603 - DNA, 284 bp, Homo Sapiens
  misc_feature (32)..(32): n is a, c, g, or t
  misc_feature (246)..(246): n is a, c, g, or t
  misc_feature (254)..(254): n is a, c, g, or t
  misc_feature (266)..(266): n is a, c, g, or t
ataacataaaatattaaagatgagctgatggngaaatcctcaagtgtgaagaaagtttcttagctttatagctttatggaaacaagtacattgtattttttcattcagatgaatgaacttttattgaacattcattaaatgctaggcactaggcaaacaaagacttaatagaatgacaacagtaattttccatagagcttgatacagtattggtaccttcctggcagtatcccaaaggatttgttngctttcantaatccccttcnacgggattccgtcaatca

SEQ ID NO: 429604 - DNA, 333 bp, Homo Sapiens
  misc_feature (54)..(54): n is a, c, g, or t
  misc_feature (180)..(201): n is a, c, g, or t
  misc_feature (243)..(243): n is a, c, g, or t
  misc_feature (254)..(254): n is a, c, g, or t
  misc_feature (263)..(263): n is a, c, g, or t
  misc_feature (270)..(270): n is a, c, g, or t
  misc_feature (291)..(291): n is a, c, g, or t
  misc_feature (320)..(320): n is a, c, g, or t
tctcatgggctatctatttccttcctaataccgtttggtttcctgtatggtttnccccctccctcctgtctcctctatccctgctctcatggctgggggtgggggcagatgggtccgtttggactgaggcctgatgatctgccttcctcaggcagccccatcctagatgctgtcactcannnnnnnnnnnnnnnnnnnnnnagagcccgtgatccgcatcgggggtctctttcccaatggttnaaccatggttnttccttcanaggtctngaaattccagaagaaaggggnggcctaaaaaacctttttcccaaggaatnggcccgggccttt

SEQ ID NO: 429605 - DNA, 196 bp, Homo Sapiens
  misc_feature (85)..(85): n is a, c, g, or t
ggggagggaaaaagtgtaatcttggtcaattctatcatgcaaccagatcaaataacatttcaagtgcagcctgccaaagcgccancacatgccggagtacaatgagcgctcaactgctctggactgaaaaaccatctttcactggtcccagggatctttataaaatagtttaaacactactaaattacagagttag

SEQ ID NO: 429606 - DNA, 183 bp, Homo Sapiens
aaaacaataccttctgttggcatattcaccagggaccaggatggttttagaacctgtctaggcattatgaactcacacctctgccctaaagaaagctggtaattacagattccaaacacgctaatacgtggcagtcactgctgtttgttttgcttattggtccaattacttgtttctttatta

SEQ ID NO: 429607 - DNA, 242 bp, Homo Sapiens
  misc_feature (118)..(118): n is a, c, g, or t
  misc_feature (218)..(218): n is a, c, g, or t
atgagcactgcatcctgccaggaaacactaacatttaacaagttttctaatcttttaaaataaatagacctgactcaggtaactgctacttaaggaagtgtgtgtaattttggtctcnatttataaagaggatcccctgttggcactttgatatctgtgcttttaaaatttgatttttctccttttcctctttaccttccttttccttgcacacagtnaagtaaaccatcacatatttaatg

SEQ ID NO: 429608 - DNA, 429 bp, Homo Sapiens
  misc_feature (153)..(153): n is a, c, g, or t
  misc_feature (234)..(234): n is a, c, g, or t
  misc_feature (328)..(328): n is a, c, g, or t
agaagtattatttctaaaatcacatcactgtatgaatatccagctgtagcctgtgactacattatgagtattagaagtcattttttaataacttttgccagacctgaaggttcattactgtgcagctctctccttcatggctgtttttatttnggatatttaagggtgagctgctgtcttcattatatttggtgtgtgacttggtagagaagggcacaagtagtggtatggctngggaagggtgggagtttaatcctcattgtgagttttgagaaaagataatgaaatcctttatatccctttccgtagacctgcatttcaaagactnacattttcaataagaattagttgtgcagctgcaaccctgggcaacaaggcctaggagaaaagaattggggcagcattccagaaatcagggcaggcactggg

SEQ ID NO: 429609 - DNA, 437 bp, Homo Sapiens
  misc_feature (44)..(280): n is a, c, g, or t
  misc_feature (346)..(346): n is a, c, g, or t
ctaaaggcaatctattaataaaccacccaaattacatgcagttnnnnnnnnnnnnnnnnnnnnnnnnnnnnnnnnnnnnnnnnnnnnnnnnnnnnnnnnnnnnnnnnnnnnnnnnnnnnnnnnnnnnnnnnnnnnnnnnnnnnnnnnnnnnnnnnnnnnnnnnnnnnnnnnnnnnnnnnnnnnnnnnnnnnnnnnnnnnnnnnnnnnnnnnnnnnnnnnnnnnnnnnnnnnnnnnnnnnnnnnnnnnnnnnnnnnnnnnnnnnnnnnnnnnnnnnnnnnncttatgtacattaacagagtacaaacgattgaaaatacagcagttcatgagtccttaccaaaaatnaccaataataaattcataaatcaatgaaaatggaaacaaagcaatctcttgcttacagtaaaatgtcaacaaccatctagtaaatgtgaag

SEQ ID NO: 429610 - DNA, 416 bp, Homo Sapiens
  misc_feature (108)..(108): n is a, c, g, or t
  misc_feature (110)..(110): n is a, c, g, or t
  misc_feature (252)..(252): n is a, c, g, or t
  misc_feature (255)..(255): n is a, c, g, or t
  misc_feature (257)..(257): n is a, c, g, or t
  misc_feature (262)..(263): n is a, c, g, or t
  misc_feature (394)..(394): n is a, c, g, or t
tctgaaccaaagcccatccgagaactagatctgactatggaccaccaccctgggatcatggtttgcactccactgactgttcaatgtcttattccagtgcccatgggntntcaaattgagcctgccccagaccacctcttccccaaacccacctctcctccccaccgtgtaccttatctcagttagcaaacttccttctaacctgctcacccaagctggaaatatggatgagggtgtcctttccttcctccnttncntcctnnctcccacattcactaaactctaccaacataacttgctaaataaatcttacctattcttacttccccatccctttaccaccattattggtagcttgggctgctagcatctggttggcctgggcccagtagcntttcaagaggttttgactgatg

SEQ ID NO: 429611 - DNA, 449 bp, Homo Sapiens
ttctaagaaaaagttatttaatagtagaaatgaaaaagaaaaccaaacactgatctctaaagattttaaaatgtttacagatctgagtttacctcagaactagaattttcaacactgaagaagggaatagggaagacctattgtctcccaaaacactttgctttttatcagcattcccaaatactatattccttaacttaacagctttcttacagtcatgtttcctcacaacccatcttttgtaccactactacttttaaatatatcctcatttgtccacaaactttctctattgccttgaaattgttttatagtgtgtagttttttacttgccaaatgtgtatttactcaataattatctttttacatacaaagagctgtataaggcattatgaggaatacagatatataaaaaagggaattaattattacagagttttccaatccag

SEQ ID NO: 429612 - DNA, 368 bp, Homo Sapiens
aggttgatcttctcttggagtatcttactggggttctctggatttcctgaatttgaatgttgggctgtcttgctaggttgggtagttcttctggatgatattctgaagtatgttttccaacttggttttgttctccctgtctctttcaggtaccccaatcagtcttaagttcagcctttttacataatcatagctgtcagagattttattcatttcttttcattcttttttctctaaacatgtcggcctgtcttatttcaaaaagatagtcttcaagctctgaaattctttcctctgcttggtctattcagttattggtacttatagttggcatttgtggaagttcctcgtgttggggttattccagc

SEQ ID NO: 429613 - DNA, 232 bp, Homo Sapiens
acaggggtgaactactgcacctagccaagtggtagtttcttaaaggttgtttgcaatggggaatctgaaaccatatcaatgaactttttgtactgttatttaaaatccattagtctatcttgcacttggaatggatcatatgtgacagaattagtctagttttgatatgtagatatgctacttgtttaattagtactttaagtgtttagccatatgccttttctgttaaatg

SEQ ID NO: 429614 - DNA, 442 bp, Homo Sapiens
  misc_feature (370)..(370): n is a, c, g, or t
  misc_feature (380)..(380): n is a, c, g, or t
atatgctataataatttgtaaataaaatatataaacttcatttagcataaatgttttctatcaataaccatgaaacattatttttattttttgtagtgactaggtctcattgtgttgtccaggctgatctcaagcccctggggtcaagtgattcttccgcctctgcctccgaaaatgctaggattataggcatgagccaccatgcccagccaattttttttatattgttccttatctatgatttatttaataaggaattaagtgacagatcacttcaagaaataatacatttttgactgtattattttgttttcattttggaaataatacatgtttattacagattatttggaaaatgcagaaaaataanagataaaganaataaaagtcatgacctaccttcgagagattaccgctgcttgcatattggtgtatgtttttc

SEQ ID NO: 429615 - DNA, 137 bp, Homo Sapiens
cccagaaagaagcaggaaccaggaggccgttacagttgaccagaagagagacgatggggcctgaaattaagtcaagcctgatgggacagagaagaaagagcagaccaatttaagatggactgtaagaggtgaaaata

SEQ ID NO: 429616 - DNA, 319 bp, Homo Sapiens
ggcaggcccatacttgcttgagagagtttatggacttgtgggaagaacaaaaggggatcaagatattgttcaggtctttattgactggtttgaaaaacccagcatgggttgtaggccttgtttatataaagctccaccagctttggtggtttagcccaatggaaatcgggtggagagagggaaatattcaattttatgtagatgctggtgaccaatttcagatctggaaaagatttagtatgatagataccttctgcaatacatactgatcagatatcaggcacatgtaattagaaacccatatatttcaacattctga

SEQ ID NO: 429617 - DNA, 345 bp, Homo Sapiens
  misc_feature (243)..(243): n is a, c, g, or t
  misc_feature (268)..(268): n is a, c, g, or t
tggtgttagccactgcacctggcgagttttatagttttaagttttacctttaggtctttgattcattttgagttaatttttgtatatggtatgaggtaggagtccaaattcatccttttgcatgtgtctatgcagttgcccagccctattacttgaaaaattattttcaaagttcttttaccatcaaattgttttggcatccttgtcaaaaataaactggcagagaggtaaaggtttatttcnacactctcagtttgttattccattngatctttatgtctattattatgacagcaccaccttgtcttaaatcactgcagcttttgtaacaagttttgaaaccaa

SEQ ID NO: 429618 - DNA, 265 bp, Homo Sapiens
  misc_feature (91)..(106): n is a, c, g, or t
gtgtttcattcccataggcttcatttggcctgtgtcccttatctttaggggaagccaactttcagcacatgcgctaccaatgtagcaaagnnnnnnnnnnnnnnnnaaagagacatttaacaaattatgcaggctgtgatgtccttcattccagctcaaatttctcctactgaatatgctagaacttaaatccacttccacgaagactttcaacaagagaagatgaaaatcctattcctgctatatttaaactcacatctactag

SEQ ID NO: 429619 - DNA, 185 bp, Homo Sapiens
  misc_feature (56)..(113): n is a, c, g, or t
  misc_feature (175)..(175): n is a, c, g, or t
tcattgcccagcgtagggctacgtatttttaaaacatgctcccctcaaactgccgnnnnnnnnnnnnnnnnnnnnnnnnnnnnnnnnnnnnnnnnnnnnnnnnnnnnnnnnnntacttataatgacaaaggttaatatccttaagtatcatatttataaatccataagaaagaanaggaccctgg

SEQ ID NO: 429620 - DNA, 161 bp, Homo Sapiens
ggagacaaggtctcgctctgtggcccacactggggtgcaatggcacactcatgactcactgcagccttggtctcccaggctgaagtgatcctcccactacagtctccccagcagcagggactacaggcttgtgccaccactcctggctaacttctgcactt

SEQ ID NO: 429621 - DNA, 454 bp, Homo Sapiens
  misc_feature (80)..(107): n is a, c, g, or t
tcctctcaaaatctcttctacctttggcatcaattgtagaaactaaatgtctgctgtagagttctatcctttagtcatannnnnnnnnnnnnnnnnnnnnnnnnnnnaaacaaagttctcttctctgcctccccacccaataaactgagtggatgtatagttatgccaagttgtggaaaacacatttaacacatttaagaacgtgccaggtatgaaatataaagtatgttatacctaagattaaaatattaattcgatttggggattatgccagtcaacattttggttttacatgcattcaattcaactaacttatgggtatcttggttgaaatgatgcatttaaaataattactgatttaattaaaagaaaactaaggaactttttcaggctgagaatgacattaaattatcctggttcttgagcgcctccccagagggctgggggttaaata

SEQ ID NO: 429622 - DNA, 141 bp, Homo Sapiens
ttacctaaatttacacagctgatttacagtggagcctaggttaaaatttgagtctctttctaccttgccatgtttatcattatgtgtttaataacataatataacctaacaaataaataatacgcttttacaaacaaatta

SEQ ID NO: 429623 - DNA, 380 bp, Homo Sapiens
  misc_feature (272)..(272): n is a, c, g, or t
  misc_feature (284)..(284): n is a, c, g, or t
  misc_feature (327)..(327): n is a, c, g, or t
  misc_feature (334)..(334): n is a, c, g, or t
  misc_feature (346)..(346): n is a, c, g, or t
  misc_feature (355)..(355): n is a, c, g, or t
  misc_feature (369)..(369): n is a, c, g, or t
gtctcgtccgtgtctgtggctttcaacactgcaaattagtcaccaacatctaaacactcaaacatatacaaagacctaaactagcaaccctgagcccatactcatacctgccaacagctagtgggccctgtgctagaactgccctctctagaaaaggcacatgaacttgccagccctggtctaagaagggcaaatgaaataaaaccttcctttccttctcccacagtagactcaatgctgccctgaagaaacagacgagaaacaggaggaanaagggtggggancctggcccagatctccctcctccaacctgctgtgaaggtaaanctctcangggactcccttntccagttgnaaggatctgttgtngaagcaaagcg

SEQ ID NO: 429624 - DNA, 147 bp, Homo Sapiens
acgattttaagatgaatatgctctcaaaaagctctgtgctggtcttcttaaattaattacggaaatttatagaggaaatcaagcaaataattctaatgaaaagaatcaaaagagtattttctaattttgcgatctatattcctggaa

SEQ ID NO: 429625 - DNA, 359 bp, Homo Sapiens
  misc_feature (187)..(187): n is a, c, g, or t
  misc_feature (308)..(308): n is a, c, g, or t
  misc_feature (331)..(331): n is a, c, g, or t
  misc_feature (340)..(340): n is a, c, g, or t
agctacatttttttaaaaaggacacagtaagaactttccccgtgttttcagctgagttcttttgtaacagtggtaacaaaagttcttttcaacctggtatagaaaattcatctaatgccatttgagtctacatttgctctgttctatgatttgcttcttatagaagtatcttgtagccaaagtcacngaagtagatgagaattaccccgaaatttcagacctttgacatcagtgtggttgtgctgattgccaggttcataattgtgatttcattttcctaagaaaaatctaatgataaatcttcctancaatgattgatcagtcttccatnaagtcaccnagatattttttttaaccgg

SEQ ID NO: 429626 - DNA, 200 bp, Homo Sapiens
ctcaatcccttccactggtagcaaaggccctggatccctgtcttctgccaagatggtgccaaatagctcaaccatacaaaggaaatggatataaaacttaattgggacccagagacatctaatctctaagttaaagcaccactccttttactcataaccattggaggcatcccaaagtctagaaaagccgaaatgaccct

SEQ ID NO: 429627 - DNA, 374 bp, Homo Sapiens
tcatagttgtatttcagtttttggaggatggaactctcatggattacgtattagtctgttttcatgctgcttataaagacatacctgagacggggtaatttataaagaaaaaggtttaatggactcacagttctacgtggctctggaggcctcaccatcacagtggaaggtgagaggcatgtctcacatggcagcaggcaagagagaatgagaaccaagcaatggggtttcccctcgtaaaaccatcagatcttgtgagacttattcattaccacaagaacagtatgggggaaactgcccccatgattcagttatctcccaccgggtccctcccactgggtccctcttttgaattatgggagctacaattcaag

SEQ ID NO: 429628 - DNA, 623 bp, Homo Sapiens
  misc_feature (411)..(423): n is a, c, g, or t
  misc_feature (538)..(538): n is a, c, g, or t
  misc_feature (592)..(592): n is a, c, g, or t
taggtctcaaaagtaggcttaaaatattcagttagccatgctgtaaacagatggctgtcatccaggccatgttgttccatgtatagagcataagtggaggaggtttagcataattattaagggccctaagattttcagaatggtcaatgaggattggagtcaactttaagtcaccagctgcattacccctaatgagagagttagcttgtcgtttgaagctttgaagccagacactggcttctctctagctatgaaagttctagatggcatcttcttccaatagaagactgttttgtctacatttgaaatccactgtttagtgtagccgtcttcatcaatgatctcagctacatcttctgggtgacttgctgcagcttctacatcagcacttgctgcttcaccttgttctgnnnnnnnnnnnnncccttaaacctcatgaaccaacctctgctagtttcaaacttttcttctgcagctcccttacctctcttagccttcatagaactgaagagaaagccttgctctggattaggcttanttaagggaaggttgtgtccgttgactctaaccagaccaccaactttctccatanagcataaggctgttcccttaccattggggtt

SEQ ID NO: 429629 - DNA, 261 bp, Homo Sapiens
  misc_feature (130)..(130): n is a, c, g, or t
  misc_feature (226)..(226): n is a, c, g, or t
  misc_feature (246)..(246): n is a, c, g, or t
tgacactgtgcctggcctaaaaaatttttttagatacataatatttgtacatatttacgtgggtacatgtgatattttgttacctgcacggaatgtaatgttcaagtgagggtatttagggtatccatcnccttgagtatttatcatttctatgtggtaaggaacattttaagtcttccagctattctgaaatagacaatacatggttaactatagtccaccctantctgctatcaacattagacnttattccctccaacc

SEQ ID NO: 429630 - DNA, 129 bp, Homo Sapiens
gaagtctgcaagaagagactgaatggggaacacagagtaggagagcagacatagtgagcaaggctgctgcaagcttaggtgagagccatatgtcaggcagctttgcatggcaggttaaagagtttcagt

SEQ ID NO: 429631 - DNA, 224 bp, Homo Sapiens
  misc_feature (184)..(184): n is a, c, g, or t
  misc_feature (194)..(194): n is a, c, g, or t
  misc_feature (204)..(204): n is a, c, g, or t
  misc_feature (210)..(210): n is a, c, g, or t
gttgtaaattttattgtgatgaaatgtatataacacaaaagttgccattttaactattttgaaagtgtaccattcagcagcattaattatattcacagtgctgtaaaaccatcaccactacctatttccaaaaattttcatcactgcaaatacaaactctagcaataactctccattttcttcnccactttctnctcatccaangcctcnggtcaactctaatc

SEQ ID NO: 429632 - DNA, 500 bp, Homo Sapiens
  misc_feature (42)..(42): n is a, c, g, or t
  misc_feature (313)..(313): n is a, c, g, or t
  misc_feature (408)..(408): n is a, c, g, or t
  misc_feature (426)..(426): n is a, c, g, or t
  misc_feature (478)..(478): n is a, c, g, or t
cttcaatgagactgctgagctggcacaaaaagggagcgaagngggaagaaagggaaaggaaggcgaacttcgggcgcttcgaggggagcaaatttaaatggcccccagctcatcagctagtttttggttctgaaatccgttcaggggaatttgcacaggggacgaggaaaattgtatggagacataagctgaatcaccatgatttttaaatgaaagtatcgacgtatacatgcttttttccccctttttctcgtttaatatcagggaggcatcaccgttttttgtgtatatccaatactttgctgaaggaaangttaaataatgtgccagttttttctactcttgggggctaatcgtaaaggtttctacaccaaggaaaacttttaaaaaagatattttctgtaattnattttaaaacgctaaatnaggcactttaatgatccagaaccccctcccatatttttcgattatatttatnttcatgccacttggaaaagaaa

SEQ ID NO: 429633 - DNA, 321 bp, Homo Sapiens
  misc_feature (303)..(303): n is a, c, g, or t
gagatggagagtgtgggctgggagtggggcaggagtgtacaggagattttaaaggttctggacatgaagagcttgctcaatgaatacagtgtgagctctcctgtctcatctccctagaataaaactctttgtcactgatactcgcatcccgggtaggaaaggaaaggcaaagagtatgttgaaaacatctctcactcttttcacagctaaagtattacccaaaaagtcactattctccctcttcagtatgagaatagtgactttttgggtaatactttagctgtgaaaatttttcttctaaantttttcctactcttgaac

SEQ ID NO: 429634 - DNA, 255 bp, Homo Sapiens
gctttctgccttctaaagtgcaacagtatatatcttgtagaactgtgggaggagagaagataatttttctaccttactccatattcttacttcaaactattttgaatagaggttcactgagccattgctgatagactgtgcatagctactagctgtcacactattgtaggttttttgtagagattcatagggaagtgaatgtaaccaggaataaaggctctcactttagctctgggactatgcaagtggatcttg

SEQ ID NO: 429635 - DNA, 337 bp, Homo Sapiens
gcaatacccaaatcctttcaaatatctgaaaagccttcccaagaaggacagaaagaaataatcacagacagtgaagactacaataaatacctaattcttcaatgcccagatagtgaagaacatctatcagcatcaataccaaccagaaaaacatgactttaccaaataaactaaataaggcactagcaaccaatcctggagaagcagagatatgtgactttgcagacagagaattcaaaatagatatgttgagacaactcaaagaaattcagaataacgcagagaaggaattcagaattttatccaataaatttgacagaggttgaaataacctaaa

SEQ ID NO: 429636 - DNA, 209 bp, Homo Sapiens
  misc_feature (157)..(157): n is a, c, g, or t
  misc_feature (159)..(160): n is a, c, g, or t
  misc_feature (164)..(164): n is a, c, g, or t
catttctctctaatgtgacgtaaagttaatagaccccttgaacagattcatcttgaaatatgaagatcaatcatccatggttcaggtcaaatacctgctcacacatatttactgagcagactagtccaaatttttcaacaaagtaataatacaaatngnnttgngggagggaacaaggactccttgggtctaggggtgtttccccaagc

SEQ ID NO: 429637 - DNA, 448 bp, Homo Sapiens
  misc_feature (335)..(335): n is a, c, g, or t
  misc_feature (413)..(413): n is a, c, g, or t
tgaacttatatttgtcaatcagggcatgacaaactttgcaatcctctcagggtaaaagaagtatataaaaattttcttataaatgcactatccctttaaaaatattttcctatgaacaagaaaagaagggctcagtaggtttatctgaagctactctgggttacaaaggagggcactggcaaaactgatattaaagagaagggatccacgttcccacactgtatgtattactgcgcatttgtctcctaatgaaaagtgaccttgtactccatgcacgagaccacacctcacataacaacatctgattttgagccttatatttcttaacagggatnaggacaggaccccgaatacagatgcttcagatgcttctgaaaatcatatttattgaagaagtgcttaagcctggaggntggccatcccaattggagagacgactgaagagatt

SEQ ID NO: 429638 - DNA, 291 bp, Homo Sapiens
  misc_feature (195)..(195): n is a, c, g, or t
  misc_feature (234)..(234): n is a, c, g, or t
  misc_feature (245)..(245): n is a, c, g, or t
  misc_feature (273)..(273): n is a, c, g, or t
tatagtatctaccttctaagattgtgctgaggatcaaatgtgtggtatatggaaaacatttgcagccatgcttagacctagtaagcattttacattttagctatcatataccctgactgcattaacccatgtgtcttaaaatttttcttccgggaaccaggatgttctaggtaggcacacttgatttttctaaangaccgtgtttaaattgtcaagtgttcacactgagaaaanctctgtaaacnaaaagaaaggttttaattaaattttacnaataagtagcaacgttaa

SEQ ID NO: 429639 - DNA, 495 bp, Homo Sapiens
  misc_feature (307)..(307): n is a, c, g, or t
  misc_feature (317)..(317): n is a, c, g, or t
  misc_feature (419)..(431): n is a, c, g, or t
gctgtggcttggtgcagggtgcagacaagagagggaacaggaagaaagagattagtgtaaactgtgaaatcaggcaaagctagactcaaattttgtctctgttttctagtaactatgtgtgaccttgaattattgaagctctctaaacttccactttcttgtttgcaaaatggtaccgatggcatctacatatagaattatagtaaagagtaaatgagaaatacatgtgaatacctagccgcttctggaaaatagtatgtactcagttactggttatttttattatcgttgtaattactatttccangtgatgtgantgcttattacccttccaaagcaagtacttttatattttgaataagtgaaagctctttcccatttatttctaaacccttgtcctacttctcagttctagaacnnnnnnnnnnnnnccctaatggaaggaaagaaattaaggaaggggttggagagagaagagagaggaaaaagcacctt

SEQ ID NO: 429640 - DNA, 123 bp, Homo Sapiens
taggattttccttactttcttgctagtttggctgtgcattcaaaaaaactctctattctttctgaattgtatgttgggatagtacaaaagagcttattttgagactatttagtctgccatctt

SEQ ID NO: 429641 - DNA, 178 bp, Homo Sapiens
  misc_feature (41)..(41): n is a, c, g, or t
tcccaaatgaattgaaaacttaaatacacacaattatgaantaagatgttataattatctgtgcagacttttgtgtgtatatacgttatttctcacaaattcatatatttacttcattgttagtcagtggagtacatacacacatatagatgtctctgagtcaccttaagtcccataa

SEQ ID NO: 429642 - DNA, 172 bp, Homo Sapiens
  misc_feature (23)..(23): n is a, c, g, or t
  misc_feature (26)..(26): n is a, c, g, or t
cggcactaggggtatctcaccanganagggtaggctactagcatatcacatttcccctggtcccagttgtatagcctaaaaaaagtaaatgtgtaacccactccatatcgtcgcttccacacctatgatgcatgggatccctgtgaaaaaaacaacacccactaaagatgaa

SEQ ID NO: 429643 - DNA, 127 bp, Homo Sapiens
ataaaaattccaggcctataccccagaggaaatcttatcagcaggtaaaagaatttctcaggctatataaccctggcagagtaggtaaacaagtcagaaacaagatatcctggaaatacatgattta

SEQ ID NO: 429644 - DNA, 433 bp, Homo Sapiens
cggcacgaggcactgattgaggcaaaaacaattctctctggtaaaactggtttaaacgtggcaataaatcaatctaaaagcaacttaaagattctttcatttctttttctgacagattcacctattgacattatgaaatttctgtgtaacaagtaactatttgatgtgttctatcaggtcaagcttactcacatcttaaatggtttcaacatccaaattcctaagcaaggcttcaaatgaagaaagaaaatatcaacatatgctagatcgttcaaagtgaccttgttttaattaaccatttgaaattttttttactatacatcacaaatacaactccttcctccccaaattccaccactggtcatttaacaaacccattttatatggcaaacatgaatcttctacatgggtacacctttcccaaaaaactgtc

SEQ ID NO: 429645 - DNA, 132 bp, Homo Sapiens
  misc_feature (49)..(49): n is a, c, g, or t
  misc_feature (66)..(66): n is a, c, g, or t
  misc_feature (90)..(90): n is a, c, g, or t
  misc_feature (98)..(98): n is a, c, g, or t
  misc_feature (116)..(116): n is a, c, g, or t
atgttactacttagaaacacaaacataatatatatgtgatttgtggtancaattctactggacaantccaccttaagagttaggtagggnagggtacnttaaaggctccagtgtcnggtgaccactaccagg

SEQ ID NO: 429646 - DNA, 273 bp, Homo Sapiens
ttacaagagctgagcttcttaaactggctttaagtaataaaattacggtacttagcctcaaaactataggtccttttaactgctggtgaagaataagatgaagaaaatgttcttttccttgcagccaagtgattctggtttgagagttaatcagctcagaatttgatctaactgggggcaagtgtttttttctttctctgtgataactgtggcttctcagagtgagtaatcacacactgttgggggccaaggagtaaagggaaaggccccagg

SEQ ID NO: 429647 - DNA, 338 bp, Homo Sapiens
ctttgtttatttttcccttcttttcttgtatcattttttggattgtcttttattggtgcttcgcattttcgctgtgtccctccctgattagtttattagctgtcctcctgtattctttttcaggtaaatcagggatttcttcttgatttggattcattgctggtaaactagtgtgattttgggggagtgttgaaaagccttgttttgtcatattaccagcgttggttttctcgttccttctcatttgggtaggctctgtcagagggaaggtccagggctgaaagctgctattcaggtctttttgtcccatggggtgttcccttgatgtaataatattc

SEQ ID NO: 429648 - DNA, 404 bp, Homo Sapiens
atgcctttgaggcttttccacagtgtcagctgctgactgatagtaggaaaacggcctcgtggtgtgaatgaaagggacctagcggttggtaaacagagataaggaataaatagagcacaggcaaaaggagatagttctgtgggggcccagattgctgccagtctgttcaagggagatgcagagcctgtccttttcccagattaaattagtgtgcgaaatctccagtgacctcctccccttctccccacactctttagccaagctgaacagcctctgctgtaaagtattcattttatccagggacaagctggacaatagaactctctctgatacttatggacagctgtcgtcattcatagtgctctcagcatttcatttttcataggagttaaaagggtttttac

SEQ ID NO: 429649 - DNA, 472 bp, Homo Sapiens
  misc_feature (258)..(300): n is a, c, g, or t
gtatgtttactttctttgctcttactttccttggtttttatctttttatgaatgattttgaaaatctgtctgaaagtgcacttcacatattaagcatattaacttattgtcacattgcaaatattttctcagtatattgttgcttttgatgttattaaagttcctttttgaggtatagttccagacattcatttcattaattctatccatattagacttagaaagacccatttccttttagactttatgactccaacnnnnnnnnnnnnnnnnnnnnnnnnnnnnnnnnnnnnnnnnnnnagttaccaaaagtgtgtgaagtaaaaaaatgcctccaacatgttcttctaaagtgatagttaatagtacctatttcataattcactttttcctagttgatttgaaatttgggcccacatccctatctgagcccttgatgctcaatgtattgtggaaattcagattttttttg

SEQ ID NO: 429650 - DNA, 192 bp, Homo Sapiens
cttctgtagcacggaggccactatgaaatagcaaactcttgcacttaatttgtatcttgtcctgcttaccggcctagaagctcctaaatagagtaaacttttctgtacattacaaagtgcagctgtttaacgtttgcaagttaggaaagtcgcttctacttggttttcttctaataatactaaaaggcatac

SEQ ID NO: 429651 - DNA, 149 bp, Homo Sapiens
agaagccagcaaaggcattgtttttagcttcgggagcatccacaatttattatgttaactctgtctctgcctttagtaatttttgctcttaccttccaaggcagtggatgagaaaagtcaataagcacttaagggacttccctataaca

SEQ ID NO: 429652 - DNA, 265 bp, Homo Sapiens
tgccaaggagaaccttttattctttggggacttgccggtgcatatcacgcggctctggcttctcacccttactgtgtcttcgacgggggtcgtgaacactatctcatcttttggttccaaaatcctcacgtgttcaggcagtgtgatcgtagggccaatctgaccagtagtggtcacagcggcaacataatcttcaccttgacgcccaccaacgcacctgtcggcaacaacactatgtcgcacaacaagtgtctacgtagtagtt

SEQ ID NO: 429653 - DNA, 461 bp, Homo Sapiens
acaccctcatcaatagatggctatatgcagaaataggcaaaccgcaactacaaaactgccattatataggccgcgggttcgatcccaaagtagtgtttggatgtaaaaggaaacctcaattggcggatggagcacatagcgaagcaagttgagccgataatgccgttaaatccctgcgagcctgcggtactaaaaaatgttgggccgaagatgccgtcggaaattgttaagggagatccgaattaatcggacatttttaggagggtaaagtatacacccagtacaagtgtagcaagcagatgatgaattatggcatatcggctgtgttctattatacgatggtgagcctcggtgagtgacaagtcctgatgcgagtggtacgcatgtgtttacgagtggaactactaactgattatagggggtgatgtctgttaggggacagtgccccccgaattggaggg

SEQ ID NO: 429654 - DNA, 115 bp, Homo Sapiens
aacgggtcaggaacccaacgcggggctaatagtgcattatgtgctaaaaacggggattaagcctcttggcaaggatggtgcccataacccgaaatgaggcggccacgccgccagc

SEQ ID NO: 429655 - DNA, 397 bp, Homo Sapiens
  misc_feature (45)..(69): n is a, c, g, or t
actgaaaacttttttttagtttcacaaagtggaaatggttagggnnnnnnnnnnnnnnnnnnnnnnnnngggtcaaaagaatcccctatttttgcaaatgctaaaataatgcactaatcattgagcagttttaataacaatttcttaaaaccccttttaaagatatattcactgaattcaagagaagtataacacatagttgctccttccaagggggcttactgtatacttaggatgaacataattaagtaactaaagatgcataaatagctataagccttccatgtggtaccaaagagaagtggaatgggagttagggagagcagaagctactgagggaagtggagctcacagtgatcttcaaggaagttaaactggagttttaaagatgggagaa

SEQ ID NO: 429656 - DNA, 103 bp, Homo Sapiens
ggatcgcatgtgcagagtttatatatactcaaggggtgggtgtcgatgagtgcagtcatggatccatgacgttagttgtggccatacatatgattagagatag

SEQ ID NO: 429657 - DNA, 477 bp, Homo Sapiens
acagttaaaccacattttccatcttcacttaagttagctgtggccatgcaactgagtcctgatcagtggaatgtgaaagtgttagcagcagtgaatctgtacaggtctgcagcagcctcaattcttgccacctcagaagaaagaacttgactgaggggcataaggcagagggagagactgaggcaagttttagagcaggagtgaaagtctttaaaaagttttagagcaggaattttaaaaaagtacacttggaagagggccaagcaggtaacgtgaaagattcaagtgtacagtttgacctttgactcggggctttatacactggcatgcttccagtgggtaacatctcttctcccagttcttcctttggggtgggctgtctgcattcgcactggcctgccagcacttgggaggagccgcatgtgcagtgtgtttactgaagctgtgcacatgctcacttgaggcgtttttccctta

SEQ ID NO: 429658 - DNA, 267 bp, Homo Sapiens
  misc_feature (49)..(59): n is a, c, g, or t
  misc_feature (65)..(192): n is a, c, g, or t
gcaaagggaactttattgagggaaaaagaaaagggggggcccccaaggnnnnnnnnnnnttaaannnnnnnnnnnnnnnnnnnnnnnnnnnnnnnnnnnnnnnnnnnnnnnnnnnnnnnnnnnnnnnnnnnnnnnnnnnnnnnnnnnnnnnnnnnnnnnnnnnnnnnnnnnnnnnnnnnnnnnnnnnnnnnntctaaccccttggaggccaagggggccaagagggccaccaccccgttggtgtagcaaaaatcggtgtcaaaccag

SEQ ID NO: 429659 - DNA, 107 bp, Homo Sapiens
cttgtatgagcctggtggcagtgacggtgcgatgtaggctgtgagttgcgctgcttttttagagcacttggcgagtcagaaatgcttctaggtggatttgtatgcac

SEQ ID NO: 429660 - DNA, 457 bp, Homo Sapiens
cataaatacgccctctctcaggcttgactgatccagagccatcaagattttaggccggctctacacgaaaaaattaacatctcacaaagattaacaggtcggtaaccactcaggggacactacctcacccctaaaccctttcacttttcatatccatgacctaaacccgtggatggcagcttaggaaggattataatgacaaaggagcctttctggcaaacttcctaaaacaccccaaatgaccattttgcctttttcataaagtgtaatggctatactccagacacatgcaatgttgtagtaaagaaatcaaaatcataataaaaatctctcctttctcttaaatttcttgctggaaatagtactagctggctcctgtttccacaggcatgaagacacttgcccctaagttcctgaaataagcagcagccatgtccctttactgcccagagccaga

SEQ ID NO: 429661 - DNA, 142 bp, Homo Sapiens
ccacgcccacactctcgcggtgaataagtcggccgccgcggtagcacttccgggccttcaagttattcggctcagtgctgtaggtctcgctgttcctctcgatcaggagaacgcacgagtctgctactaccatccagtgcag

SEQ ID NO: 429662 - DNA, 291 bp, Homo Sapiens
ctatcaagagatggatacaaacattattagtcataccacatccacaaaatgccagtaacttgctgcggttgcgtagccaaagggttgccgggatggatagtgaaagataaggcggcggaggaagcagacagtgaggaaagttgagccaataacgacgggaaggccgtggaagcctgaggtatcaaaaaatgatgagccgcagactccggcggaaagggttaagggagacgcgaaggacgcagaggctgggatgaggggaaaatagagacccagtaaaattgtaagaagcag

SEQ ID NO: 429663 - DNA, 172 bp, Homo Sapiens
  misc_feature (158)..(158): n is a, c, g, or t
tatacttgtcatctttttctgtatttcttctgttggctctctctttgcggtgagattgatggtctttaactttcttctcctgtgtatattatctgtgtggactctcagatactttcctgggatctgttatttttctctctcttactccaactggtctnctctgattctcttt

SEQ ID NO: 429664 - DNA, 145 bp, Homo Sapiens
caaaaacagtttatctagtttctccatggagaagcactgctcgtcatttgtggaacaccgcatccttggctacacgttcagataacccagacattaagccttgaattggcacgtcatatgggcccttatttgcgagaggagtttc

SEQ ID NO: 429665 - DNA, 438 bp, Homo Sapiens
ctgaaatgatgaatgattctttgaaaggtttcaaatgtaacaaagtgccatcttcacaatatacactattgctgcattactagaaaatttggtgtggattaaaaccatgtaaaaatatttaatacttatacgtaaaaagtagttgggttctaggctcagagaattataaatgcattttgttttttcacctatgtgaatagctgctgggactttttggaagttgtgtgggacacacagcaaacctccctggtgaaaggctgtcccatgtatcccaggacatctagcctccctggcctctgcccaccaagcaccaggagtactccccagtcactgtcccctgaaattttctgaatgttccccagtgttaagaatcactgttctatttttttcaactgtcttcaactttgactcctcatccagggtggaggatctttgagg

SEQ ID NO: 429666 - DNA, 469 bp, Homo Sapiens
tgggtacatagtaggtgtatatacttatagggtacatgagagaggctttgatacaagcatgcaatgtgaaataagcacatcatgaagaatggcatatccattccctcaagcatttatattgagttacaaacaatccaattacacactttaagttattttaaaatgtacaattattattgactatactcaccctattatgctatcgaatagtaggtcttattcattcttctgcttttttgtacccattaaccatccccacttctcctcaagtctctccactacccttctcagcctctggtaatcatcctggagttcaattgccttgatgtttagattccaccaataagtgagaacatgcgacgtttgtttttctgtgcctggcttatttcacttaacataatgatctctagttccaaccatgtcgttgcaaatggttggatttcattcttttttatggctgaatcgtact

SEQ ID NO: 429667 - DNA, 173 bp, Homo Sapiens
  misc_feature (111)..(125): n is a, c, g, or t
agattggaggtttttggaccacatgagtaatgtaaatttgaactctgtatctacatgaaggcagagccgattaaaaaattatccaaaccaaaaaacttatctacacaaacnnnnnnnnnnnnnnngcctcactcagagcttagctagaagacaaacttcctatgccattagat

SEQ ID NO: 429668 - DNA, 307 bp, Homo Sapiens
gatgagcatgtgaagacaatgctaaccgaggagctttagcgtctggcaagtaagctgaagctggaattgtgggggcatgacatgctgcatggcgataaggaatggataatgtagtagtcgtctccttcttcctgacgctctgcatcagcagagttcacgccgacctcctcataatccttctcaagggcagccatatgtgcacgggcgtctgaaaactcggcttcctccgtcccctcacccagtgtaccaatgaacaaaggcaggcttgtgcatacgatgcaggtcaatagttgctgcgtccagagcg

SEQ ID NO: 429669 - DNA, 304 bp, Homo Sapiens
cccgcagcagggactccagaggggcccaatcgatcatgcggcccaggttgagggagcaggagcggctgcagcctcgaaggtgaaatccgttaacaagcacctggaaggtggggttgacgaggtgctcatgttgacaggcgcctgggttctgctcgtcgtagaaaatgtttgtacggccgcgaaggatcaaggacaccaaggtgtggctgaagatcctcagtgtctgcacgctcttgcgggagcgcttctcgcagttagtagggtacggatccgcgaagtactcattgcggatagactccaggtc

SEQ ID NO: 429670 - DNA, 169 bp, Homo Sapiens
tgttttcccgcgtgaatgagggttttatggtgttaatgtggtgggtggagtagccccacttttttgtggtaaatatgtagaggtgttatggggccgtgacgagtgtatttagtcctgtcagaaggggagtgaaattttatcggaggaacgtggttaacagcgctctgag

SEQ ID NO: 429671 - DNA, 242 bp, Homo Sapiens
ggggtagaacttttatttttccctgaaaatgtgtctataatgtatgttgaatagggtcatttggctttgcttctagatgtgttcagtggcatagactctgtttgatttctttggttataaacagccttagtaaggtggctttctcaaatgccacttgtaatggcaatgtatataccaggcaagtaccatgttcaaggccttctaggtagccaaggtgatttgggcaatggtggtagcagagg

SEQ ID NO: 429672 - DNA, 478 bp, Homo Sapiens
attcaatttgtaaagttttcatctatgtaaaacgcagggaattaccggtgttatccatgtattctcaacagtcagataaagagtgatattggaccatccccatagggacacttacgctttggctaatccaatataaataagggtaataacacctcatataataatacagtattaaaaagatgttacattacgagaggagacaggaactgcggtgatgatttcttagtatgtaggagatgtggctcattgagaagcatttaggcttaggtgtcctcctctgaagacgtcttgtgtctggcgatctcagtccagttccaggtcttacacttactccttgatctagtactcagtggggtacagcgagaaatgcttgcctcctttggtctggaataccacatgcggctgggaatagaggctgtcggttctcaagtaatatctcacaaagttgtgaggaagcttctggcggtgtaataaaagc

SEQ ID NO: 429673 - DNA, 232 bp, Homo Sapiens
gtggaaagacggccctttctgtagcttgtcaaggcgtatcacgctttttgcagaggcattctggaggccttgtgagtaagtgccgggatgatcgtctgattcaattgtagtaagtattttgtagtgtagtagcagtataatatgatcctgtttagtacaaccacaatgcagacatcaggtccgtggttacacaggtcattgacttcatagatcccatctaagatttctggag

SEQ ID NO: 429674 - DNA, 154 bp, Homo Sapiens
gggcatcgatctgccacaagagatccccttcgcggagcaccactgaacggagatcaccagtgtggggggctttgccacgatctatcgggccctgaggcgtggcgaggcggtagcagtctagagcgcccggcgggatcctgagaacgagtcggca

SEQ ID NO: 429675 - DNA, 382 bp, Homo Sapiens
tccagtttgggtggaaacatttagtgctaaaaagctaggatattaatttgctgacagtcttagtctaaattccgctgtctcctcacctatcgagaatgaattacaccatagatctctgtaaatgcaatacagcagaaaaccacatgttagccatcagggttgcattttttgttctgggccacagagaggctactcatcagtgcataaaggtctgcccacctggccttttggatcatagttcaggcacacaattaattcattatgaggtaagtcactgcttgcttttgaactcgtctttccagatttggaggtgaatgtcctgtcactgacctgaagaaatacctctacccttttaaactccattaaatcacatttccctctg

SEQ ID NO: 429676 - DNA, 396 bp, Homo Sapiens
cctagcagttaaagccaatacctaaaattatatgactggctttgcttaagattaaagtctagaaaaagttcctgaccagtaccactgccctgaagacagggattattggacatgtgccagagatggcattacccaggctcttatggaggcaattgtgtatggaaatgagaatcaatgtcccattagaaaagcctgtgtttaattgactataaaaatatgcctgaggctaatggaatgttataaagaattatttaaaggattgcttttcttttcaaatctttgtaaaggatgttttgcagatagagaactatgaatactaagtcttgtttgacaaatgtaaaggagaaatcaactaggaatgtaccaactattgccctgtttaagagttatttgtgc

SEQ ID NO: 429677 - DNA, 438 bp, Homo Sapiens
cccacctgtccctcatcgctcccataaaatggtaggcgacattaaaattgtcaattattgaaataacaaacaaagtaataacaaatagcatcttatttaggtcagctaatgcatattgcttggagtgatttcatgtttcatgttgtagtgtattgttgttatggaaaccatgggtcaggacatgtaacaaaatacaccgcttccaaccacaaataagagatacatttaagccacctctgatattaacaaatacaaagtctaaaaacaattgacagcaagcaaagttaataacagcgacttcacgcagaggctctggtttagggcccccctgagctcatgggcccttggcgttggccggataggcccgtatcgctaatccatccctgcacgcacactgcattgtatttcttagttagtaacgcacatatctagtaagcc

SEQ ID NO: 429678 - DNA, 365 bp, Homo Sapiens
attagatgaatttgagggtttgattctcgtataaggttgattcagccagctggacttatttctggaagattttagggggccaatgcacagcccccaactcctagactatatgttttaattctggaagatttgtactgggtcccaactttgttctctggtttcttaatgataggaatccacttcactggggaaggggccaaggaggtgctcccagactgctggtcactgcactccaatgggtggtgtcagccaagtgtttcatagtgcagtgacagtggatctagtctcatagtagcagctgtggcagagtcctagtaggtgctggactgcctgactccctgtcagtattcaccacaatggcagag

SEQ ID NO: 429679 - DNA, 271 bp, Homo Sapiens
aacagatcccaggccgagcttccaccgctgattaagcctggggtcgcaggtacctagggagaaaggtcaattcaggctccagagactccggggcagaagtggtgaccttgccaagtccagaagcccttctgagcagcgccttgacgacacccggcggaactggctggacacaatcgcgaccgggcaagcgaccgcaaggtcgatagtctgacaagctctcaaaaacctgggcctggccagaaccactgccaaaagggagcatccccagact

SEQ ID NO: 429680 - DNA, 104 bp, Homo Sapiens
ttctatcttcatggcagatgttgacagctgtgacatggtttaaatttcatagtcgattcccgaaaccaagccacccaaagcaacaatgaaatttatgcatcatc

SEQ ID NO: 429681 - DNA, 142 bp, Homo Sapiens
ctttgctgttagcaaggaggggcaaccagtcacgtagactattctggtacgaatattataaggcgagatagttcaaaaaactttaggagaaaggcacctcggaggtcacggtgaactggcacgtgcaccaatcggtggtcac

SEQ ID NO: 429682 - DNA, 320 bp, Homo Sapiens
gatccctagatgccagataaacatccccttgatcttctgggagcctaaggtttttacttggtcccatgggatgcaatagggctaaggccttcatggaaagttggaagtcaaactcgggagggagattagcccagcctcagcgacccctcctctttggacctgtgatagagattaatgaaatccggggattagtaccgaagatatcgtgtgctggcatgagcgcgggctctgggcctttctgggtcccaggctgggagctggctgaggcgctggagaggagcagtaaggaaggttggcatctgggtggacccgatgtcagg

SEQ ID NO: 429683 - DNA, 112 bp, Homo Sapiens
taaaataaaatagaaccccagactctataggttatactcctcccttcaaaagtgtgacattctatcattacatcagtttcctccaaagtaccacttttgataaataacttca

SEQ ID NO: 429684 - DNA, 423 bp, Homo Sapiens
gcccttggaatatttttattgtctttgtgacatgtatttgaccattcttaaccctcgaagatttcaaatgcaagcccttctttgtgactataattagttcaggttcaagatccctaggcatttggccaggagattattctaaatcaaatttgcttaattaaattaatagtatatttgtggagcacctatcacatccaagaagcagtgctacaagaagacgaaaagtgttcttctaggtatatcttggccatgctaacagtgacagtgctttacaataatttttagtgtatggctacaaacccttgcctatttttacatttcaggaagttttatttcattcagcaaatgcttctttcacacctcctatgtcacagaagtatgtattcatgaatggaaatccaaggtgacttttttttctgggcc

SEQ ID NO: 429685 - DNA, 199 bp, Homo Sapiens
actgatatttgttttatggcaaattgtgtttttgattttacagtatgtgccatgtgcagatgggaagaatgtatattctgttcgttttaggtgaagagttctgtagttgtatgttagttttggtcaagtgtcgaattcaggtcctgaatatctttcttagttttctaccttgatgatctagctaatactgtcagtgtga

SEQ ID NO: 429686 - DNA, 142 bp, Homo Sapiens
cagccaaaattccaattaactcttaaaagaagtatacactgtgtgaccaaggaagcacagagtgattcattctgagaggggagaatcacaaagcaaggaacatagagccacgctttggaagagaagtagaataatgaaagtc

SEQ ID NO: 429687 - DNA, 415 bp, Homo Sapiens
gaggcaaggtttcactctgtcacctaggcgggagtgtagtggtgtgatcacagctcactgcagcctcagcctcttgggattaagtgatcctccctcttcagcctcccgagtagcagggaccacaggtgcgtgtcacatacccagctcatttttgtatttctagtagagactttttgccatgttgcccaggctggtttgaaaagtttcttatgcaaagcttttgcaccattgtcaaaaatcagttgtatatatttgtgtgggtctatttctgagttctccattctattctattgatcaatgtgtctatacctctggtaataccacactatcttgataaccatagctatatcaggtagagtgaatagtctcactttgtttctttttcaagatcatttcaggcattcttgggcctatg

SEQ ID NO: 429688 - DNA, 423 bp, Homo Sapiens
gaactgaattcatcaaccatgtacccagtaaggaaattaaccaagtgaaaatgaacttttctaaagctttttgtttagcttaaaccagatactgaccacaatgatcacactatctagtcacattatatgtttagagtactagtattatttatgttacttattgactccttcactagagtttaattctccaattaccttgcatgtctgttaagtcttagatgtgtaatttcctccagtattatttagtgtgtacagaaaacacatgtagaaagtactgaggttttattttgtatgtctttcagatgtaaatttttaataaatcagaaaaggtactgaaagagatgctatgagcataagtgaaatgacgttttctctccacaaataagaacttacaacttttggattttatttgtaatatcacag

SEQ ID NO: 429689 - DNA, 222 bp, Homo Sapiens
gcaattccttttaaataaaccagtgagaaggatctgagtttatacttggccatgtgaaattgtctgagcgaaggttgtctctgcagtggggtcttttttaaaatgcatcactctgtagatgtgacggggtgctgactttgcggtattgggattccaaatgctgcattagcaacttttatgtcttagatcagagagccataaatggtgctctcctgccattgg

SEQ ID NO: 429690 - DNA, 342 bp, Homo Sapiens
tgaaatctttgagttatcactttgactaaatgaatgacttattttacaataacctgtgattctattttgtgatatcaagtgttttaagctttttatatttgactaactttccaaaatcaaactctaacttcggtcctcattaatttttgatattaggtaaacttgaagtccaaaaaagacacatttggcttgtttgatataataaaatcgttgtcaaataaaatcattttattataacaaaggtgaatatgtctcttttggacttcaggctaatagtattgtcaaatatgaatggggtttaaccttatttggattatattcatacaaatgtgttattagtgt

SEQ ID NO: 429691 - DNA, 391 bp, Homo Sapiens
gaggttaatttattctgtgatcacattgttattctgccaactttgttctcatggaataagtaaatatgtagatgttttggtgactagaaaaaggtcatatttccttctctcatctctagtgaaagagacagaaattatgagaatcgttcataattcagtttgaaagtagaaagccccaaagaatttttacggacttttcttccaagaaaatatcattgatatgttatttgatcatctccacatttggaagcatattctttacatctccgtttagtgtggattgggctggtgttcttctgctaggtagacaattgttactccctctgagggagaggctgctactttcccaccaaaatcgatgaccctcatcttccatagcaataataccgag

SEQ ID NO: 429692 - DNA, 220 bp, Homo Sapiens
aggggatatccacagagtaccttgtgggcattgggtgattgtagatgtagacttacacaaaagatattatctttgatttcatggcgatcatcttcttgaccatggcagtctgtcacaatgcgggggtagcagtccaatacacctccagagcatcgctgtagagtcgatatcaggtgccacatctatctttttcacaatgaagctttgcgccgtagtagcg

SEQ ID NO: 429693 - DNA, 126 bp, Homo Sapiens
gctatgtctgtctcccaccaaaatgtaaacatcaaaagggctgggctacatcggtcagcaccaatgctcaacatagtgcctggcatattgaagattctgtatatttggtaatgatggggatgagtg

SEQ ID NO: 429694 - DNA, 191 bp, Homo Sapiens
aaacaagtctctgattaggaaacttcaatctttaaagccccaaatggtgttaacagcatcagaaataacttattaaaagccttgtagttatatagtgtgctgttaaatgagagagaagcagaatggcataaactcaggttctgacttttatgtagcttatctccttaagcaaggccagaaacttttaaagg

SEQ ID NO: 429695 - DNA, 300 bp, Homo Sapiens
aagtttcatcatctggtcattagttcaaatgagagaggatgaggcttggatgaggatggttgaaattcacacgctatttaatggtggaaattgggatataatttcatgttaaaacaaataggactttttactgaattagatgtccatgatgaaagggaaaagaattagtaatgtttcctaggttttggcttgtgcatcatgggtgaatgatcatgaaagatgaaattattagattaagctactgttagaactgaatatcttattttgtatttccatcagacatctacaactgatagggtt

SEQ ID NO: 429696 - DNA, 408 bp, Homo Sapiens
  misc_feature (44)..(53): n is a, c, g, or t
acttccaagaagaacatttttctgtttattcttagaatgtgaannnnnnnnnncaactcagggccaagtacaaacttttgatttttgaaattttttcaactcagggccaagtacaatcttttgatttaaaaattttttttcatgaaaaccatcagtagttattaaggagcccaagaaataggagatgtgaaagcaggatttctttgtgtttcctttgaatgttgttattttgagtattatcattatcaggtagaggaagaaaggtaggctgggaagtaggtccttatgatatcttgactatggatcccagatttacatttcacctgtcacagagcacacataatttagataaacatgtcaagaatgacataaacagaggtaaacacaaggagctttacatttggaacc

SEQ ID NO: 429697 - DNA, 154 bp, Homo Sapiens
agatctctaatttccttcagaaggcagattgtccccatccgtggctgtgatcgttataggcctggggtattctgggggactatctccattttcaaatgactcccttgagagagagatatactttagggagaggacagaacagagactctgactc

SEQ ID NO: 429698 - DNA, 211 bp, Homo Sapiens
gagtatgctagaagttgaagattctctcttaaatgactgagtcttccagttatcagtattctcttaaattctcgtttatataaactaccttaatcttaaaaaatggtattcgaaaaatagtttactttcttaaaatttctgaaatataagattgttcaatatgctaaagctggattttgttctatccaggtggggatggaacacacagaag

SEQ ID NO: 429699 - DNA, 119 bp, Homo Sapiens
gtcctgtggaatcggctgacccgcgggttttcttctcgggtattggaaaattaaacagggatatgaggggccccagggaggaaccatcttgcctaatcagagaagggcccctgtgtctg

SEQ ID NO: 429700 - DNA, 212 bp, Homo Sapiens
atgaaccgctccgccagtctaagaagtatgttgaccaaatttatgtgaggggaagggtagggggaaaaatggtatgtaagtttcttattttaaagtctttattctacttggccctttaacaaataagacatcaagtttctaacttgctgtaatcttaattcagtaagtatttatcgagggcctactagacatatttattcctatgagtcaag

SEQ ID NO: 429701 - DNA, 136 bp, Homo Sapiens
gacccagcttggttcttccccaaggtcccctttgggagtggaaccggatttttttcccagttttcacccgaacccccgggggaaggggaggattttgcttttgtttctgggccaggaatcgcttaaccctaaaagt

SEQ ID NO: 429702 - DNA, 206 bp, Homo Sapiens
ccttttagctgtctcagaccaaagagattcttctctatttctaaaaggataatacatcattctctaaaagggcgaagtgtttctcaaataatcactgctcagagcctgaaaccagctccagacatcaacatcacatccactaaagtgaagccattatattatgctgacaagatagactgaagaatgctattctatctgagaccctt

SEQ ID NO: 429703 - DNA, 172 bp, Homo Sapiens
gggtaataattaagaagttaatgggtatctagacccatcatttaagtgatgctagggtgggttgtagaaagttttttcaaaggaggggtattagtttgtcgtggcggaaccggggttatctcttcctaattcatgagaacaagggaggcagaaatgaggttctttggaaaaa

SEQ ID NO: 429704 - DNA, 294 bp, Homo Sapiens
  misc_feature (57)..(87): n is a, c, g, or t
gatgtcaatgacatcttataatgtgtagactcaagcctttcttcagatcaggaaacnnnnnnnnnnnnnnnnnnnnnnnnnnnnnnngttatttcttctgttctgtttgttctgggattttcctcattaatagcaactattattcctatatacacaaaacatatatatttatctttccatagatttttcctgatttctgaaagaactttttaagttttttatttcacaaagttaatttctttgtaattacttcttatctcttccagctctttttgtattccttcctggctcttg

SEQ ID NO: 429705 - DNA, 327 bp, Homo Sapiens
  misc_feature (166)..(243): n is a, c, g, or t
aattttttttccttctctatgtgaacattgagtatttgatgagtctgcaaagtatctgataaaagcagaactcctgaagaaactgatgctgcaattgagaaagaaaattaacatgcaactacaggcgaatgtaagactgcaggatattaacaatagtgtaaagtcnnnnnnnnnnnnnnnnnnnnnnnnnnnnnnnnnnnnnnnnnnnnnnnnnnnnnnnnnnnnnnnnnnnnnnnnnnnnnntcagagttaacaatagtgcctacccataggattgttgggtagattaaattatataatccgtgcaaaaagtacagtattgagatg

SEQ ID NO: 429706 - DNA, 460 bp, Homo Sapiens
  misc_feature (89)..(120): n is a, c, g, or t
  misc_feature (250)..(372): n is a, c, g, or t
  misc_feature (403)..(420): n is a, c, g, or t
aagtattaataattgtcatttaataaccctcaccaacatataaaagttagaggcagttaaatgtaaaattatatgtttgaaacatgatnnnnnnnnnnnnnnnnnnnnnnnnnnnnnnnnggagagaactcagaagcccgccatctgacaaacagttgtaaggtgatcaagccaggtaactactacccaggtcatgaaactgtacattgcacctttagagaatcgcagtccgagtgtctttctctgaagnnnnnnnnnnnnnnnnnnnnnnnnnnnnnnnnnnnnnnnnnnnnnnnnnnnnnnnnnnnnnnnnnnnnnnnnnnnnnnnnnnnnnnnnnnnnnnnnnnnnnnnnnnnnnnnnnnnnnnnnnnntcagtacaagaggacgtaagggaacctggcnnnnnnnnnnnnnnnnnnatggcgatgctctatatctatatatattgtgctggtgttt

SEQ ID NO: 429707 - DNA, 435 bp, Homo Sapiens
tgcctattacactttctgctccttaaatccactccacctgtgtctgtgtcactaattttcttggtgcaagaccaaggaccctgggtgtttctccagacaatggagccatgtcatgttggtgcattggctgggaatccaaggtacaacattcattggagcggtgagtagaggagcaaactcaaaatcgatcccatcattccgaggctcttggctctatttttaaatcagatcaattaatgggcatctgtcagctgtctagatatccttattgtggctgacattcttataagacttaaagaatgtcagacttgctggggaggacatggagaaccccccaatacccataggttattgggaatgttggccatccttcaaaccagtttttattcatagggaaactttgccattgtgcgaggccaggaaaggttctgaaat

SEQ ID NO: 429708 - DNA, 174 bp, Homo Sapiens
tttcttacataaaagatagtatgctatagatattattttatgacttttccctatggtctcaccaacaaacaatgttatcaaacttctatatttttgctcacctgaaggtgagaaatgctttttgcactatgtcctgactatcattccataccagctcaatagagatcttcattc

SEQ ID NO: 429709 - DNA, 419 bp, Homo Sapiens
taaagaattccatttggaagaaattgtgtgttaattcatgaaggcagtgaaggaggcaataatctttagagaactgtgataagctgtgatcactattacttcaattcaacattggctcagaaaaagaataaacttatgtaagcaaaaacaaggctgactggtagaagataggctctggacatatattttcccttagcttcttaaattccagactctttgaatcttatgagattttaaccacaggttctgccatagctttttgcaaatttgcattcagtgatgtccttctaaatgggagaagggtctaggcatcacaggcgggtcttgtcacgtctaaaggatctcatatgaagggaggagggctacactctatgcctagcaacattaaccaaacgtgtatttggtctaaaatagacttc

SEQ ID NO: 429710 - DNA, 445 bp, Homo Sapiens
agtgtctttagttttaattgatatggtcctgtctaatccttttacaatagtttaccatgtgatgggagaagttctccactttcatttttaattaattttatagaattctatatcttttgcatagttttcagtttaactttgtaattaatttgcattgagcaagtagtcacattaactatacctaatcatattatgaccattgtgttcccctatgcaacttcataacgggaaggactctgatatgggtcctggacaaatgaaaatcactgtctactggtgacccattctgggcatgaaactgtcatagagacaatagcaaacagaatgcagccagaagcctacaggggcctgaaggtattgccagcattaaggctctacatcttagcagtaaagatcccacagagaccaaagataaaccaaaagaaaacagagtccagttaagaga

SEQ ID NO: 429711 - DNA, 359 bp, Homo Sapiens
gtgggggattacatttatattattgaggtctcatgccaagtcattcactagtccccactaggaggggtggcgtggacagggctcggggcggtttggcgagtcaccaatgtgggttgcccagggcggggatgctcctatacccatctttgaaggctattgtggcctgggaatttcgaccaaccccgccttcgccccatatccgggcaaaaagcctcataaaggtcctgccgccacagatgatggcaactgagccccacgatgacccatagggggcattggcccgcacttcatgcgctggcttcaccctatcataaggttctctccccccacccaactagaactcgtcatcgtcgtcttcg

SEQ ID NO: 429712 - DNA, 298 bp, Homo Sapiens
aaaattccttagtattcaatagcattgctactagctgacagaaaatgtaaaccaaaatatacaccaaattgctaacagtagttatttgagaaatgaaagaatttgagttatgacattgttcactcaagagttatggaaaagtttaaagattaaaagtggtattctaaaattccacactgcttgcttttatagaaatgtacacgatcattcccctttcttaataaatatattctagattttcttatttttagcataagctcagtagagccccaggttcctggtagaaacggaacagtaa

SEQ ID NO: 429713 - DNA, 239 bp, Homo Sapiens
caaggaggagaattcaaaggtgagtattaatataggtgcagcacaatataaacccacatcagtgcggggcccgccacttaaccatagggccaccactggtgatgaacctcaacccacatacaactgggatgagccgccattcagctcacaatgtcttcaaattcatcagcacagaacttggagaaggcccgacttcatgttgagaagtggatcctctggcggccaggaaacgtgaactt

SEQ ID NO: 429714 - DNA, 203 bp, Homo Sapiens
tactgctctttctggttttaaatgagcactttatatgattcctttctatctcttttcctagcatatgttatacttattttttcactgtttttatttgttgccctagaattcacaatatacatttacaactaatctaagtatacttttaaataacactgtaccatttcatgggtagtacaaatatcgcataacagagcttaaac

SEQ ID NO: 429715 - DNA, 455 bp, Homo Sapiens
ccaagttaccacttcataactttttaagttggatgtttagaccacttacattcaaggttaatgttgatatcctagattttgagactttcctcatgttgttaactgtatattttgttcactggattatgaggttgtcttatggtgtcagtaggctgtgtacttaaatgtgtttgtggtggcaggtattgttctttcatttccatgcttatcactctcttaaggacctcttttaaggcaggttagaggaaataaattcccctagtgattgcttgtctaagaaagattttatatctcctttgcttatgaggttttatttggtaggatatgaaattcttggttggaatttcttttctttaagatcactgaaaataggtcctccatctcttctggcttctgaggtttttgttgaggcatttactattaacctaatggtgtttcctttgtaagtgatctga

SEQ ID NO: 429716 - DNA, 152 bp, Homo Sapiens
agccaatctttgaaagttgacacatctttcgcttttatttaatgcaacaggtgacttgcacctacggagagcttggagaaaacacggacaagtggaattttcccgcggatcaggagtctaaagaggcagtgtgaaatcgctgttgtgcgctt

SEQ ID NO: 429717 - DNA, 344 bp, Homo Sapiens
atgacaactgtcagtgggattgtgttcctgatttggctcctggcttgactgttggtgtataagaatgttaatgatttttgcacattgattttgtatcctgagactttgctgaagttatcagcttagggagcctttggcatgagactatggggttttccagatataggatatgtcatctgccaacagggatagtttaacttcttctcttcctatttaaatgatctttatttctttctcttgtctgattgcctcatccaaaatttccagcactatgttgaataggagtagtgagagagggcatctttgtcttgtgctggtattcaaggggaatgcttccagctttc

SEQ ID NO: 429718 - DNA, 169 bp, Homo Sapiens
accatggccatctttgattttctgacatttgaaaactatatgcctaggctcaatgtcttgagtttcctggatctgtgatgtggtgtctgtcattaatttggggaaattctcagtcattattgcatcaaatattgccgcgtttctctcttccccttctggtgtccccatt

SEQ ID NO: 429719 - DNA, 158 bp, Homo Sapiens
cggagggagcagatagtccagaaagtggacccaaaaaccacgtgccgtccgtggaagcccgtggtaggaagaaaagttcacacgtagaagccggcggaaattgtgaagggagagccgtatttatcggatgcttgtaagaagggaagagacagacccag

SEQ ID NO: 429720 - DNA, 331 bp, Homo Sapiens
gttttgctctgtcatttggagaccagactgaataggcacaagcaagattctgggtgattttgctgcctcgtattagctaggtttttctccctcatgcaaaaataaaataggaatctaatggtacttattcctgtggctatgtctggacgatacgtaaagtatcagagtcccaggtgaggccaggactggctggtccagaggctggaggggaggatttcagaaacagcactgtcatcctttcatatgccctacctcctctgtctcaattttaggagtataataaatgttctcttaaaaagcatgctgggcagaggaaataaaaaatgtggta

SEQ ID NO: 429721 - DNA, 244 bp, Homo Sapiens
gggtgggggtctggttctggggtgcgttgggtgtggagtggttttgtggttttgtgggcccttgctttccggggagggctgtggcgagtttgcgcctcctgtggtatggagagtagtggcttcacactcagcggggctggagaggatggagatgtataatggtgtgaagttaaggtggttagtgaggaatcaagtagggaagtaggatgttccggcattagacagtctgtccagagtggcctca

SEQ ID NO: 429722 - DNA, 279 bp, Homo Sapiens
ccgagcgcgccgcgctagcgaactgtacagtggatataattacacaatagcacctatcgagaaagctgatgtgatgacggacattcagatagcgctccctactgggtggtatggtagactggctccacggacaggcttgggtgtcacacactttcatagtgtaggagatggtgtcatacataacgatatgaagcaatgttagtgttgtactgtgtaataccaggcaagacagtttgcagtcataaacgccataggattgcagagctcatctgcgacacg

SEQ ID NO: 429723 - DNA, 419 bp, Homo Sapiens
aggaacttggagaatgagtagttctacttgtttgcaggcttaatgaagaaccaaattggatatagtttagaaagtggggtgaaatatatttgacctacagattctgggtcctgattattttctgactgcctttgcccacatttttcatgccactcacctaaaatgatgatgcatttgtggtattgacaaatcttttcttttggctgctgagttctgtgttaagaaagacatatatcaatcactaattagtaagtcctagtcaaatggtgggcgggggagggaatccatgaaaatgtaaatacaaaaacaacaagccatattatacttaacaattagtttgctttttcctgacctcctccactttttggtacatctttttttagacacaggaggcgagaggaagttcagattggaggcag

SEQ ID NO: 429724 - DNA, 227 bp, Homo Sapiens
tgacgaccgcgcccggctccatatatgttttgactaagtgtattaccatccccactattgtcagaatgccagggcagaaacttgggtggcagagtgatcaccaagtggctttggtggaggctcttttattaggccaaattgttattattttagtaaacatcattatttggtattgtgagatggggcagaggaattcttgttactcatttattaggtaacagaaatga

SEQ ID NO: 429725 - DNA, 256 bp, Homo Sapiens
gtgactcactgactctttttcaacaacccacattaaagaaacgttaacaccctgaatgttattcttacacctgaataacaatcccaaaagcaattggcgaaaataacctgtctttttttcagacaaaatgttaagctatttggcaggccaagagtcctgctatcaaagggcagacagacctcaaattccatgagtgatgcactcctagaaataaatctgctcatttgcaattaaaagcaatagctgagcctgtcag

SEQ ID NO: 429726 - DNA, 253 bp, Homo Sapiens
  misc_feature (46)..(46): n is a, c, g, or t
cagaatctccagttccaggaaaatttcaatctgagagggttccggnaggcagaacgaggccaaaagaacgaacttaaaagagaatggggtttgaaggagatacagaagaatgccttgaagtaatcggtctccttcaaaatgagtcaggctggtgtgggaggccgagagcttccttcccattcatgtccaggcagaaggaggactgttgaagacggcatcttgatattcaagaacttcagccctctcctgaatc

SEQ ID NO: 429727 - DNA, 324 bp, Homo Sapiens
  misc_feature (85)..(109): n is a, c, g, or t
  misc_feature (209)..(256): n is a, c, g, or t
cagtctatatgtatctttacaggtgaagtgtgtatctttacaggtgaaatgtgtatcttgtagacaacagatcattgggtcttgnnnnnnnnnnnnnnnnnnnnnnnnnaattcagtcgtctactctgtcttttgattggataatttaatccatttacattcaaggttatcattgataaatagagacttacccctgccattttgttatnnnnnnnnnnnnnnnnnnnnnnnnnnnnnnnnnnnnnnnnnnnnnnnngtcttgaaatctattttgtctaactgtagccaatcctgctgttttttggtttccatttgcataaaaca

SEQ ID NO: 429728 - DNA, 496 bp, Homo Sapiens
tccgaaagcagcaggagaaaaacagcttacttttaaagacgcaaggaaacacattctgactggctgagactgccagatgtctgactttcagatgctgttcctctttacttctcaaatatctttctaaaattctctgaacgctacagccacactttattaatatagactccacacatgaaagttgagatatattcagaactgagctgaagtttacctctgcactctaataaagactaagaaaacagtgtaaataagattgcagggagaaatgtttaatgagctgtttttaagcatttcaagtctaatttacatacaattaaagttaatttgcacaccattctcagctattcattaaaccaggtacaaggatctctatctaacaaaataacctggtaacactattagcgtagtttcaattactgtatgaactcaaagtaacagctgcatctaaagaaaaataacctacaacactctcactaggttttcccccaattag

SEQ ID NO: 429729 - DNA, 124 bp, Homo Sapiens
cgaagaggcctgcggcgtactacatgttgaatccagagactagtccggactccccgtcggcaaggtcgaagggggttcggtcgtactctgagagtgcggagacaaatcgtattgtggccgtggg

SEQ ID NO: 429730 - DNA, 118 bp, Homo Sapiens
ttagacggccgtagtcagggtactcggaagttcagtaccattggtggcaaattggtttgatggtaagggacggatcgtcaacctcgtctgttatgaaaatgatccgtagggattggag

SEQ ID NO: 429731 - DNA, 103 bp, Homo Sapiens
tcatggccaaaggtcctgatggtcccaataatgcgaggtgctcctgtgatgtgagaagggtggacaggttaaatgaaccacggaatactagatgtgacactag

SEQ ID NO: 429732 - DNA, 115 bp, Homo Sapiens
ggagccacgtgacggtctccaatcaatacggagtactcaaactgccctgatacgtgatgaagccttagaattcagcgagcatcagctcgatgatcacgtcgtcaagaaagtacgg

SEQ ID NO: 429733 - DNA, 394 bp, Homo Sapiens
caaatttctcaattgagaggaatggtacaaacaaaagagcttgagtggaggattcggaacaacttaaagaaaagggaagggaaaccccaacaaacgtgcagttcctgggggaccagggaagtcacccccaggctaaggggaaattagcccgaggctaagcttacataatcacagtcccccagggtgtgctcggcaaagagatatccccccaaacctgattcgggggcccccaccttgggcaagtgggtcacgtggtcacccaatcctttgagggcttccaccggcacattcaggtaatgtgccccaatgaagccacacaaaaggggggcatttttgccaggagccacatttggaagtccaatcaggaacggtttcaaattttatccaaaatgta

SEQ ID NO: 429734 - DNA, 355 bp, Homo Sapiens
tttggctgtacaaaagcttttatggttttgtaatcccacatgtccatttttgcttttgtggcctgtgattttcatatccatgaaatcattaccaagactaatgtgatgaagctttcccctatgttttcttctgaaagttttacagtttcagttcttatgttcaagtttttaatccattttgaattgattttttgtgtatgatgtaagattggggcccaattttattcttttgtatggggatatccagttttgctaacactatttgttgaagagactatcctttccactttgcgtattcttggcactcttgtcaaacatcagttgaccgtatcatgtgtggatttatttgtgaact

SEQ ID NO: 429735 - DNA, 484 bp, Homo Sapiens
cattagtgaatatgttatcattacgaatacctttgcttctccaaatggtcttgtagctgcagggacttggggaaagtatcttcagataaagaggaccctgtctatcttgagtttggaacatcagagctttttgtggtggttgtaactaaatggggtgtaggtgctattgctaggataaatcagaacatggcagttattttatgaaaataatcttgtatttattaaaggacttgcaaaaaagttaacctgaggatttgtgtaatgtgtctctaagagagagctgtcattacgttggtgaagtgaccaatcctttccctgtttggcacctcataccagccacagggtagtaagaatctcaagtgcagctgaactcctgctttcagaggaaataccgggagacagtatgaaaagaaaggtgggctttacgcccttccagtggcttctacaacaaaagacttcctgatttggtgacatttttccatga

SEQ ID NO: 429736 - DNA, 142 bp, Homo Sapiens
gaggaaatgagtagggtgggctcactaaggctggctggtgattgagtgagagtgtgggtaactccaatgttttgggcttgagaggctggagccaatcccaagacagaacagtcaggagaagtagatttcaggaggaagatga

SEQ ID NO: 429737 - DNA, 122 bp, Homo Sapiens
gattctgttccaaactactcaccaggttctgacttatgctaggaacgacttggggctgagatttgagtaggggatgaactgattgcagactattcatataattaaatttatcggcatccctg

SEQ ID NO: 429738 - DNA, 117 bp, Homo Sapiens
agagcagggtttcaccggtgtgtatcgcaggatggtcgtcgatttccgtgacctcggggatccaccgcgcctcggccgtcccatgagtggctggtgattagcaggcgatgacgaccg

SEQ ID NO: 429739 - DNA, 337 bp, Homo Sapiens
ataatcgtactacaaattattagaaaacaaagtttgtaccagagtgttggagtctgtggctgctctagcttgtgtttacaatgaaagaaagttactgttagagaactttcccctcccccagttctccctcaagtacttccagcgagggaggttttcagccctttttgtcttttacaacttaagcaagatcagacacatttctgcaatgcatatgcagattttgcctcttgttactttctctaatgagcgttcacttaatcaatttgacagtagcctttatcccccaggcccctccgccctcccttttttttccacatccactaagaaagtttttagg

SEQ ID NO: 429740 - DNA, 439 bp, Homo Sapiens
gcgtccgcagtccagccacctcagagtccccaggccttcacccagcctcgcaagccccgttgcccacacctgggttcatggatttgagccaagctcacccatctgcccagtggctttggatttgagagcgtccatggctccccctacgcccaagccatgcctcatagtcccctggggtgggctgaaggtctctgatggaaacctgctctcactgtatggagcacaggccctggcgcactgagacacccaaacagagtcactcagtggttcagaaacagggtgggcaggactcccaggtgcaggggcagtggggattctgagccctccgggaaggggtgttggaatcattagagtgaatgagggaggggattgtgtggttgttggaaggcagccacccagcaggactttctaggaggaggaaacagtttctttcttggct

SEQ ID NO: 429741 - DNA, 441 bp, Homo Sapiens
  misc_feature (284)..(307): n is a, c, g, or t
tgggacgggtgtatgcgcgtgggtcgcgaggtgacaggagccggccctcgtccttaatggagcggccagagctgggtgggggcggcccgggagctcggggttcccggcactacctgaatgcagcccgaagccaagttgtgcacgcgtttgtcctataaaagcgaagtgagtggattcccattttggaatcccggtgtctccaacctcgagttggagaaccatgttgagtcagttccccggaaccttacaaatggactccacttcccccgttcccattctaccgnnnnnnnnnnnnnnnnnnnnnnnngagtggcggttcaggattagtcaaatagttctcccgagaatgctctttaaagattgtcagaacctttgggttaagtctcagtttttgcatgggccgaattgcagtctatgaatttctgatttattcaggtgact

SEQ ID NO: 429742 - DNA, 409 bp, Homo Sapiens
agttcgtcagtctagaaaggtaacttcctctcagcacgctgaaaataatattacattgccaatgtcattatggacataagaaaatctgtttttaagtgatactttcttgtagatgatctgtctttcctctctggcttcttttaaatgttctcttcatctttgatattttgaagtttactgaactaaattagtttggggaggtggaggtaaatctcagctttgctttctgctggtacttttcaattacaatgatgtcttttcctcccatatttggtgactttacattgtgaattcatacctagcagcataccatatgggaatcctgaatgactttgattgactatatttttatctacagaaaatatttaattttatctgatggtatgggatatgcgcagtctcgaacact

SEQ ID NO: 429743 - DNA, 387 bp, Homo Sapiens
  misc_feature (245)..(254): n is a, c, g, or t
ttattcccactcttcactgctattaccttctttatatagtcacctactccacttaaattactatgtatccttgaaaaacgtgcattgttgttttatgaatgtctctgttttaaatttataaacatggcattctgctacagatgtgcttattgttatttttaactcaacattgtggctatagactcagctgtatgtagatcattgctcttgaccactgcacagcccagaggctaatctaccacacnnnnnnnnnnctcttctactggagacgaacacctaggtttctcataattccctggtgccaagacaaagctgcaaagaacctccagatcaacctttggaagaggctccaggggagagttgccgggtcatagggctgcacattct

SEQ ID NO: 429744 - DNA, 327 bp, Homo Sapiens
gttcaaatagtttcacatttgacatctgggggcttcctcccaatagtctttgtggccttttaacaaagccacgtggttttgaatatttattttgcttatcttgtattatcagtgtgattaagccacttaaatttacttttagtgaaactttttaatttttgcccatttgccacttagttgtttgttttagtttaatttttagttgtcattgactagtggatgcttttgtaataataaggcaatgaattctttgcaatatgatttgtaaaatgttttgcagttgatcatttacattttgatttcaatttttttgtgtgcttataaatg

SEQ ID NO: 429745 - DNA, 441 bp, Homo Sapiens
  misc_feature (289)..(289): n is a, c, g, or t
tgatgtatttgaaattttttctatatagatcatgtgtgacttccataaagaaaaataaacacctatacacagtttacctaatatgtgtaatgttaatgaaaagaatcaaagaaagatgttcgttcattaactctctaaatcaaattgtttttccatttttaccaacttgataccttaatcaagtcactcttgttcttccttaagtgcaaatgaattttttgtttgggttgggggacaacacaaaataccaacctgggttggattcactgaaaggcccaagaaagggctntagtctaggaagtagagtgtgagatgatacacccacaggctggtgcattctggtccacacaaagacgtgctgctccccgccctactgctcagaacagctctgttttgctcagatgctgctgctgcaacctgcaggtccatgagaagaacaac

SEQ ID NO: 429746 - DNA, 347 bp, Homo Sapiens
aatcaactgaataggggaagctattagaagaagcagctttaagaggggaggttaccagataagttttggacatgttcagtttgagatatccaatgaatgttcaagtgaagaggtggataaaaatggcaggggttcttgagagaagtctgagttggatacttttgggagttgtcagcaaataaataatatttaaagccacaaacctgggaaagataacccaagagctgagacagagatgagagtagggctatagggctgggtcctggagaatgccaacattaggagtcaaagaaaaggaaagcagtgaaggagactgagaaagaataactagttagataggactacat

SEQ ID NO: 429747 - DNA, 246 bp, Homo Sapiens
cccttcagtaacaacatttattttacaggttacaaggactcaagcatttctttcaaggttttgagagaaaaagataaaattaattcttgagtcatgaagggcaaggaacttggtagagacagaactccttgagtcttcattacaggcatcaaaaagggggtttaccaatttagcttcatttctcccagatgagctgggaacagggtgggtccaaggaggttcatccatatcttctcctctggtcca

SEQ ID NO: 429748 - DNA, 123 bp, Homo Sapiens
ggttgggtatggagaggggggttcatattagaagaacgatggtgagaactaaagtcggggccgtgatgtacacaagtgatggtagatatagcgggttttaacggcccttggtgaaagttttat

SEQ ID NO: 429749 - DNA, 195 bp, Homo Sapiens
agaaattctataaattactaagactactagatagtataagatgcttaaagtgtgggtggtggagggattttgagtaatgtgccagcatcccattatttccttttccttgtgggattcacctgaatacactctaggatgctggttcagcctaagtgggttggcaaagtatcatttgtaagcattatcctacttggg

SEQ ID NO: 429750 - DNA, 263 bp, Homo Sapiens
actgggctcagaatctttattgaaaaatgaggggaaggtgattagtggggaaaggcaggggaggaaagattttccacctggccttggacagtacatcaaaaggcggtcagaaggatgctatttataatcattattgctatgtcttacagggctgttggtctgccccccctgctgattcccccgacagtcccgtttcggcatgtagcccagttcacacagcagccaccttgtagagctggactacatggggccatgtcctgaag

SEQ ID NO: 429751 - DNA, 112 bp, Homo Sapiens
ctagtggttgaatgactgggctgatggtttcgatagtgactagtagggggataagggcggtgggtgtgccttgtggtaaagaaggggcgagggcatgtttgatcttagagcg

SEQ ID NO: 429752 - DNA, 226 bp, Homo Sapiens
  misc_feature (62)..(62): n is a, c, g, or t
  misc_feature (64)..(64): n is a, c, g, or t
  misc_feature (113)..(113): n is a, c, g, or t
  misc_feature (163)..(163): n is a, c, g, or t
  misc_feature (166)..(167): n is a, c, g, or t
  misc_feature (188)..(188): n is a, c, g, or t
  misc_feature (202)..(202): n is a, c, g, or t
gagagaggggggtaggtgtgccttggggtaagagcgggcgtagggcaggtttaatctgggancngaaccgtaggatcgctgcgcccgctcataaggggatggccagtggtagngttatagatggttaggtggttggtgtagatcaatgaagcgggagtgctgncgnnggagttgtgacaataaaaggnattaaggatgctgntataagagatcaggttcgtccttt

SEQ ID NO: 429753 - DNA, 360 bp, Homo Sapiens
tgaagccctgatcttatatctcactctgatggctatttgattcaagccccacagcaacctataataccttcctttaaaactgacgtggccagggcatgattaacatggagtatgtgtgggagactactgaattttgggatggtttgagaaaggggctatgattacatcataggagtatcaatattaccaatcaaaaaatagaatattcaatatgccgtgcccctgaatgtctttccgtcactttccttccactccagtcaggaatttatccacgagtgacactcaccaacagtaccctttgctcctatgaccctttctttctcctgtctcaccccatttctctgcctacatttctctggt

SEQ ID NO: 429754 - DNA, 139 bp, Homo Sapiens
  misc_feature (39)..(39): n is a, c, g, or t
  misc_feature (41)..(41): n is a, c, g, or t
ctacgctgtggtcagcctgctgagatagatcacacgtgngnagagcactcgagttataattgtaatgacgatcatgtcgatgtgaacattattcatgacctacgatttctacatctactgtaagtgtataagcatgtca

SEQ ID NO: 429755 - DNA, 213 bp, Homo Sapiens
  misc_feature (134)..(134): n is a, c, g, or t
  misc_feature (161)..(161): n is a, c, g, or t
taagtggcgtcggagatggtgaagggagactccgagtacgtctgagcttttaggagggtggaatagagacccagtaggagtgtaataagcagtgcttgagtgagttggtttcaggtgttttcgattacactatngtgcagctcaagtagttgagactcctnatgcgaatgatacggaggatgttgagcggtgatacttctagagaatttagcg

SEQ ID NO: 429756 - DNA, 390 bp, Homo Sapiens
ttgtaattctcagcaactgaaggatgtgccttggtccagaaaatgtgttctattgtgatctgagtctcagctgtggccgctaagagtgcttcaaatcggaatgatatttttgtaaagacgggcggcgtgggatgtgtgcaaaataagcataagtggggatgagatggatgccgagatagggtctatggggacatcaaatatggttgtttagatcaacactcaaagtccacgcgggcctggaggtgtggagtccaaagtcaagtgactgccgtagtagtcttttaagctgccctgatttcttctgtgttgtgaaaggtagagtatgagcttcaagttgcacctcactgcgttgaggagtcgcacggtatcgatgttattagcaagtatgag

SEQ ID NO: 429757 - DNA, 429 bp, Homo Sapiens
gctgggtggtaactctttatgtcattgggcggaaggaagatgggagtgggagcagggtggacgctgtgcaggcttcgcgttccactccgggcaggattcaggcgatcggggaccgcgggactgccaggtgcagaggcggggtcgcggggcaggcaggcaaggtgaggggacgtgggaagcgctgttgagagccgtggggggggtggtcggtccggaagcgatgagtgcgactctggagtttgcggggggatggtgaagagggagacacgtgtgattcctcacaggcaacagtgtggggcttggtgaagccgcggcgcgtgacgtagctcaggcggttgcagggagcgaaagacgtgaggtagtgatgtgcaagagtcagcctgcagtttgatcaatgagaaacccatcctgcgtgttggagctgtgaag

SEQ ID NO: 429758 - DNA, 278 bp, Homo Sapiens
catcccctgccaaaagaaaagcgatggcccaccagtctaccagtcctcatttcctaaaagtaaacacggtgagcctaacgtcccatataatttttacgctccctctggaaaccaacgctcaaacacagtcatgcggcccctggtccccgggtaatggcccaaattctctttattaatattcgtagccagttgcaaccggcctcactgacggctatggaataaactacggctccacatccccagcgaaacggcctggtcctcatgcggagatgcgggta

SEQ ID NO: 429759 - DNA, 156 bp, Homo Sapiens
agttcgagtttcataccccctacaaaagattactgggttgctctagtactacatcatacaaaccagtagcctgtacccaccgccaagtcaggccacccataacaaaggccgcaaggctgctatctaaacaccctgtagcaaaagcctccattttaa

SEQ ID NO: 429760 - DNA, 103 bp, Homo Sapiens
  misc_feature (28)..(28): n is a, c, g, or t
agatttaagagaattgaccgtagtatanacaaggtcgtgtagcgctgaacgtggtttggcttagaagtgagggaactgcatccgtttccaagaataactctgg

SEQ ID NO: 429761 - DNA, 217 bp, Homo Sapiens
aagcattttaataaaattccgaaataaatattgtaaaatgtaccggctagagggcccacgggtagaagccagagggtgagtcttttctgaccaggcgctcaagtgtactttacagagcccatggtctcggctggtttggggctaggaacgatgacttcgggaacccgggagtgacctccgcctcgtgactccgggctcttggagacattcctccttg

SEQ ID NO: 429762 - DNA, 430 bp, Homo Sapiens
  misc_feature (138)..(374): n is a, c, g, or t
gctaaagacatggtctctgttgccaggctagagttcagtggcatgatcctagttcactgaggcctcaaactccttggctcaagcaatcctcctgcctcagcttcaaatagctgagactacaggcacatgcaccacatnnnnnnnnnnnnnnnnnnnnnnnnnnnnnnnnnnnnnnnnnnnnnnnnnnnnnnnnnnnnnnnnnnnnnnnnnnnnnnnnnnnnnnnnnnnnnnnnnnnnnnnnnnnnnnnnnnnnnnnnnnnnnnnnnnnnnnnnnnnnnnnnnnnnnnnnnnnnnnnnnnnnnnnnnnnnnnnnnnnnnnnnnnnnnnnnnnnnnnnnnnnnnnnnnnnnnnnnnnnnnnnnnnnnnnnnnnnnngctcaggcgatcctccccacttcagcctcctgagaagctgagactacaggcacatg

SEQ ID NO: 429763 - DNA, 465 bp, Homo Sapiens
ggatatcctagtttctaatctctcattctcaaaaggggaaaaatgaagggaggaaacaaaaagggtgctggctctttgaatcctctggaagtcacttcagccagatgggaaggagcctgtaacaattcagggaggtacaacaacaaagtctgcccaccttcttgtgtgcacctctgtgatcagaagtagcaatcagtgatcggatgcagatctctaatatttggaagacaacatcctttttgcccaccctggagcccataggctgcatgcaagtttctccaagaactgggggatgggtagctgctaccgttttaagagctaaaattaaaattaattgtgcttttaccttataccttcccctggaatttgcaagcttacagtagactccagagttgcaaaaatagttacattaggcagattttgccagtataattgttgtctaggagcacggccagactcctggtg

SEQ ID NO: 429764 - DNA, 327 bp, Homo Sapiens
agacccccaccaatggaggggagcatacagaaaaatgcaaacccgatctaaaaaatgccgttattagggggcggcttcgaaaccaaagtgatttttgggagataaagtaaaaaattatttggggggtgaaacagatgtttgggaaattttggccaataatgacgttgattccgtggaaccctgtgctacaaaaaatgttgagccgtagaagcccccggaaatagttaggggagacccggagtaccctgaaggttgtgggggggtgaaaaagagaccccgttagaatttaaaaaacctctctttaaatatttggttccggttgttttc

SEQ ID NO: 429765 - DNA, 112 bp, Homo Sapiens
aaatttcgtatgttggatcttcaccaaaccagtgagaattcaggactcttgtagccccacaatggggtccaactcgctccggctgaacgggctgaaggcttcgagcaagttt

SEQ ID NO: 429766 - DNA, 105 bp, Homo Sapiens
tgttggacgcctgcatatacgtatttaccagactgttgacggctgcttccacgtctgttaataaatctgactaatctggtagctcatgtttgattggttagaagg

SEQ ID NO: 429767 - DNA, 120 bp, Homo Sapiens
ttttcagagataccctattactggatttatggggggctcagtcatcacctggaagtcataaggcgtttaagtatttcggggatctttatgatgttcatgaacaggtctcatcttggtagg

SEQ ID NO: 429768 - DNA, 358 bp, Homo Sapiens
ttttggtcatgaactatttttaacatttccgaaagcctcctggaaattattatgcagccagccacaacagggctgcaacaaaatgccagtatcttcgcttttctctggagtcccatcagctcagtgccgtcacactgatcaaaggcactgcctggcagtcatctatgttagtgatgagtaaagtagacaggaaattcattgttgcttgataaatgtcctctccaagtcaccccatcttgggaaacacaccacctatttacccagttgcccaagtcaaatgcaggagtcacccctggttcttctctttctgtcactctgtctccccaaccccaatccagctcatcagcaagtcccccaa

SEQ ID NO: 429769 - DNA, 539 bp, Homo Sapiens
agaccctcatcaatagatggggacatttagaaatattctaatcacttctactaaaagctagtttcaggcggaggcttcgaagccaaagatgatggtttgttattgttaagtgaaatattagttggcggattgtgcagatagtgtggatatttgagcctaataatacgtgaagtccgtgtaagcctgtggtacaaataatgttgtgccgtagatgccgtcggtaatggtgtatggtgactcgaagtactctgatgcttgttggatggtaatattgagacccagtatatattgtaataagctgtgcttgaattattgggtttcggttgttttctaatatgacaaggggagcttcggtgattgttactcctgatacgagtaatatcgttgtgtttatgagtgggacttctaggggatttagcggggtgatacctgtagtgggccagttgcctcctagttggggggttggggctatgctgaagtggttaaaggctcataaatatctgtcgaataaataacttctgaggtataaataggattat

SEQ ID NO: 429770 - DNA, 294 bp, Homo Sapiens
acatgttactttatactcttgacgtattatttctaaaaattgaatattattttgtttcaatgcatcagtaaggatggatgaccagatgcagtgagccagggagaggacctggaaccctgagggctgaaaacaatactgcctccccacttctgcctttcctctctgctcccattactgtcacttcctcccttttccctaacatcccttaagctgggagttgaggggcttagagctccaactgttcttcctccttaggcagcaattcatcaacatttttttgaacaactacaggga

SEQ ID NO: 429771 - DNA, 137 bp, Homo Sapiens
ttaggcagatagtcggcactagcattaggattgttgtcaagtacaccacggatgctacctctccaatgatgctaaacggctagcttactcgcctgtcctccgattcaggtcacactgaggcggtccgcggctaggag

SEQ ID NO: 429772 - DNA, 129 bp, Homo Sapiens
ctattgacttgcgttaaaccagcgacacacgtcgctggaacgaaattgaccaaccccgcggtcagtatcgcatagttaactttcgcttattgctacaggttatcactgctctttccgtggggatgtggc

SEQ ID NO: 429773 - DNA, 393 bp, Homo Sapiens
tgaaacccggaaatttattagtggggaaactcgccttggtttggaaaaccatgggataaaaaggaacagaaccaatttcgaggtggtattttttgaaaaacaaggtgttcctccctcgcaggtttagaggaaaaaccctcataaacaaaaaaccccccgagaacgcacaactgtaaatcccaagaagccggggtaggaggggccgcctaagcaacaccggcgcctttacaaagaagggtttcaatttaacgctcgctttcaatcgtctggaagcgggggctttacttggctaggggcaaaacgtcagcgggcaccaggacactttcaaaatctaaggcaaaatacgttggacaaaacggagaacagcttgcttagattgtgggtggtaataag

SEQ ID NO: 429774 - DNA, 288 bp, Homo Sapiens
  misc_feature (68)..(68): n is a, c, g, or t
  misc_feature (191)..(191): n is a, c, g, or t
  misc_feature (243)..(244): n is a, c, g, or t
cacgggccggacgtggtggagtagtgggggacaatggaaggtggagggtggagtgtttggtcgagganaggtgacctggcgggtcgggaaaggtccaaaatggagaggtatagagacctagagagagaagtaagggggaggggaggagtcggcttcaatggaaaagaagacgagtggcataaggaggtaantcttgatgggtgcttctccaagcaagagagggttgggagtcatgtgcgcatnnattctttataaaagaaatcgacaaactagaaacaggaaaggaag

SEQ ID NO: 429775 - DNA, 375 bp, Homo Sapiens
  misc_feature (18)..(18): n is a, c, g, or t
cagtctctgtagagaggntcaaaaattgccagtgctgactatatttcaagtcgtcatggaggggtattgggaaaagttttcaattagcaataattgtacttcaggtaaacctcattggctacaatgccgccactgggcaaagctgttcctctctttatatccatgtgttctcattgtttagttctcacttataagtgagaatatgcagtatttagctttctgcttctgcattagtttgcttagaatattggcctccagcttcaactatgttgctgcaaaggacacgatctcttctttgttatggctgcatagtgttccatggtgtatatgtaccacattgtctttattcagtctactgttgatgggcatttagat

SEQ ID NO: 429776 - DNA, 437 bp, Homo Sapiens
atatttttgttaagaatatatctgaggactcaaagaaattggattacaaacttggagctgtagttaggagtatttatttcactcctttaccttcttcagatcggcaaacctacagaattgcatcatgctttctgataatatactgaagaacaagtttcagtaaaacagtatggggctcctttaactccaaaatatgagcacatggatgtttctccaactaaccagaatacattttttaaatggcttattggccagaagcattttcttgagtcttatttaaaagcacttcagcaggttttctcatacatgaatacagaaattgcatatatggttaaatcttttccgtgcttgtaattcgagtggtggaactgatataaactttggaatagaaaagtaattggagctctttctcatttattaagaaaatacactctgta

SEQ ID NO: 429777 - DNA, 161 bp, Homo Sapiens
cgcgtaacgtactgcggccggcttgtgatttgcttttttcactaatgtcttaagatctttccaagtctgcctcatgaaaacaaagtttatgagagaacagtcatacaatacatgtaagaatcacagtacagcacggtcacggggagggggacactgactgg

SEQ ID NO: 429778 - DNA, 152 bp, Homo Sapiens
ggtgcaatcacagctcactgcagcctcgacatcctgggctaaagcactcctcccacctcagccttctgtgtggctgggacttacaggtgtgtaccaacatgccctggttaatttttaaaatttatagaaatggggtctcaccaatgttgccc

SEQ ID NO: 429779 - DNA, 266 bp, Homo Sapiens
tattcaagccacttgtgcaaaattatcatatcatgcggcggcttcgaagccacagtgatgttttaagaaaaagtgaaatattagttggcgcttgacgccgttagtgacgtaagttgtccccataatgacgtgtagtccgtggaagcctgtgggaccatatatgtggagccgtatataccgtcggtaatggtgacgaacactcgatcactctgaggctcgtaggagggtaatatagagaccaaattgaattgtagaaaccgtgcttg

SEQ ID NO: 429780 - DNA, 223 bp, Homo Sapiens
ccaaaattatgagtcttttcaaaaattttatatcaaaaaggtgatatttaatgtggaatttgagtgcatttaaataagatagtgacttcgtagaatagggactgcagagtaagagtgttcagacccattcgagtttaatatagccctacctctaagaatcctttctgttcctcactcaaatgaactaattgctgtctttcagttcctctaaaaaccctcgtgc

SEQ ID NO: 429781 - DNA, 197 bp, Homo Sapiens
aatagagatacagaaagatttcaaaaggaatcaaatgacacagcataggtgtctgagggcagctagcctcactggcccatcctgacatacttaatccctcatgcctcatcaccagagctgtgactgtgactgagccaggctcctcccaaagtacactgaagacccagctcaaccaaccagtctctcgaagcacatca

SEQ ID NO: 429782 - DNA, 226 bp, Homo Sapiens
agcttaaagtcaactgagtaggggtcataatcagataatgcaaaatcacttcacggcattatctacatcagtgtttgtttgaatgccttgggactatagttcaacctgctggagttcacacatcaagaaaccatcacagttgctgacatagtcagttttctacttcaataaatattattttaactggacaaattgctatctaggtaaaagactacattcctcaacc

SEQ ID NO: 429783 - DNA, 201 bp, Homo Sapiens
gaaaaagtcatggagggaggcacagagcacagcggtctgaagacatccttatcgatgcagggtgaactcccttatatgactcacgacacgcagtcacaaacgctgctccacaaagccatcttcaaaaccatttctacctcagggattctaaaactatgaccacagtgttcgtgagatattttcacaggacgctgaggctac

SEQ ID NO: 429784 - DNA, 124 bp, Homo Sapiens
tgacgtatcacccctagccaaaaatcatgttttcttagaacattcagtgtcatggggaaaggatcatgacataatacttagaactgaaaatctggacaacctatttatacagaatgactcaaaa

SEQ ID NO: 429785 - DNA, 141 bp, Homo Sapiens
taacttttattttaggttaagcggtacatgtgcaggtttgttacatgtacaggttgtgtcatgggggtttgttgtacagattatttcatcacccagatactaagctgagtatgtaatatttattttttctgatcctctacc

SEQ ID NO: 429786 - DNA, 314 bp, Homo Sapiens
cactagacatcttctggtgatcagtcttgtttgaatatcatttctaaaagaggtacttctatacagttgtcaaactgtaaagagatttctatgtaaatactagattattgtaatgtatttagccatttgttatactgttaagactcaattcatatataaataaagaatggtgatggtgacgatgttttaaaaccaggaacctcagagctgtctgtttccttggaaatttaaacttctttcttgtagttctgttttatctcatcttttagctgtttggcatgtttgtgatacagaacggatttaaacctcgtgcc

SEQ ID NO: 429787 - DNA, 224 bp, Homo Sapiens
ttaacatggcattatttattctcatcatattttaggcatttttaaaatctcttcaggaaagactgactaaaaagagtggaacctactttgaatttagaaattctgaagggcgggtttgactattgacgctaaagatttacaaaaagacagacttttgtggaaaatgtacatcctcagcatctcaaagcatgtattaggtaattgtatactccccttgctaacaa

SEQ ID NO: 429788 - DNA, 127 bp, Homo Sapiens
cggggcgtttatcggagtaattggtttggtttagacgtccggtaattgtatctgtttggattcctaatggggggacagctcaagattgcaagacgtcttgttaagtaattattgatacgaatggggt

SEQ ID NO: 429789 - DNA, 421 bp, Homo Sapiens
  misc_feature (381)..(381): n is a, c, g, or t
atttaaaattggtctgcaattagaacatgtaagaggagattaggaattaaaatggattctgagaggcaatttctaactactgaacttttataacaggagtatctttgattaaataaggagctagtctaaactaaaagcaaaactgtaccataataacccaacttaattatctttgcagaatacatttataaatgattggctcatttctacctttacttgactaagtaaatatgcctcttaaattctcaaacattgaaaattctgattctcacagttgcacagacttatctaaatcaaaacttcaaaaagttacaatataattactgactccattgctagatccagtacaagttcaagtaaggaagtttagctctgtaactntcactcctcaacctaaacctccaagtcacttgtcagttaa

SEQ ID NO: 429790 - DNA, 336 bp, Homo Sapiens
  misc_feature (278)..(278): n is a, c, g, or t
cgctcgaggcttctgctctcttgtgggttcggcgctcgtcccctctgtccttgctcgcctcctcggctcctgctcgcgccctgccattggttgaagatcgagcagatccagttatccaagcttgcgagttatgctgatcgactacgacgatatggccaccttcaagtaatgcagtgaccgatcagggcgccgatctgtccaacgatgatcgctaacctgctctccggtggtcgactcagaacggtgggcgggttgccgcaggtccgtcctgtgatggntcaacactatcatcgattataagaccgatacctcctatatgaagttgtagctgattaa

SEQ ID NO: 429791 - DNA, 373 bp, Homo Sapiens
tgtagatcatacagtaatgagtcaaactacatctacaaaatgcctttatcaggcggcggtttcgttgccatagtgaatttttgatgtaatgtgatatataatttggcggatgaagcagatagttatgaaagttgagccaataatgacgtgaagtccgtggatgtctttgctacaataaatgatgtgccttatatgctgtcggttatgtggatggttgatacgtatatctctgatgcttttagtagggtaaaatagagatcctggtaaatgtgttaaagcagtgctttataaattggtgtgcggtgtgattccgagtagactattgcgttctctggttactgattctcctgaatgcgagtaatttggatgtgtt

SEQ ID NO: 429792 - DNA, 468 bp, Homo Sapiens
ccgtttacttctaggcttgtgcagcttatgttggaacagtaaatgctgtttctgagcctcataatcgcaatgttgtgtgggaagtcaaagatgtatgtgaacagtctgacagggttatgggaatctgatccaacagtcatcttgagcagctagtaaacaaatgattaaggtcttcagtactggtaggagagggatccagagctacagatcacaaatgtgatgtagtcaaaccagcggtgtagtagtgtcaactggttccggtggacaataagcaattcaatagtcgcgtggttacaccttgcaagtgtctcgggggtgaatgaggaagtgatggcctgcgaggaccagtaaagtgccatgatggctcacatagagcggatggatgtgtgtgagaatcaccagttcggtactccggagccaaaatgtcttgtctgactcatggaaggacctaatgtagccacggcatgc

SEQ ID NO: 429793 - DNA, 118 bp, Homo Sapiens
accatgtgaacggggaatccagcatatagagttcccccattaggtaaatagtggggtttaatgcgagtttatcgaggcacactataagacatcaaaatgctaataaatggagtatagt

SEQ ID NO: 429794 - DNA, 127 bp, Homo Sapiens
taattatgtcggtgttgagggataggtggagaatggtggataggtgtaagaacatgatggtgttttctctagtgaatgtggagtataggatgtgtatgatgttggtgagtgagccccattgtgtagt

SEQ ID NO: 429795 - DNA, 130 bp, Homo Sapiens
gcagccacaaataagcccagaagtagtccaaaatgtcacaagtccgagccaaaagaccagcattgacattttgtttattaacaacagtagtcgcaaaagtaatgaccaatcacagcgcaataaaattctc

SEQ ID NO: 429796 - DNA, 467 bp, Homo Sapiens
caattgtgagaacaaatgatttttgcttcttaagtatgtttttgggaaatcacacttataatgactgtcttttaaaggtcttacatctcaacaaaagctataggcgagttaaaatgaagattaaagaagaaacatttagattagaaaacatttagatggaaagaaatttattgtataaggtcattattttgagtgcttaatagaattctgagcttcctgacaatttacactctctcttaatgccaaacatctcggttttatatttattctttatttattcttttaatctcaaacttatatttttcagactagttttctctaacacactaactctaatttccatgtatgtgctgtttagcaccccttgtttacttgtaggacttattaacactaaatacttaaatacatagctatctgcttaatgtctgtttctccacccgaaaaactagttccatgatattataaac

SEQ ID NO: 429797 - DNA, 268 bp, Homo Sapiens
tcctctgctgatttgagatgttgccttaattgtatactaaatattcatatgcagttttgtctgtgcattttgtggcatgctttgttcatgaactaatacaaaagtattttactaacagagattttataatatgttttaatgtatggtagtgctagggcaccctttccccactgttcttgcttctaggattttcctggctgtcgttggtggcttgtttttccagataaactttctaattaacttgtctagcttcacaaaaaatacctga

SEQ ID NO: 429798 - DNA, 365 bp, Homo Sapiens
  misc_feature (42)..(75): n is a, c, g, or t
  misc_feature (93)..(317): n is a, c, g, or t
atttatttgatctccttctggtagaactctagagtaatatgnnnnnnnnnnnnnnnnnnnnnnnnnnnnnnnnnngagatggagtctcactcnnnnnnnnnnnnnnnnnnnnnnnnnnnnnnnnnnnnnnnnnnnnnnnnnnnnnnnnnnnnnnnnnnnnnnnnnnnnnnnnnnnnnnnnnnnnnnnnnnnnnnnnnnnnnnnnnnnnnnnnnnnnnnnnnnnnnnnnnnnnnnnnnnnnnnnnnnnnnnnnnnnnnnnnnnnnnnnnnnnnnnnnnnnnnnnnnnnnnnnnnnnnnnnnnnnnnnnnnnnnnnnnntctaattttttaatgtcaacatgtggtagacacaacccaaagtggcac

SEQ ID NO: 429799 - DNA, 394 bp, Homo Sapiens
  misc_feature (332)..(344): n is a, c, g, or t
gtctgcaggtaataaaatgggaaattgctaaacacacatccatcttctgagcggtgctatcttaagtctaggtggaagccttcaaaacaggaacctggtcaattgcaaaccttcctcctaacccaggctcctcatccccagagccggctatgaagaaagatggttttgggaacagggaaagaagatctggttaggagccatcccggctgcttgtctcttaatgtcaggtgtgtgaaatcccactcagtcattgggggactcaacctccggttggggcaagtgctacttcagaaaccccctcacacatcctggcctctactcgtacacaatannnnnnnnnnnnnaacttggctgcagtgaaaaagaatatttttagtaagctacttgttgttta

SEQ ID NO: 429800 - DNA, 338 bp, Homo Sapiens
  misc_feature (229)..(239): n is a, c, g, or t
tggcaattgtgaatgggattgtgtttctgacttggctgttggcttggctgttgttggtgtgtaggaatgctagtcacttttgtacattgatttcgtgtcccgcaactttgctaaagttgtttatcagctaaaggagcttttgggccgagactatggagttttctagatacagactcatgtcatctgcaaacagggatagtttgacttcccctcttcctgtttggatgcnnnnnnnnnnnctttctcttgcttgattgctctggccaagatttccaatactatgtggtgaaagagcgcatgcctgtcttgtgccagtttacaaagggaatgcttccagc

SEQ ID NO: 429801 - DNA, 320 bp, Homo Sapiens
cattaggtaatattgtttaatttttaaagcaattttttttgcaataattagacttacatgcagttacaataaataatacaaagggatcttatatgccttttaccagtattccccaattgtaacatcttgcaaaagtatactgcaatatcataaccagggtactgacactgatccagttgagatagaaaatatttcattgccataaggatccctcaagttgcccttttataggctttctttttgcctatggatgttcaattgcaccaacattatttaagatgcattcatccctctattcttactttcttcttaaaagtttc

SEQ ID NO: 429802 - DNA, 200 bp, Homo Sapiens
tgacctgatgcttaacaaaaaatttttaagggttatataaggcttattgaaatcttacattatggttaaagtaattaagattgaatagatttgtttataaggttttattaagaatcaggtttaattaatggaacactgttgcaaaggtaaaatttggcttcctcttttgagcaggattttcatctaatagtaaaggataa

SEQ ID NO: 429803 - DNA, 110 bp, Homo Sapiens
tctatagccatatgacacaagatattggctcacttggtctctgttcactatacttcaggggaggacagtaaagataattagcaaaagtactgttcattaccaattatacc

SEQ ID NO: 429804 - DNA, 286 bp, Homo Sapiens
catcagtcccagtgacttgcttgggaatttgcattttctgtcccccaaaacttgcgaagttttggggtcctggttcacagaggggaaatactgttaccagggtctatggcaagcatcccattaaatttaagctacggttgccacctggtcacttcgtattccccatgatgggaaaatagcagacatctagggttctatgcctaggtgtcataaacttattatttgaagccagtgaacctgagttgtgaaagaggttgactgtagcagatgctgtggtgtgctgccc

SEQ ID NO: 429805 - DNA, 187 bp, Homo Sapiens
gtgtgaggcaccatgcccgacccatattcactttgcattttagttttcattgttactgtgcatgggtcaatgcatttacagagttggtgcagacttttctctcttctatgatgtgctgtccacacatggccaccaaagacacacaaagacagcatctctctcctccttgggcagaaagaccacctta

SEQ ID NO: 429806 - DNA, 143 bp, Homo Sapiens
gatgaagtcctgctctgtcactcagactggagtgcaatggatggaatcccagctcactgtaagatccgcctcccatgattcaatgccagtctcctcgcctcaagcctcccaaactaagctggtgactagcaggcgaccgtcac

SEQ ID NO: 429807 - DNA, 100 bp, Homo Sapiens
caagttccccccaaaatgggtagatccatgcaaagataacaaataatagtggtgagggccaaaacgtaggatagcaaatacctaagaggaaagatagaac

SEQ ID NO: 429808 - DNA, 275 bp, Homo Sapiens
gcttttaaattagtttctgaagacgtttagaacaccatttggtggggacaactcccattcggcagggcaaacacagatctcaggaagccctggggcgggggaatagccttgatttttggcaaaacttgttgagtctacacctttaggaaaaaccttgcacggcgccgaaaacgcaaatttccctttaccggtgccaaaagatcccccatcgaggcgtctgggcttccaaagccccttcttcctgaagtaagatcagtaagattttggggttttta

SEQ ID NO: 429809 - DNA, 270 bp, Homo Sapiens
agccaagctttgtttaattgaaaacttcttacccagcactccaaaaaggggtttacatgggggtgacactcaggattcctttggcctattcctgggattaacacatgtccattggcttttggaaaaaggaaggggtgggaccggccactttgggaggaaatgcttaagacccaggaaaaaggaaccattgggtcactacaatggctccattttggaagggagcttttctttgggtttgtgtgaaggcctttctcttgcccctgggttgga

SEQ ID NO: 429810 - DNA, 119 bp, Homo Sapiens
ggtagataccaggcctcactgtgtttcccaggctggtttcacactcccgggctcaaagtgctcctcctgccttggttcccaaagtgctgagataacaggcatgagcactgtgcccagct

SEQ ID NO: 429811 - DNA, 422 bp, Homo Sapiens
ggccgcccgggcaggtacacacatacactgataaaattgggtttcaggacctgctgatctaaagctgagacctgaactgtgctgtccacatactagaattgctactgtttaaggccccgcctgaggagctggctaaattcttaatttaaattatcttttgaaatgacacacacaatgatttgcatgacagattgatttaaatgtatttacagaatcttaatgatttctagactctgtcaataagtctgtattttccttacactctaaataataatcttgtagatttgtcagtataatcataaaatctgatacagaaaaatccttgttagataatgctggccttgctgtgttttttaattacatatttggtatttctaatcaactctataggattagacattatacaaattctaagttggaaa

SEQ ID NO: 429812 - DNA, 221 bp, Homo Sapiens
gcgtgtcgcggccgatgtactgggtaataataaaccagatctcctcagaggggaagtccctcaagcccaccggagatttagaaggtttaccatcagcgttgtgttgatgaaaacactaacacactgcattttgaggggctgaaggcactgtgctgaggaaggtgagttttcttcctcactgctcctagttgtgccccagaaatccctgttgaccctcgtaa

SEQ ID NO: 429813 - DNA, 157 bp, Homo Sapiens
gaacacttttcattgtttaatttttttaagcacacagttcccacagttctgtctcctttcattgaatggcattataacctcatccccaactactgaatcttatctctagtaaatcccccaaggccacacttcccttaaagttggctgatttttataa

SEQ ID NO: 429814 - DNA, 379 bp, Homo Sapiens
cgagcggccgcccggacaggcactcaaaattctttcctgaatgacaacgtgaagttgaaatactttgttcttaacagttaacttcattgacatgacgcttctgcttgttgactaaggaaacttggctaataagagctttttgtttattcaagtaaaagtggactgcaggttgtaggattttatagcctccctgcatctttgcttaattaaggcatgcatagagaatgttttgctagcatattacttgatttaaaatatctaaatatggctgatatttaaatagttaccatcctcttgacttggcttgccctattttattggcttctgaatgattgtttttcttatcgttaggctaggaaaaattattgcaagctttaat

SEQ ID NO: 429815 - DNA, 219 bp, Homo Sapiens
cccaaaacctttaagctccttatgtcctcttcattgtggaactagaggtctggaaagagtggctgctataaaaggaaacactatattgtattgtcagattgaaattaaatagaagaattttatctatgcataatagatcattttaagagctactgtgttgttctccaaatagtaatcagaaatctgtattccgctcttgaaaaaatgagctttgctgat

SEQ ID NO: 429816 - DNA, 396 bp, Homo Sapiens
  misc_feature (229)..(239): n is a, c, g, or t
  misc_feature (280)..(339): n is a, c, g, or t
ggcaacttgtgggaaaaatcattactaacaattaacagcacaataaacaaaagggaagaactgtcaaccacccaaaaggttttcatgtcactacaaagaattattaggtttctggcaagaagctgttgaaataactatattaaaactataataatggctctgtaatcttttactctatagatgctatcgtcatcagggaatgaagatatgaaaaaatgggaaaaccgannnnnnnnnnnggctaagtctgataaaaaggcggatagtcatggagaactcnnnnnnnnnnnnnnnnnnnnnnnnnnnnnnnnnnnnnnnnnnnnnnnnnnnnnnnnnnnntactcaccaagattattctccttgtccctgtgtcttcacagataagaattccctctt

SEQ ID NO: 429817 - DNA, 184 bp, Homo Sapiens
cttgggctaaatgtgtgaacgatgaggcaggcacgaaatttcatccaccctggagttaataaagtcctaactaaactcccgatcatcgccaaaggataatcactgctgtcttccgcgagggagtgtgctagctaagcggctttgagctgcattgatacatgctagatgcttgatccttttgatc

SEQ ID NO: 429818 - DNA, 124 bp, Homo Sapiens
ggtaacgggggaactgcaaagtattgccccttctccaagctgccccggaagagccaccaatagcgtgggggaacttggggcccttatcaaggccaccgctttttagacctcaataagtcaaccc

SEQ ID NO: 429819 - DNA, 388 bp, Homo Sapiens
  misc_feature (108)..(313): n is a, c, g, or t
gggcaggtacgcggggttctagctaggagttgtatataggccaaattattcaaaagagtaagaaaagaaatactacttatggatatcaaattcttaaaagtgacaggnnnnnnnnnnnnnnnnnnnnnnnnnnnnnnnnnnnnnnnnnnnnnnnnnnnnnnnnnnnnnnnnnnnnnnnnnnnnnnnnnnnnnnnnnnnnnnnnnnnnnnnnnnnnnnnnnnnnnnnnnnnnnnnnnnnnnnnnnnnnnnnnnnnnnnnnnnnnnnnnnnnnnnnnnnnnnnnnnnnnnnnnnnnnnnnnnnnnnnnnnnnnnngaaaatataccgcagtaagttggttttttaaatgacaagggtgatcatttggacttagcattttaattgggactg

SEQ ID NO: 429820 - DNA, 281 bp, Homo Sapiens
gcggccgcccgggcaggtaccctccactgaccaggccaacataaacatggctgggaaaagggcaatgtttttatggtccttagtccctggagaccctgtttcactgggaaagatactctcactatagtgaccacttgcctgagactcccaattctggaagcctctcacggaagaagctgtctaggaccacctcagtgaattgattcagctcccaaaacacccaggaagcccttccagattaatgagaacaggaaggcaaacacactcccaggacgctgatc

SEQ ID NO: 429821 - DNA, 399 bp, Homo Sapiens
  misc_feature (140)..(153): n is a, c, g, or t
gcgtggtcgcggccgaggtactggctggcaactaaactgggtgactaagtcaggtgacccaatacatacataaaagctagttgagccagtttgaggacatacctgaaagaaacactagtcaccaatgcatctgtggctgnnnnnnnnnnnnnncaaagagattctcaggaggtttagtatttattcattttcctttaaaaaggggacagcgatgagacaaatgtttacatacctgtgagactttagatagtgcccattaaatctacattttacataaggcgaatgtttgaagaacaggagaaaagaagaaaaagatgtctcagggagaagcaaaggcatgattaatctcatgttttctttgttctgtgcctaggaagataagctagtaatcaatattat

SEQ ID NO: 429822 - DNA, 274 bp, Homo Sapiens
gcgtcttcataagcatacttaataaaatacacttttttcaacagaagtataatgtcaacccagttctttgaatcatcaaccttctgtccaatttctaaatcttgagaattctctgaactccattcttgggaaatctaaccatgttattggcactccctttagaatgaaaaggggtttgttccttacagtggacttatcagtttttcttcctagccccagaatctggctcaaactctccaacataaatcaagaaacaataatattttaagagctg

SEQ ID NO: 429823 - DNA, 372 bp, Homo Sapiens
  misc_feature (274)..(286): n is a, c, g, or t
cccctttccactaatgttgatgttatatatacataatggcattatgaatatacagcattattctaaattaaaggttgaattacagtgtcaaatgacagagaggaggctgggcagagaagaccttagatgtctactaaaaatatcttctttgcaatgctactgtgatgaatagacagaacatatgtaaagctccagaccacagtgttgacagaatacctgctaattgttgacattattgccagaaataattttagcaatagagcactttgttcannnnnnnnnnnnnatggttttgggatgcgagacaatggaacatagcttggaggatttttaaataacagctcaattgcgatatgattcacatgccacaga

SEQ ID NO: 429824 - DNA, 367 bp, Homo Sapiens
gcggccgcccgggcaggtaccatgctaggcagaggcagtaaaatgatgaataaaacacagcagaatttacagtttggtgggatagcaaaacacagaaatagataactcagtataatgtggtgaatgctaagagacttagctcaaatcagcttgttttgaaaattttaactgttgccaagctactagtaaatgagttcaaattgtccactttagccttctaaaccctgattgtttctgtgcagttttaattctcattactatactgtgtgatctttctgattcagatccaaacagatttctcttttatgagccttattgtctcccatttctcaccttggatcttgaagccatagtaacatctttctca

SEQ ID NO: 429825 - DNA, 330 bp, Homo Sapiens
acaaatctctggaaaatgttaagagcaaaattggcagctattgttttaaaaattcttcctagtttatttgaactatttctagcaagatctttcagaaagcatatagatccctgtgttgtaagttcttagaggtcagggacagtttttttcaactttctctccttaatattatgataggattaactcttatttattcttagggtctctgatgaaatgttatttccttcttgactagatggaatgccctactataaatttgcatatttctctgtaatttcccaatctggtcactcatcacacttccttgtaataaactgattaattatcctt

SEQ ID NO: 429826 - DNA, 355 bp, Homo Sapiens
  misc_feature (56)..(65): n is a, c, g, or t
  misc_feature (116)..(124): n is a, c, g, or t
attccttccttttttgtttaaatttaatgtatacgggctcttccaatgagtgggannnnnnnnnncatccatatattcactccaggtttatggagggaggttctactattaagacnnnnnnnnncgaagcaaaggcttgttaaataatgaaaaatattaatattactgctggttgagaaaggaatgagcctacctacgataggatgtttcatgtggggtatgcatccgggtaggccgagcaacgtcggggcattcctgataggccgacaaagagttgtgggaagaaagatagatttactcccccgaaatatatagagaaatggattgtgggtggaggtttggtttaagtatagcc

SEQ ID NO: 429827 - DNA, 372 bp, Homo Sapiens
ttgtaggtaagcaaaacatttaatggactatccttagttattgctgtggtgaatgcagtgggaaatatgaaagaagaatatgatgccccattcattgaatattcacaggcattatgctaggtgttttacaacactttttttcactctcataacaatactttgatatattttcattagagaaggaaatacaccagttgagtaatggaaggtcatccaacaggtaattacgagtgctgagattggaactcaggtttgtctagttttgaaacccatttcccctactttattactaagacttaatataaacattcactcatacattcgtgctttcaatccacaaatatttattatatgcttaatatgtgggagaaa

SEQ ID NO: 429828 - DNA, 304 bp, Homo Sapiens
tttctgacctatattatacatgcttgattctctcctgcaaaagtattttgataccatgccattgggcttggtcgatctgcgattggaattatatgactcacccatcctacaaatggcccgcgtaatagcttaggtgtctaactggccatctaactctgcctgtgtaccttgtcaactctctgcacgttcatctggatggatacctggtcctcggcatcgattaatgcaatggctaacggagcatttacaggcgcacttacaggttcacgactcttccgctgctttctcgcattactaggttggt

SEQ ID NO: 429829 - DNA, 105 bp, Homo Sapiens
tcgagcggccgcgcgggcatggtgtacttcaagccaggggctcagcagccaagacctccactccacccaaggctgggcctctagaatacctattcccagggagcc

SEQ ID NO: 429830 - DNA, 354 bp, Homo Sapiens
gggcgtggtgcggagggcggtaggggatgggaacaaagccagaaaaggaagtaagagccactggcggccactcttctttaaagcagccagaagagagtgggttgaggaaaaatgaagtcctgagctggtcagcccaggcggaagagccacccgaatccaaccccacagtgaatagggaaggggctgagaaaacaacaggagggatgaggattagacctcataaggccacgtcctgagagccaagtggtgctcagaactcgacctctctgagttccaaatggcaagagtgaaatatggaaccgggaaagccaccccccgcccccaccaagatcatactaggacttgagggtctca

SEQ ID NO: 429831 - DNA, 136 bp, Homo Sapiens
gcgtgggcggggccgtttactcgaatggaatcaccattgaatagaatagaacggaatcaccgaatggaatcaaatggaatcatcatcatatggaattgagtggaatcatcgcatggactcgaatgtaatcatcaga

SEQ ID NO: 429832 - DNA, 279 bp, Homo Sapiens
ctattgactcgggtcaaacgctgtgaccgcggcggctggcactaaatagaccaaccctggggttagaatagcccattttaactctctcttattgcttaaggattatcactgctgtttccctgtgggggcgtggttaggccaaacagtttgagctgtcttgccgcgtgctcggtgcttggcccttttgaacgtggcgtatcacagggtgaactcactggaacggtgatgctcgcactggtcaatccactatagaccttattgaaaggctattaccaaacc

SEQ ID NO: 429833 - DNA, 103 bp, Homo Sapiens
accctccccaacacacaatcataatccacacatcccaacacacaccactccaccaatcaacataatcaacacttacaacacacactctcccaacgtcacatac

SEQ ID NO: 429834 - DNA, 375 bp, Homo Sapiens
ggacatgacaatcacccttcatctcatgcagattaatcttcctgtcaggttaaaaatgtgggggtggggttaggattgctaagagccaggtatattccttgagtaaaaagcattaatatacatattggcttaaggctagagtctgctggatacagttacaccatatcttggaactcaagccctaatgaattattcaactgagcagaataatccagcataactagcaataagcaacacattcatttgaggggaatgctgtagggaggacagacaggaatatttatttagtgtttatctgtattgtgccaaacaccttaagaaggacattccgctattccccttacacagcgaaaacacggagcctcagaaaaagat

SEQ ID NO: 429835 - DNA, 175 bp, Homo Sapiens
gccgcccgggcaggtacttaagaattataggagctttataaatgggaaaaaaatgccataggtcttagatatctcagtgcacaaaaccgagaattactaataagttagcccctgccaatcatttgagacatgtggaataccgcccttgggttttcatcacactgactttcagcta

SEQ ID NO: 429836 - DNA, 307 bp, Homo Sapiens
gcgtggtcgcggccgatgtacttactgaacagcaaacaacagactatcttttaaacccattttactctgcttagttttaaatattgagtgcaggtgggagaactagatatgagaagaaccacctttttattattggaaatgaccaagggcattgttttggttaaagtaattttaggatgtttccattgaccattgatatcttacatacatttcctgttttaacttcggagcgagtcattttgaaggattttgctggactttcagaacgtgtgatttggtttaaccggtgctctcgggctgccatatg

SEQ ID NO: 429837 - DNA, 389 bp, Homo Sapiens
aatgtctcagatccttagtttcctttttggtttttaagattaaactaggcaatatgcgtaaagcatttagcatcagaaatacttatatataaacacatagaaaatgatgacgagtaattaattttattaacattattatatatttgggggaaactgcaagtaaaaatagaacatagataaaactaaaagatgcaataggaacctcctaatcattttgatagctggggcataacctggtttctccaagacagcataagcacttgttgaaaatctacttattttctaaggacttgtcagagctgattgattgaatccttataacaagcttgcatgctggatacttatttttattcctatttttggataagaaaactgaggcttaaaaaaat

SEQ ID NO: 429838 - DNA, 367 bp, Homo Sapiens
cagcggccggccgggcaggtacctgtgacaatatagtttcttgaccacatttatttatcgtgagttattgtgtagtgacagatattaacttaaggaacgacatgcttaatatgtttgccacaattccatacattgatgaggatgctgcttttctgactaatgagaatttttgttcatctaagaacatctcccctggagagtgagagcccaagtcggctctgccttaaattcatgatctgattttatgagggtcacccagaacccactgtgcccttaacacttgagccctagagaagcctgtgctccttcaaggggaagatagatgggcctgaccatcctatggtgggtgataacaataaagtgctca

SEQ ID NO: 429839 - DNA, 501 bp, Homo Sapiens
gggccaagtagggttggtagaaaccacacgagcactggcggtgttaagaaggcttgagtctcctagcagtagccaggaagataaacccagttgcctgctgtgtctggaggccagactgcttggccaaagaggcagtggccctttcctcctctgggagtttgaggatggtggaagggaaaattgcaaataacatccagaggaatgacactaaaattctagcattaagtaaaatatgtgttgtttaaactctgatttcctgaacagcttaaacccctaaaagtcagagcatctcatggtttattttaatctctatcaatttccatctgtgtctacttggagacctgctcttgacaagctcttcaaggtggctaactgtgcaatattacctctattaatagtctctctcaaacctggctcctaattgcactaataaggtgggtctgccatgactgtaaggaatccaaacaatactgctttccccaggccaatcacagtgtgttg

SEQ ID NO: 429840 - DNA, 423 bp, Homo Sapiens
actgataacaaaccacccggcaaatggtggttataatgagatcagcttatcatatctacatactcactgtttcacagcacgattgatatattcaacacgtagccatcatgagcatgacacaagaccctatattacagacataagacataataatagccatacatatacttcgctggaaatgattaaatggcgtgtgagtcaaacccatctattttaaaattcttttctctaaaagaggatgatgatgatttagaggcctctatgtgttgacagtaaaaaagctactctactgcgcttttggctggtatatctaattgtatgacattggctcatatcttgacatcggtatgttgacgttatcgtgtagtagctgatgattggtgagtgtgctgttgctcatcgtatgctactgatatggcaagt

SEQ ID NO: 429841 - DNA, 192 bp, Homo Sapiens
aaggcgattacggggtatatttgaaatgaaatgctatcatactcaaaattaccagattaatgaaataatcaacaggaaaattatctatgccagaaaaactatgactgattttccgaaataggattaaattgttcatatgtattaatcaaaaataagatctgctttgcagtcgaaaccacacaaccagtttcc

SEQ ID NO: 429842 - DNA, 297 bp, Homo Sapiens
acctctgggatacacgctgtatgggtttttactttcattcaactcaaaatatgttctgatttccctcttgatttcttctttcaggccctgtatctgttatgattacttgttttgtccagtgttaaagtttccaactataagtttggattttcctacttctacttcttacagttttattagtttttgttttatgcattttgaaactttgttgttatatatgtatacagttagtgttgtgtctttgttgacttgaccacttctattggatatttccctttattccttgttctgaaatct

SEQ ID NO: 429843 - DNA, 141 bp, Homo Sapiens
gggcgcccgggcaggtaccaggccttgcaaatctaaaagtatatgctgttgccttgaaagacaacagacttagttgggcatgaggttgttcccaacatttccccctgaaaactctactacgcgtggtttcattgtcttctg

SEQ ID NO: 429844 - DNA, 161 bp, Homo Sapiens
tgagccattgggcccagcctggaaatatttttttgaaacatgactgataagaatattttttgaaagaatgacagataccaatcatgaaggaaaagattttcacaattgacaataaaaaactttaacttctgaatggtaaaaagagtgagaaaattaaaagc

SEQ ID NO: 429845 - DNA, 370 bp, Homo Sapiens
cctgaaagtgagacaaagttatctgtaacagacacctatgcttacctacccagcccccaggccatgcgagcagaggagagggtatcatttaaagggcccgcagcagcaaagaggctttctctgctctgtctttgacccatctctgttctgggtaacttcactaacctggtccctctaaatctgtgcctactttggaatccaccaagagtctgtttctgccctaatttgcccacatgccagctctcatctgcttccctgaccacagttccagcctagtggaaccatttctggtttggagctagattcatctttcaaagcagagagtgagaagaaaattctctaactcttgatgcacagaaggagtccagta

SEQ ID NO: 429846 - DNA, 435 bp, Homo Sapiens
gcgtggtcgcggccgaggtactttcatttttcaaccgccaggcagaaaaaggaggggcagcaactgtcgcgcagaaaaagggggtgttgaagagtagcctctgatatccagtgagcatgaaccggccttaggtttcctgcctccagaccctattctcctgcctcatttccccccctgagagacaggatccccgtaagtctttatgtgagacagagggactgatggtcttttttctgtaactgcgtcacactgacttgactgacagtccctgcctattggaatcacagaactctcaccctgccctgtctagtggagacagggtagtttcttgatggccaggggtggtgaattcatttggaactggctggaaaccttactgcacaatcatctccaggcaagaggaaatgaatggttaaaagatttcatgggaacttc

SEQ ID NO: 429847 - DNA, 510 bp, Homo Sapiens
gtccataggtttctattctcaccatctttctgttacaggcgacaggaatttcagagaacttttctaatcacaagctctccagagtccatctgcaatgccatgtattcactagacccgatccagatcctattaaaactcagcatactgcttagtatgctgagaagaaagcgctcatcagtttgatgcaaacttctcagattgggcagctacaattagagtaaatacaactgttgtatcctagagaccaaggccagctccctatgactttcccttggtgttgccacaactgccaaatagggatgattacaaatcttgttcctttccacaaaagggctcttatgaactgtaatgataaaatattgacaaaacacttttgaatttgtggttaagatattcctggaatatctcaatgaacgcagagttttgggtttaaagatcaaagaatgaggtctaataaatgatgtatttcagtttaaggcttaaattatatctttcagcctccacgattcc

SEQ ID NO: 429848 - DNA, 202 bp, Homo Sapiens
aggtaccattggggatgtgacaaaccttaaggaagtcagtatacacagcaaccccataacgtgtgactgtgacatccgttggatgaacatgatcaaaaaccacattctattgattgagccacattcactgttttgcgtggaccctcctgaatttcaaagtcataatgcacggcaagtgcatttgagggacatgatggaaatt

SEQ ID NO: 429849 - DNA, 353 bp, Homo Sapiens
cgagcggccggccgggcaggtacctaaaggcactattttaatcacaatgaaagccatttttcttttgcgatttggataatatttcaaaactagtctgtatgctgtacattcctttcatcaaaatgtgtgtgattttatacccttgaactctgagctagcccataaagatgaagaaatgagtaagatatgatccatccatgctttttcttgggagagtgaaacaagcaagcctatgattccataatacatttgtaagatattatttttctcaaatgtatttcttttccatgcacatacaaaaaagcagctccttagaatcatgattaagtagttgctttagaaagtgtatgtgt

SEQ ID NO: 429850 - DNA, 648 bp, Homo Sapiens
  misc_feature (598)..(598): n is a, c, g, or t
gagcggctgcccgggcaggtacgggggaagggccatagcctcaatgatagatgtggaagacactatagcatagcctgcctttgccagtgattggtgattgggcctggaagaactaccatcaataaaccaagtgtggtctgggtggggaacaggaaacagggaaatatggggaaatggggagaatgtcatatggattagagagatacaatcatggggttcagatgtagtatcaggaataagatgagaggccggattgaagtctgggccaggaacaatggtaattgtgggaaattcaacgaatggtgagtacagttgaaggagccagggggcagaaagtatatgtgtcaagtgtgaggaacaaaatagatattgaaagttatgggaactgtagagagtaaatggagcatagcttgtggttttgagggcctctaaaagtattaaagtggtggcagccaccacatggagacatgagggcaagcctaaaacagtaaggtcaagttgtttggacagaaaggctacagggcgtggtcccagctcttgtgtaagaattccaaccacacagttctgtacattggctgtgtgtaatgaaaagtgttgngatgagttagggagagctagtgtgggagcagcttctagggctggtttaag

SEQ ID NO: 429851 - DNA, 345 bp, Homo Sapiens
atttttaaaagactgacatattgtcacatcgactgaaacagagttccctgcgtcaatcaatacctctttctctctttcccacacacgcctatctgccaaaccatatggcaaaaagagtccttttcctgaaacataagaatacttaatccttcaagccactgtagtatgaatggaattggacttattctgaaagttttagatttcccaataatacctaggtcatgccctcagtaatatgggacaaatgctcaaaagagaatgtcaataaacctgtatttcccaaaaactttaaaagataaaccatccttcaactgcatttccaataaacttatattttgtgtgagt

SEQ ID NO: 429852 - DNA, 225 bp, Homo Sapiens
gagaaagcagagacagcaaaggtagctctgtcaaactggtgccattgttggtgattaacggagactctgtctccaatatgaactcactcatatacacacttattgcttagaagacaaggcaagcaaacctgcccaattttacagaggagaacaatttcacttataagctaaacttaacactcctgatcctcctggcttatggtgctccaatatttgttccacttt

SEQ ID NO: 429853 - DNA, 213 bp, Homo Sapiens
ccttagcgtggtcgcggccgaggtacagctagcagtcaggggggagaggaacccatatttttacagcattgagcgggaacatggctgcaactgtgaggaaacacagggagcacacaaccaaggaagcatctaccaactgaccagtaagcctaagtgccaccaactggattacatcccgaagcttcaacacaaaatacctctcttacataccca

SEQ ID NO: 429854 - DNA, 210 bp, Homo Sapiens
  misc_feature (91)..(108): n is a, c, g, or t
tgaatttatcagtgtatcaaagagaagttatcctggacaagcgggtaaggaagacttaagattattgcaacagggatcaagactattgcannnnnnnnnnnnnnnnnnactgaactgtgctgaaacaaaagaagagttattgataactggggtgagcaagtggaaaagtattagaaaacttaattgggtaacgttggtcatcctgacgag

SEQ ID NO: 429855 - DNA, 313 bp, Homo Sapiens
  misc_feature (108)..(108): n is a, c, g, or t
tgtgggcaaagagagaccttaaaagtgagagttgataaaaaatattttcaagtcagtaagtgtcacttaaaatgggaatataaaatgaaatggatacatacaatttangatgatagatatcagttgagtaactatgctttttagaatgtacaacatgaaatttatatttgactatataaggcttatatagaataatagacagaaatagggaaaatgctatcatttcacctattcattagaccaagaaaatgttcatattccacaattctaaatgaagactactaaaattatatttctatataaaaaaatggag

SEQ ID NO: 429856 - DNA, 199 bp, Homo Sapiens
ccatcttaactaatatggcgataacgggtgtacgtgtgccttgtggtcagaagtgggctagagcattgttaatcttagagcgaaagcctataatgactgcacctgctcataatgtgatgtccatagctatgtctatcgatagctgagaggtggatgtcaatgagtgatgcaagagtacgatgagatagattgggcttac

SEQ ID NO: 429857 - DNA, 402 bp, Homo Sapiens
  misc_feature (55)..(96): n is a, c, g, or t
  misc_feature (373)..(373): n is a, c, g, or t
  misc_feature (376)..(376): n is a, c, g, or t
gagactggtctcgctatgttgcccaaactggcttcaaacttctggactccagcannnnnnnnnnnnnnnnnnnnnnnnnnnnnnnnnnnnnnnnnngaaatctcaaacttttgtttgagggtaataggaagatattttttgatttgtttcctgtagtctctgtataatgctgaaccaggctaactgcttttcaaggaatcctttccctatataggttaatggcatattcatatgctgattattcaaattaaaacctccaaaacttctttaactccctcctttcctgcacacccaaatacaattaatctcaagaactatcaactttaccttttaaacattttgaaaattcttccaccctctctattatcattgnctntgttcaaacctatctttgagtcttct

SEQ ID NO: 429858 - DNA, 397 bp, Homo Sapiens
cttgtcggccgcccgggcaggtactatgagattggtttgctagagaactatgctattgtatttatctgtggttttcaaacaaggctcctaaatagaaacaatctaatagaattatcaacattttctaattccatcttcctagttaggggaaaaagaagagcttgaggagggataaaaggtaggaaaaaggttttttaagccacctcttagtaaccatgttatggaaacagagcccaaactagtatagttctataatctagatttcttggtctgtaaatcccaggatttgttctattaaaaagagcaaattcttagcaattgtcattatccattgcattggtcactagctgaggactaccactcaaagaaattcacaaaataattttctaacaaatag

SEQ ID NO: 429859 - DNA, 388 bp, Homo Sapiens
cgagctggccgcccgggcaggcacccgatacttattttttctgctcctctccctcctcccacccttcaatctcaaagaggccccagtatctggtgttcccttctttgtgttcatgagttctcattatttagctccctcagtgagaacatgtggtatttggttttctattcctgcgctattttgctaaggataatggcctccagctccatccatgttcctacaaaagacattatcttgttcttttttatggctacatagtattccatggtgtatatataccacattttctttatacagtcgatcactaatgagtgtttaggttgattccatgcctttgctctcgtgaatagtgcagaaatgaacatatgcatttatattacctgacact

SEQ ID NO: 429860 - DNA, 163 bp, Homo Sapiens
cggtcagggctattggttgaatgagtaggctgctggttgtgctactaactaggatagagataaggggtgtatgcgtgccttttggtaagatgagagcttgggcattcttaatattatagcgaaggcctttaatatctgcaccctgtcatattgtgatgggcat

SEQ ID NO: 429861 - DNA, 227 bp, Homo Sapiens
tcaatggcctattagaaaggattcttagataaaagcaagttttctttgcagtatttgtatgccttccgttgcttttggccataaggacagtgctctgctggtgaattcattttctagatgcagcaagagcaggtatgctatgcttatgtcagagcaggtgattgcgtgagaaggataagcagaaagattttgaaactgactctcaggcttctctgtctttgctagct

SEQ ID NO: 429862 - DNA, 256 bp, Homo Sapiens
gctgtctcattactgagctcctctttctcctccccatgaacttttgtcctgccattctttccctttcaattagaactgtctttatcccaagtctctctttggtatttcatcagtcttcacatcctccctttttggtctgttccaggaacaaacacagtcttttttcttcagacactgtctgggagagctgtgcccaactctctaatttccccccactgccgtcccatagtcctcccatcaaccctactccctggct

SEQ ID NO: 429863 - DNA, 121 bp, Homo Sapiens
gcagcgtaagccaccatgcccgatggccaagaattttctagaattggtaaacatttgagaagctatgattcctgatcgggatatacaagaaaagaatcttacctagaatagagtgaaaaaa

SEQ ID NO: 429864 - DNA, 295 bp, Homo Sapiens
  misc_feature (257)..(257): n is a, c, g, or t
catatccatctgttcttaattataactctctattttaatcatatttttattcttctttgttaccattaagagtattacctatacttatttaaagttatttttggtttgttctacttggattttgagagcagtaaatttatatcatgattgttgcatttgttggctgtctcttacaaattttttcttatgtgctttggaggtttcatttgtagctttatcctgagtgggaaattttcttctctctaagagcctattgngtggttgcttcctctcatctccctggaagcctggtctg

SEQ ID NO: 429865 - DNA, 249 bp, Homo Sapiens
gcgttcgcccgggcaggtacagaggcagagtatcaagaggcatggacaggaaaccacacgtagttcactaagcctggagcacagggtgctaggagggggatcataggatgtcaggttgaacaggaggcatcagattttggaaagccttgaataccaggctatagattttattttattctatcaccacagtagaactattggagggttttaaacattagagcagtttttcaggaaaaccaaccaggcagc

SEQ ID NO: 429866 - DNA, 421 bp, Homo Sapiens
tcgtggtcgcggccgaggtacatgataagagggagttatacagcttatctgtaacatgcacatcaagaaaaggcattgactatttaaagcaagacatattaatgtatttgtctctttataaccaggcaaagatgtggcatggcatcacttaagcatacgggtatttgagaaccatgaatccaaaccccatcccacctcattccacctgcacgctagagcagcattgccatgatgagaacattgctgggggaaaatgtaagtgatgggggaaatccattaagcaaggccactcatggaacatttactgtggattcttctgaaaaacatgtttacatcaaatctgaaggtgaagagagaggaacaagacaaggtgagagcaacgtgaagatggaataagccagagcgtatgtagacatgttcg

SEQ ID NO: 429867 - DNA, 358 bp, Homo Sapiens
gcttaggattgctttggctatttggggtctcttttggttccacatgaattttagaaaagtttttttcttattctgtgaaaaatgactttggtagtttggtaggaatagtgttgaaatctgtagattgctttgggcagtatggacatattaacaatattggttcttccaatccatgagaatggaatgtttttccatttgtttgtgtcatctctaatttctttcagcagtgtgaattttcttaacataggtcttcttgggccagcttgccttcagagcagagaagaaaagctaacagtttttgatagctactggtactgatagtgaataacataagaatcgcccttgatctattttggtt

SEQ ID NO: 429868 - DNA, 292 bp, Homo Sapiens
gcttagaacccaagaggttcctggatatgggaagaataggatttatgagtagattgccaaagtggcttttttccccaatttgtagtgctgctacaaagaaacaacgtatactccagtggatagaggtgccaatcttgaatttgcagaggactttgcttgaatttcttgacagcacagcttccagtctgtcttttatagtttttatttacttccaatagattggaagcactttgatgacttccatagtgtcatgttcatctctgaatcctaaacaggacctcgtggagggctg

SEQ ID NO: 429869 - DNA, 333 bp, Homo Sapiens
gcttcaaatcctttggattctgttactacacttcatcctgatatcaaaactaataatatgagtattggttcaccttatccaggctttgcaggagagtccaagtggaatcttagtggaaacttcgtttcccaagtagaaacttagtttctgacacgtcaccactactctcttttgaatccagcaactgcatatttttgcgaccagcaaagtctgagacaggcccattattttccccttgaaacagccaggctgcagccttcctccaatgcagggaaacacagtgatgaatagaacataattattggtgttcattataagaggcagcccaaacta

SEQ ID NO: 429870 - DNA, 191 bp, Homo Sapiens
ccttagcgtgggcgcggccgtggtactgcttcttttggtcaaataatgttgccagtatgttttctgcattttggggagaaatattagaaaaaattttataatcttttcctgcttttttgacagctgcgctttctactactcatcatattttcagggtttcagattggtaaccgtttattttttattttgta

SEQ ID NO: 429871 - DNA, 367 bp, Homo Sapiens
gagaactcatgcatttaatgatactggggtcaggggaaattacactttctgaggtttagctgtaaaacaatctgccatggtcatatttggtgtatttggattcattctacattgagaaaacaggtcatctttgatcacaaatacctgcaaactcagtttgcataatctatttactgacatatttatatcagtgttgaaattctttagccatcaaattaatttaaatgtgtttcagcatcttttcaccccaagatttaaaatattcaccatattgtgttactgaatgttttcacgttttccttgtgcttagcttacctagtttagactttgctaatgcaaccttttgattacccgcgtacctgcccgg

SEQ ID NO: 429872 - DNA, 331 bp, Homo Sapiens
atttgcgctagcaactagagctgcctatgtcatcaccagacgcggcattcactgggttatactattctcatgctgcacactggaccacacctacaccaacacacatcatactatcatattgcttggagtgaatataacgttgtgcccacagcactgtctaggtctattcggaatgcccggacgctacgcccactacccagatgcatacaccacatgaaacattctattatttgatggctcattcatctgtgtgacagcagtaagattaatgagcgctatgatgtgagatgccttactgtctaatcgagctagcctaatagtatgagaaccg

SEQ ID NO: 429873 - DNA, 470 bp, Homo Sapiens
  misc_feature (309)..(309): n is a, c, g, or t
  misc_feature (379)..(379): n is a, c, g, or t
  misc_feature (391)..(391): n is a, c, g, or t
  misc_feature (403)..(403): n is a, c, g, or t
  misc_feature (437)..(437): n is a, c, g, or t
tttattttccttccatcttttttccctttgctcaggcacctgcacagcagctccaggaccactcagtgtgggctccaacccactcagtggcctgcgctgtgggagctgctgaccaatcctcagtggctggctgtgcactccagtccgtggggaactgctggatgggcacagagggaacctgcacaccctcagaccagtcggccacctcaggctgagcagcagtgaactcaggagctggtgcggtccattcaccctggaattcctccttggtcacagccttctcagaagaagcctgctccttccttcttnaatcttcctctgggtctctggtagaagtaaagatcagggaatgacttcccaaggggtgctcacgggaagntaagtacttcgnatgcggagtaanttccctgggcaagaatcaacaaaataagacccantgaagtgagctccctggttgttgaatgggatgg

SEQ ID NO: 429874 - DNA, 471 bp, Homo Sapiens
ttttcatgtcagttattattactttattacattttgggtctcttactactttcaatacagtacattgtcttttgaatgttacataatacaaaaggtattggacggttttaaaaataaactttaactacccattgatacatacttgatgacacaagttcttccatatacaatgcaaagcatacaaaaaatacattaggaattctactttgtacagtcgttcattaaatagtatttacacatacattttcaggttcctctgagtatcttgataaccccttgggaagatggtggttaagttcgtccttacaaacttaaatttgtaagtcttacatctgaaataaaagagctcaggtaaacttagaactgaccgagcctgagctagggaggacaaggagggtgtgggggaagcagcctggggcatggcacatgggtgaaggggcgtcgcacctccacataggcctacagtaccgg

SEQ ID NO: 429875 - DNA, 344 bp, Homo Sapiens
  misc_feature (21)..(21): n is a, c, g, or t
ggagagggtcctcaggactcnagggtttgcaattgtgcatccagttttcatgagcacacatcactatttgctgctgagggaccaactccaactgccgcacacatcctgaactattccatttgaagctttattttgaacagatttgtacagtgaaaagatacaaggaggcttacttatggtgggtagattactacatcaagcttttgcaaggcagagtgaaagtcttacttttatctggacactatttcaaagcaattggaaaatgactatatagcagtctggttgagaatggcttgtatgtaactgtacatctgtgtttttgctttcccttcttcctctagaat

SEQ ID NO: 429876 - DNA, 460 bp, Homo Sapiens
  misc_feature (444)..(444): n is a, c, g, or t
atgtatattcccaagtcatttcagcactgcttttagttcatatgaattctcaggagttgaaatacatatggacaacatcttttaaaacatgattacatacacagtatttacaacaaacacatttcattggacctaagtgcaatttaatattattcatatattaatcaaatattagtgcatatgtgaggtcattataaagtacgtggattttaaatcatacattacaaaagtgaacacaatatctatgttcaaactaaaagagtcaataccaagttttaaacacttgcacaaggtaaagaaaaagaatgaagatgcaagaaatgctatattgttatgagatacaatttatcaatataaaagtcatatatatgaaacttagaataacagttgtctcaaattaggaggaaacacagagtgggtactacacttccatagaacttagcnaaggcatagaaaatgg

SEQ ID NO: 429877 - DNA, 332 bp, Homo Sapiens
  misc_feature (68)..(68): n is a, c, g, or t
  misc_feature (112)..(112): n is a, c, g, or t
  misc_feature (171)..(172): n is a, c, g, or t
  misc_feature (205)..(205): n is a, c, g, or t
  misc_feature (249)..(249): n is a, c, g, or t
  misc_feature (265)..(265): n is a, c, g, or t
  misc_feature (292)..(292): n is a, c, g, or t
  misc_feature (294)..(294): n is a, c, g, or t
  misc_feature (298)..(298): n is a, c, g, or t
atgtcgttgccatcgagaatcctgctgacgtcagcgtcatctcctccaggaacactggccagcgagcntgtgctgaagtttgctgctgccacacgagccactccgatcgctngccgcttcacacctgggaccttcactaaccagatccaagcagccttcagggagccacgnnttctagtggtgaccgatcccagggctgaccatnatgcactcacagaaggcctcttatgtcaacctgcccaccattgntctgtgtaacacaganttctccccttgcgctatgtggacattngncatnccatgcaacaacaaagggagcttcactcagtggg

SEQ ID NO: 429878 - DNA, 428 bp, Homo Sapiens
tactgttagttttattattttgttaaaaagatttttataatggctaatatctgaaagctatatttgatatttttgctatagttttcaaataaatgtttatggaatacctataagtgaggtactttaggtgattttttttggcatttatagatatagattccttcattattttaaagctcaccaaggttattctatatttgtaattattaatgctttatctgataatatcatcagggcatgtataccttatatttaatgtgatttttttaagcattgatgtttgattattaaaacttccataaatattaactttattctaagacctccgttaaatataatccttaattcccatgagccatggttttggtaattgattgaactgacactgctgcttcattaccaaagagcctaggtcatttgtaataggg

SEQ ID NO: 429879 - DNA, 458 bp, Homo Sapiens
  misc_feature (289)..(289): n is a, c, g, or t
gaagcctccccatcagcaccatgaacccaagtgctgccgtcattttctgcctcatcctgctgggtctgagtgggactcaagggatccctctcgcaaggacggtccgctgcaactgcatccatatcgatgacgggccagtgagaatgagggccatagggaagcttgaaatcatccctgcgagcctatcctgcccacgtgttgagatcattgccacgatgaaaaagaatgatgagcagagatgtctgaatccggaatctaagaccatcaagaatttaatgaaagcgtttancaaaaaaggtctaaaagggctccttaactggagtgaagccacgcacacaccccggtgctgcgatggatggacagcagagagcctctctccatcactcccctttacccagtggatgggctagtcctaattgcccttggtcttctgaaaggttaccagccgtggtcacatc

SEQ ID NO: 429880 - DNA, 192 bp, Homo Sapiens
  misc_feature (54)..(54): n is a, c, g, or t
  misc_feature (57)..(57): n is a, c, g, or t
  misc_feature (60)..(60): n is a, c, g, or t
tctgcccttccctttctccctcttgctccacttgctcctggctccgcagttctnttnttnatttgagtctcattacagctggttgtatgccaccatgtggttgatgggatttgaactcatgacctccggaagagcagtcggtgctcttaactgctgagccatttcaccagccccctgaatatattctcatac

SEQ ID NO: 429881 - DNA, 410 bp, Homo Sapiens
  misc_feature (12)..(12): n is a, c, g, or t
cgtggaagacgnagccgcacttcccgggtgactcctccggccagccggcccctcagatgagggctgctccccgaagagcacctgcagctcagcctccagcagcagctgcgccatctgcagttggctcacctgccgctgcgccccggcagccaggcctgatggccaagatggctaccaccgcggccggtgtggctgtgggctctgcaagtgggacacaccctgggtcacgccatcactgggggcttcagcggaggtggcagtgctgaagcccgcaaagcccgacatcacttaccaaggaagcctcagggagcccaagcttgcagaaccaagcagtctttttggaccttgctcttcttaagagattcaaagcagttttcttggaagtgttgcttcagaaaccaagaggcgat

SEQ ID NO: 429882 - DNA, 418 bp, Homo Sapiens
tcagaataaccaatttattttttttaactcacaatcacaacacagtccaaggaggccaaacacttccccagtaaccaacactacatacaagcctcagtaagcatccacagttagatctctttcacggccattccaaagcaatgaactgttagaaatataagggtccacacttgtactatcaattatacagaaccaatgttacatctcttcagcttgaatttcttgattacattaaaccatttgcaatcctgcactgccgcagcacctcgttgaagccctcacagagcttgacatcgctctggttctgagcacactccagaaactgcttgatctctagagagcaaggtccaaaagactgctggttctgcagctgggctccctgagggctcctggtaagtgatgtcgggctttgcgggct

SEQ ID NO: 429883 - DNA, 340 bp, Homo Sapiens
tgagaaaaataatttaattaattagatgtatgccaccctataaggctattttccaaaatgactgactccaggttcatctgaagagctcagagtccttccactcaatgctgccaaagactgggacttcctgtctaagactttgctgttttagcctcactaaagtttcctcaagatgaaaagtccagtagactgctgcataaaaatttatttttctacgtgtgaagacactgaggatgctctactggttgtttccacttttatttcactgtgtgagttattgttgtagcagtagactccaacccctcaggcttctggaaccctgtttggtttgatatgtttt

SEQ ID NO: 429884 - DNA, 348 bp, Homo Sapiens
tcctagttactttctgtgcagtaactagtaaaagactttgaattagaggactccagaccagtcgtctcctgtcttcagctgagttttgatttgaagaaagtaaattagaatttattgcttacaatataaaatgagtagttttatatgaagttcattttcaagaagaaaaaaataggtgatctggcaaatttggttcatgtgctagtagaattgataacacttgtacatgttttacctaccttagccatttctcttacctagctagccactacagatgattggtttgcaacttcggtcaacaagtgaattattgaggtgtttggaaaaagagatcctatagagaaggaa

SEQ ID NO: 429885 - DNA, 386 bp, Homo Sapiens
  misc_feature (223)..(223): n is a, c, g, or t
tggcaaatgctgaaaggttcaaggtggatctaagcccctaccctaccatcagtcacatcaacaaggagctgctagccttagaggttttccaagtgtctcacccccgtcgacagccagatacccctgccgagctgaggacttagctcccaaaccatgcccattggtacagggaagggagtaggcccagattgctgggtgttctactgctgtgaagagacaccantgaccatggcaactctgacaaagaaagacgttcaattagcttacagtttcagagattcagtccattatcatgatggttagaaagcaaggcacatgtaaggcagtcatggtgctggagaggtagcagagaattcacatctggatccaaaggcagcaagaagagt

SEQ ID NO: 429886 - DNA, 104 bp, Homo Sapiens
gtcctggggatcttagtaagggcaggagttagcggtacaaagttgacagccctcatcaggtcttcaatgtaacctggggggttaccaacttaatgtcaggacaa

SEQ ID NO: 429887 - DNA, 410 bp, Homo Sapiens
  misc_feature (290)..(290): n is a, c, g, or t
ccctcaggataaaacagttgacctgcttcacagcagcctcctttagggtacattgcaaaataaaaaggggttcaaactgcaggccaggtcaccagtgcttttctacacttccaggagtggaaagtgccctagccaggcagaacagtggcaaaagtactctgaataaacaacaatcaggtcccttttggtataagagcagtatgtgtaatggtgccaaaataatgatctataagccatggaagaaaattggggaagtagggaataaacccaagtaccagagggatagtctngggctccaaggaagcagtaagcattgggtcaggttagaagccagcggagggcagggaaacaccaagcctttactcctccttcttggacttgaggggaccacgtactgatgcctgcagttt

SEQ ID NO: 429888 - DNA, 416 bp, Homo Sapiens
acatttcaagtaaaaactgaaatagaaaaaagacattgttaatatcaaacattatttgtgtgagcaattcaatgattagaagggactccagggatgtttctgatttggcaagacaaagttcaattgggctgagggtggtaagtccagtagtttttataagttgtaagtttttcctacctgtaaacgttgtttccccttgattaacatgtagtaacaatagcaaagaagtttagagtgtttgtcaggcaaggagacatttggacaacagaattcaaggcacatgctatcgctagccctccttcccaggaagcctgccatgccgagagagctctcaggtccaaagctgcacaactcagacggagcatctgagggtttaagccgaggcagggtgcaggatgctattctgttgctctggg

SEQ ID NO: 429889 - DNA, 419 bp, Homo Sapiens
  misc_feature (347)..(347): n is a, c, g, or t
ttaagatttccaagtattggttttaatgtgtagatttatatttcattctgcaagttcatcaaaataccatttaattgcctagtctatacttaaatgacacatgcccctagtaatgattaagagcattatcataaacacagctaaaggtatttatggtttaagtacttcatatctgtcttcaaatatgtatttcctaggtatcttttccattgtaattttcagtaaatatactgaagcttgatttcacattcatttctaaacttgaactgtttttaattttaaaaataggcacttatacagagaaacttataaaaacaatttcattacatactgagttgtctcagcanttctttaaagtcatttgagctttctagttttgctggaaactggcattcaatggaatccattcagaaaaacaa

SEQ ID NO: 429890 - DNA, 250 bp, Homo Sapiens
  misc_feature (24)..(25): n is a, c, g, or t
  misc_feature (96)..(96): n is a, c, g, or t
  misc_feature (115)..(115): n is a, c, g, or t
  misc_feature (117)..(117): n is a, c, g, or t
  misc_feature (126)..(127): n is a, c, g, or t
ggtgggtgtgggtggaacctccanncatctttcagtgctgactttcaagatttctaaatgcccttaaccacagcaattggcaagcggcggagacangcaagcaggagcggttctntncgtgtctgnnttctgtgtgtgttcttgtggctgacttggaaggttttggtatcacactgagaaggctccaagattcatcacatctactgcccgggggtccatcagatccaaagttggagccaaacatcttcac

SEQ ID NO: 429891 - DNA, 159 bp, Homo Sapiens
cagtacataccaaactacagtagaatgtgcaaacgattcctgttgcaaacacagaggcccatagattaaaaccagtcacttggttgagagccagagcaggggcgtagaccacgactccagtatagagaatctgtttagacacaggagcagacagaaagt

SEQ ID NO: 429892 - DNA, 322 bp, Homo Sapiens
  misc_feature (43)..(43): n is a, c, g, or t
  misc_feature (145)..(145): n is a, c, g, or t
atttgttcaatctctgcagatttattgaacaaacttaattttngaatacagaacaattaaagctaaccaagtgcaacagataagtctgccaattacacatagcttcataccaaccacttattcaaccagtcaaattctaaaaacngaacccaaatgactttcaacatactagtgaccactcagccaaataaatttggggcagacaacttcgatgaaaaagcctaaaatagacaaggacagattcctgtgctattgtttttacaccaaggctaagaaatatagtaaaaagcttgtccaaaaaacgtttgaaaatgaccattta

SEQ ID NO: 429893 - DNA, 393 bp, Homo Sapiens
  misc_feature (130)..(130): n is a, c, g, or t
  misc_feature (146)..(146): n is a, c, g, or t
  misc_feature (327)..(327): n is a, c, g, or t
aataataaaaaatgaaatagcttatgctgaatataacctggcccaagggagtcacatttacttcagccggtcacatggaactgtctcctaaaacaggttgtctacagcttctcaatcagcagggcggaanacctcctcctccgttngcaaatactagccagaccgaactctcctggcttcagggcatgagccataatgaacaacaatccgggctccagacatcccaattggatggcccagagaaacagctcctccgtgggatatttacttttttgggggggtcaatcttccagcatttttaatggttgggctagcacaaccacactngaatgctttcattttactttcccacatgggcaatgttctttcttttttttcagtcctggcataatt

SEQ ID NO: 429894 - DNA, 459 bp, Homo Sapiens
  misc_feature (326)..(326): n is a, c, g, or t
  misc_feature (361)..(361): n is a, c, g, or t
  misc_feature (370)..(370): n is a, c, g, or t
atttatttattctatgagtacactgtctgtgttcagacacaccagaagtggacatcagatcccattacagatggttgtaagccaccatatggttgctgggaattaaattcaggacctctggaagagcagtcagtgctcttaaccactgagccatctctccagcctgatacagaatcctataagcaacactatttgcagcttttaagttagaaatgttatttataacggttgctaaaaacattacataaacatttttgcttaaacttacagtcctgcctggggttagggtccactgccacatggactcggttacaggtccgacaganaatataccagcttttaatgggcagaaattagaggnaccattacnactcctcatggaaagctacttggaagtgggttcagaactttaaggcaggccagcagcacaaagaattaatggggaataatagcctcccc

SEQ ID NO: 429895 - DNA, 444 bp, Homo Sapiens
  misc_feature (434)..(434): n is a, c, g, or t
gttttaatttcaaaaaagggagagattttgatactgacagcttggactgacagcagcttggagcttgggggaagagttagagtaaaaagaaaggtgctcccaaaggacaccctcccaccaggacatcagtcccaccaggacatcagtcccaccaggacaccctcccaccaggacatcagtcccaccaggacatcagtcccaccaggacaccctcccaccaggacatcagtcccaatcagtctccccaggaggacagagctgtcacatcacaactgggtaaagacagcaggggagcgctgtgccatggaatgcttgtctgggactcagggaccaggttgcccttgtgcgaaggggcaagttcattctggttcccaatttcccaggtatgctgctagaaaatcaaagacagatttcatttcatggtgttaggaatntggaaaaatt

SEQ ID NO: 429896 - DNA, 443 bp, Homo Sapiens
  misc_feature (336)..(336): n is a, c, g, or t
cactattttattacaaaatttttatttacaaaatggaaaaataatcaaatgactgtgggcaggccatcgtagtctttccccccagtgattgaagaaacagtaagcaacatttccatgcacccacacatcaggtaatttccgaaatatgcaaactcttaaaattcctgtgagtaaaactttaatgtattcacaatacttgtatgaggatggacaattcatggttctgtacagtttagtattaatgcacagtttttaattttgggctttcatcagtacagtagtgaacaatttataagtaagaattacagaagtaactctcactgtgctgaattcacnagagaaacacgagtggtttttgtactaaacagaaaagtccaaggtcatattaaactgaagccttcattgtgatcaatagcttggatcagtttacatcggagggtttc

SEQ ID NO: 429897 - DNA, 336 bp, Homo Sapiens
  misc_feature (286)..(286): n is a, c, g, or t
  misc_feature (301)..(301): n is a, c, g, or t
gaggcaaacagtctttattgggttcacaccaggagtccgttggtcttgaggacctctgtgaacttgcagattttcttctccacattcttttctgcctgtttccgtaacctcaagatctgcttcttcttccgatagtgcatcttggccttttccttccgtttctcctccagagtggctgtcactgcctggtacttccacccgacctcatgcgccagacgccccaggtaagcaaactttctggtaaggcttcagcgaaacaaccttgagagcagcaagggaccaccantccgctttttcttgncatagggtggagggattccattcaaaaactttgaa

SEQ ID NO: 429898 - DNA, 427 bp, Homo Sapiens
  misc_feature (44)..(45): n is a, c, g, or t
  misc_feature (373)..(373): n is a, c, g, or t
  misc_feature (412)..(412): n is a, c, g, or t
gtgaaaaactagaatataaaagcatttcacattttttcaaacannataacatcttctaagttatttaacataaggcagagaaccgcagtcttttatctgaaacccttaagtctagatgtttcagaatgagaactgttcagattttagaaaggtaattcagtgcatacgccacactacatcaaccttcaagagagcctgtggagcacatcccaataatcaaacacataaatcaatgaatattcacactaaatgggataagcagatccagtgtcagatcagaatagataccttgttttcagaacttggattctgagactgtaattacagattgaaggaatgcagaccctttggaatttgtatgaccagacataanagattgtttaaacaagtaacccatttttacaaatgccanaacaatacaaccttc

SEQ ID NO: 429899 - DNA, 317 bp, Homo Sapiens
  misc_feature (256)..(256): n is a, c, g, or t
gttaaacttggtgtttataaatgcataaaagtggcattttgtgaagttgctgcagcacaacttggacttggaaagcagtgctgatcccttcagagtcctggggaggagaaaaggcagcgattgctgtgcgcccccggtgacttttcacctctcctagcctctgtttcctcctctatgaaggggttaccgaggtgattaaatggagcaggccacacgaaagagcctagctaacgactggaacattgcagctgtgcgnttggtgttcctgaacccacagagggcaatggagacagaacgtcacacagagttaactctgc

SEQ ID NO: 429900 - DNA, 280 bp, Homo Sapiens
  misc_feature (29)..(29): n is a, c, g, or t
  misc_feature (165)..(165): n is a, c, g, or t
  misc_feature (212)..(212): n is a, c, g, or t
  misc_feature (221)..(221): n is a, c, g, or t
atggctctgcatggaaccaagccttggtngctctaaaagccggctcattgccttctgcttctccggattcgttccttactccaggaagagcagtgcactgaaggagaaatgggaatgggcaaaaggaaccacatgctggccagaccccctgcgggcaccttttcntcagcctgggctccgacatgccacgtcaggtgccaagcgcacatacntctggacancctcctcattctctctgggctttgatgctctctgtgagtcatctgccctccctttccca

SEQ ID NO: 429901 - DNA, 421 bp, Homo Sapiens
gtggccaaggcacgtgggtgggcccatgtactatgctgcctcagttctagagaaattgcagaaatattacagacagaatcctgacatcccccagctggagcccagtgactacctgaggaggctggttgcccagggaagccctcctctgaaagaatggcaaagttggcaggaccccatagcagcaaactgtgattcagccttctgcattttgccatgtatggtggcatctaatttcagtgtgattcattcctaaaatccaaacagatttctctgaagtacaaatgattgatttgctgctgttgctgctgctgctggtggtggtggtgctaaatggtcagcaaaagcccctctctgtatcttcctacctcataattctaatggccagatttcaggaatgtgttttctatacctctgacggtac

SEQ ID NO: 429902 - DNA, 428 bp, Homo Sapiens
ttacaaaagagacctggttctatttgctttgtagtaaggccaatgtcccaatatgtgtacaaagggatatatacaaaacttaggagctctggaataggggtagggaccccaccacccttgagtcactcattcagggggtgtctcctctctttccccctttccttcctatgctacacaggaacaggcaggtgcgatcccactgttccagcacagaatccttgatccaacatggccagtctggctttgacacgcaagtccagttcgaatgtgattttgaaaggcggcccctagccccttacccatgcagactgtgaggtctgggggaggagggaaccttggcagcactgggcctgtaagggatccagagttctcaggcaatagaagtgatctgggtttgcttttgctctctgcagaacagagtcctgggg

SEQ ID NO: 429903 - DNA, 219 bp, Homo Sapiens
  misc_feature (134)..(148): n is a, c, g, or t
actaattttcaccagtgaagcaattgcaagcatagcccacgagggtctggattaggtcctctgcatatatgtcatgactgttagcttggtgttttagtgggacttctaacaggaagaagaggtgtatttctgannnnnnnnnnnnnnnacctgcttttggggctcttcctattgggttatcttgtccagcctctatatgagggcttttgctctgtctta

SEQ ID NO: 429904 - DNA, 437 bp, Homo Sapiens
  misc_feature (13)..(13): n is a, c, g, or t
  misc_feature (394)..(394): n is a, c, g, or t
ttttctgtcacanagggctcaaaggtttttgtaaagaaaatagaaagctacaaagcagctgttgagtggtatgtgtctatgagtgttttcagcagggttggagacaatctacttttcattcagggctactctaaatgagatcccctgtgttctggacaggagcttagacactgggggacaggtggacaggtcactttacagtgatagatctggtgatagctatttccaaatgtcaagcagtatgccgtttttatgctctgcaggttataaaagcctgttcattgtgaaccttgtaacactgctggttatttctaattaaattatcagatgctaacatgctcccattcatgatttcatgacaatattggcttcttcctgtattggggttttagtntaacatgaataaataccaccatttgaaagctcagtttgttatt

SEQ ID NO: 429905 - DNA, 464 bp, Homo Sapiens
  misc_feature (442)..(442): n is a, c, g, or t
cttgtactgcgcttctgtttacaaacgattcactgaacagacttaacttgatgatggaaatgatgaaaaacaggcctaatgtaggtgtaaaagtgtattcaaactctagacacggctaatcagattttaattcaatcatacacacataatcctttgtaatcatttttcttttaagtgaggatatctactgtctgcttcatagggtgctttgaataaaatgaaaacgtatttatactgtttttactaaggtaacaaaagcatgataatccttttttttgcaagtgtaaacgacagtctggactcttaacttcttagtgcctcagttttcctttggggtatacttcacaaggtatcagaagtactttcagtctacaggtctctatgtccacataactaaggaatgcctaactaatggaaacttaagttccttctagccattaanacagagagaagatcaatttaga

SEQ ID NO: 429906 - DNA, 474 bp, Homo Sapiens
  misc_feature (436)..(436): n is a, c, g, or t
  misc_feature (452)..(452): n is a, c, g, or t
tgagctggaggtatctgagcgtttgagtcaacctggagtggcaatagggttagcatggactcccttgggtggcaaaatcatgtttgtggaagcaagtagaatggacggtgaaggccaactaacactgaccggccagcttggggacgtcatgaaggagtctgcccatctcgccattagctggcttcgaagcaatgcaaagaaataccacctgactaatgcttttggaagttttgatcttcttgacaacacagacatccatcttgcacttcccagctggagcctgtcacaaaagatggaccatctgctggtgttaccatagtaacttgtctcgcctcacttttcagtgggcggcttgttgcgctcaagatgtagccattgactggggaaattacgctgagagggctttgttcttccagtgggtggaattaaagacaangtcctagcagcacacngagcaggactgaagcaggtcat

SEQ ID NO: 429907 - DNA, 390 bp, Homo Sapiens
  misc_feature (337)..(337): n is a, c, g, or t
aactgctgaaaaggaagccgtccctggatgatctgaaagagctgatgccagccgtcgggagaagcatgcagcaattgctggactatccagaagatgacatagaggaaacattttgtctaaactttaccgatcacagttgagaacttcggtgcaacagaagtaaaagagctggttctgaacggggcagacactgctgttaatagacagaatcggcaggagtttgttgatgcctatgtggattacatattcaataaatcagtggcatctttatttgatgctttccatgcgggctttcataaggtctgtggaggaaaagttcttctgctcttccagcctnatgaattacaagctatggttattgggaatacaaattatgattcggaaagaact

SEQ ID NO: 429908 - DNA, 423 bp, Homo Sapiens
taataaagcagcgacatgaaagcacacagaccagagctctggggtcgaaataaagcagcaacatgaaagcacagagaccagagctctggggtcgaaattcatacacctttgcacagggtagaggagtctcgacggacagccaaaatttttcacaggcttatatagtaaaactcaaagggggagaactgggcagagaaagtacaagtttacatcactagggagttctgccaaaggaatctaccgtaactaaggagccatgtcctcctcatttattttgaggttgttccaggaggcctttatctcaaaaatgttcttggaacagtctttagtttgggagggttcgaactttaggatgaggagttttgggggtgaaaagtttaggagtgttccgagaacaacctctagatgggaagggggtgggct

SEQ ID NO: 429909 - DNA, 438 bp, Homo Sapiens
  misc_feature (25)..(25): n is a, c, g, or t
  misc_feature (44)..(44): n is a, c, g, or t
tggtattggatggccgaggcatctntcttggccgcctgcgttcntcggccaagcaggtacttctgggccggaagtggtggtcgtacgctgtgaaggcatcaacatttctggaaacttctacagaaacaagttaaagtatctggcctttctccggaagcggatgaataccaacccctccccgaggcccctaccacttccgagcccccagccgcattttctggcgcactgtgcgaggcatgctgccccacaagaccaagagaggccaggctgccctggagcgcctcaaggtgttggatgggatcctccaccctatgacaagaaaaagcggatggtggtccctgctgctctcaaggttgtttcggctgaagcttaccagaaagtttgcttaccttggggcgtctggcgcatgaagtcgggttgaagtaccaggcagtgaca

SEQ ID NO: 429910 - DNA, 433 bp, Homo Sapiens
  misc_feature (403)..(403): n is a, c, g, or t
tttcctgggggagactgtgtcagaacagatgatagtgttactgttggtgattatctcaataaagttttcttatatgttatatcattaccagcaattaaaacctcaaaatattgtctcatttctctgttaatatttctctcctctaagaaaatgctacagcaagtttagatcctcttggcctccagcaaaacaagagaattaaaacctgcatgcaacataatggcaatgtgaaatggagttgaacatactgtttgcagtgacacgagagtctacaaaatacctatgttgtaggttgttcttttcattctaccactgatagttacacactgctgtgcgggacatgccagtgtgaagaggctgaggaagagttggaattaaccaaagagctcgtgccgaattcgcngggttcaaaacattttatcctactaaagta

SEQ ID NO: 429911 - DNA, 455 bp, Homo Sapiens
  misc_feature (440)..(440): n is a, c, g, or t
ggtattggcaatcactagatggtccatcctttcgtcacacttccaaattttgtctctgtaactccttccatgggtgttttgtttcctattctaagaaggggcaaagtgtccacactttggtcttcattccgcttgagtttaatgtgtttagcaaattgtatcttatatcttgggtatcctaagtatctgggctaatatccacttatcagtgagtacatattgtgagagttcctttgtgattgggttatctcactcaggatgatgccctccaggtccatccatttgcctaggaatttcataaattcattctttttaatagctgagtagtactccattgtgtaaatgtaccacattttctgtatccattcctctgttgaggggcatctgggtcctttccagattctggctattataaataaaggctgctatgaacatagtgngagtatgtgtccttc

SEQ ID NO: 429912 - DNA, 427 bp, Homo Sapiens
  misc_feature (47)..(91): n is a, c, g, or t
  misc_feature (201)..(201): n is a, c, g, or t
  misc_feature (365)..(365): n is a, c, g, or t
ttttttggctttaccatcattaattttattaacttcattgagatagnnnnnnnnnnnnnnnnnnnnnnnnnnnnnnnnnnnnnnnnnnnnncacacacacgtacatagttcactttgaaccattgaactcaatgtgttacagatacaccactaaagtaattttagaaaagtttatcaaactccaaagatactctgtattcnatcagcagtaattttaacttaaaacaattatagccttgggtactcatctacattgttctcagatctgtatattctggaattttatatccacatccatatgacatgtggccttctttggctgcctcctcttagtcagagcaatgctgcaacacagcaccatggtngatccatgttccgtcacacagctgaaatggtgtgacttggaatggtccatggccacttttgg

SEQ ID NO: 429913 - DNA, 431 bp, Homo Sapiens
  misc_feature (116)..(116): n is a, c, g, or t
  misc_feature (243)..(243): n is a, c, g, or t
  misc_feature (370)..(370): n is a, c, g, or t
ccagacatcggttgtcagcaggtacccgcagagagcagaagggagactggaagcgtccccacaggaccggaacccatgcaagtcctggcagctccggtggatgtcgcatgcggatnccgtgcgcggatcagccttgtccctccacctctgtacccagaatgtcctgcactgaggccccacagcctatcccaagcgggtaccaccaccaccagcaccatcattgccttggggccaccgcgcgcntcagcatctctgtggagggtgacctggaatgcttggtgtgccgagagcctacaactgtgctcggtcccccaagctgcttagctgtcagcacaccttctgtgccgtatgcctgaagcttcttgctatntgtgcaggaagacacctggtccatcccctgtccgcttgtggcgaaaggtcactgctgtccc

SEQ ID NO: 429914 - DNA, 470 bp, Homo Sapiens
taggttatttaatttttttgtcagaagtagctataaaaaagccatatgtttcagagagaaattaccctgtattttgccatctctcatttttcagggcaccaaagctgcatgccccccagcagttagaagggcaagattgcattgaaggggtttcagacctctgaagtagtcagttttctcccatgtcttctatggtttaattgtaacataggtagtatgccttcacactggatcccgggggcatgggttttggagatgttattttgtggtgaattgtcatctgcagtattaaagggaagacatattcctgcacatcaccataccttgtttttaaagccagagtcattgtatgatttttattaccagaagtgctaacccggaatgtgatctggttaccttggaaaatgcaggaacttttatgaatgtactgtaaaataaaatgtgggctaattcccagaaactgaaaaaaa

SEQ ID NO: 429915 - DNA, 497 bp, Homo Sapiens
  misc_feature (179)..(223): n is a, c, g, or t
ggcatgctcatggctcactgcagccttgacatcccaggctcaagcaatccttccatctcagcctccctagtagctgggactataggcatgcaccaccacacccagataatttgtgtatcttttgtagagacagggtttcaccgtgttgcccaggctagtctcaaaactcctgggattannnnnnnnnnnnnnnnnnnnnnnnnnnnnnnnnnnnnnnnnnnnnatcagccaccacacccagcatcagagatttattctgataagtggatacacatggtttttttacatgtacatagatgtatagatacacatatatgttttagagcaaatgtttaagcttaaggctcctcggtgcaaaatgttctgttgagcaccactgcagtcccaaggaaaaaaacagatggttggttcactttccacaaccaagcccaaaaccccatttaccaatcaaaattgtaggcactatgcttaagaaaaaatggttcaatggttctaag

SEQ ID NO: 429916 - DNA, 183 bp, Homo Sapiens
  misc_feature (159)..(159): n is a, c, g, or t
  misc_feature (167)..(167): n is a, c, g, or t
tgaaactggcaaaaacgtgttcatgattagtgttgcagccattagcagctttttctagaaaagcacacaggtgtagaaacctgacacacccatgaggcgaggcagtacctcagcatctccgtaagccccttagaggcatgaacccctttccagacacgnttcctcanaggaccgatgcaccaa

SEQ ID NO: 429917 - DNA, 136 bp, Homo Sapiens
  misc_feature (71)..(71): n is a, c, g, or t
  misc_feature (124)..(124): n is a, c, g, or t
ggcacttcacgccggtcccgcggagatatcgatataagaagaaatgggctaccacagaaccacaattcacnggccagtcggcttgctctgcagaattttgacatgacctacagtgtacagtttngggatctttggc

SEQ ID NO: 429918 - DNA, 224 bp, Homo Sapiens
actgtttcctggctctaaacgttgctttgttctgacaagtgttacaaaacaatcagcacgcaagtcaccttacgtaatgtcaccccaaaacaccgcgtgtgaggaaagcctgctatgtggaagaactcagaactctagaggatgtgcagatgagccaaagcaggcgccagagctgggccacagactagaaataaaatcaagactcttgaaataaaatgtcagga

SEQ ID NO: 429919 - DNA, 534 bp, Homo Sapiens
  misc_feature (503)..(503): n is a, c, g, or t
  misc_feature (522)..(522): n is a, c, g, or t
tatggaattattatcctttatatagtaataataaaattgcttcaaatctttatagttgtaaattattgtcttttgtcattcatagccttccaaatattgattagactctgacaaaaatggccagaaagaaaaccagacaaagcaaatacagtgaatgatgagtagcagacctgaccgatacattgcgttgcacattgtaagagagtcttcactacacgatttctccaccatgttatgtgtagaatactaagcatgataacagtctggtggggtgggttatgatgaacaagcaagaaacatgaaattgctaagcagttttagaaatgataagaatttagcttagttaaatgcttatttagtaagcaaaaattacttttagcatactgtttgtaaaagtggatttagaacccttaaatgggcataatgtgtgtataagacacaggagtctgccttgacttggaagggaaccagctatgggtgtggatcccaactgcaaagatgcnggcatgagtgtgaggaccntgggactgatct

SEQ ID NO: 429920 - DNA, 511 bp, Homo Sapiens
  misc_feature (147)..(189): n is a, c, g, or t
  misc_feature (260)..(260): n is a, c, g, or t
  misc_feature (293)..(293): n is a, c, g, or t
  misc_feature (325)..(325): n is a, c, g, or t
  misc_feature (416)..(416): n is a, c, g, or t
  misc_feature (441)..(441): n is a, c, g, or t
  misc_feature (455)..(455): n is a, c, g, or t
gcatcaccttacctgaagaactcccatggttccagaaccaggtgccttctagggagaggaaagccctaggattgtgagcttccaccctcctgcttcataaccaaggatgcacagtgcccactgtcactgggttagacttctggtggnnnnnnnnnnnnnnnnnnnnnnnnnnnnnnnnnnnnnnnnnnnggcttatgtgtagtgccaattagctaatcagggacaaagaagtgatcagatgactttctgacatccttgangccatttctctgtgtgatatggactttaagatnaagtgccttatgggttttgtttgggccatggnctgtcacaaccactgctacagacagctccgttttatattgccatatgatgggaccaataaggaacagggtgtatgtgaggaagattctggnaaactaagtttgtcagtctttgccnttttaacttatgantttaagccaggcataaaggaggaaatttatgagaaattgcctttgttgttctgtag

SEQ ID NO: 429921 - DNA, 459 bp, Homo Sapiens
tatcctggtctccaatgctgctgtcaaccctttctttggaaatctaatggatgtcacagaggaggtgtgggacaaggttttgagcattaatgtgacagctacagccatgatgattaaagcggtggtgccagagatggaaaagcgaggaggcggctcagtggtgattgtgggttctgtagcaggcttcactcggttcccttctctgggtccttacaatgttagcaaaacagctttgctggggtcttactaagaactttgcagcggagttggccccgaagaacattcgagtgaactgcttagcacctggactcatcaagactcgattcagcagtgtgttgtgggaggagaaagcaagagaggacttcataaaagaagccatgcaaatcagaaggctaggcaagccagaggattgtgctggcatagtttccttcttatgctctgaagacgccagttacatca

SEQ ID NO: 429922 - DNA, 465 bp, Homo Sapiens
  misc_feature (296)..(350): n is a, c, g, or t
  misc_feature (352)..(352): n is a, c, g, or t
  misc_feature (369)..(369): n is a, c, g, or t
  misc_feature (384)..(384): n is a, c, g, or t
taattctctcctatgcaatcattcctagttcattaatttgactcttacagctttactaattctattttctttggatttgtttttctaacattaagtagaacactcaactcatgcatgtatattacatcaaataaatggtttttagtttttaagagttttgttacttgttggtttttgagcctgagcattaccatgcccagctctgaagtaatttgtagtctccacttttctgctacttgatcttcaataagtagaagaaatatgtcaaaatcacctatcataataataaacatgtnnnnnnnnnnnnnnnnnnnnnnnnnnnnnnnnnnnnnnnnnnnnnnnnnnnnnnngntttcagatgaattttcnctatgtacctctggnaagtcctagaactgagagaaaatcatctcgcctctggactccagagtaatggaagtgttggtgaataagacatggggcccc

SEQ ID NO: 429923 - DNA, 181 bp, Homo Sapiens
  misc_feature (141)..(141): n is a, c, g, or t
ctaaagtgaggatcttgaaccaccctttcttttctgttctccttaccctattacctactggaccagatgttttgtcctgaaaacttgtctcctactctgccctcttttacattcccctcctccaaaagaaacctatacacncacacacatacttggttaattcttggggtatctctgcaat

SEQ ID NO: 429924 - DNA, 447 bp, Homo Sapiens
  misc_feature (348)..(348): n is a, c, g, or t
  misc_feature (366)..(366): n is a, c, g, or t
  misc_feature (382)..(382): n is a, c, g, or t
  misc_feature (423)..(423): n is a, c, g, or t
ccaaattattattattgatttaaaatttgattacaaccaattttgttggtatttaaaattagaggtgttttaaatctccataatggcaatataccaatatccagaaatgaagtttggtaaaaacgggaagctttctaggaattgcagattaaaagtcaagttgtcaatttagagcaacacagactccatgattacagtgattgtgccgaatttcaccttcagtagtacataaggaaattgttcacagttacatcttcacttttgagatttgacagctgttcttaaaaaaatttcggtacctgtgcaaataaacagtcttccatgtgccttagccccacctagactatnctccactgtatatatacnaaacaccaccacaggntgcagggcaaatacatactttcataacaaaactataatggnccccccaagtatgaaccatggtac

SEQ ID NO: 429925 - DNA, 457 bp, Homo Sapiens
  misc_feature (223)..(223): n is a, c, g, or t
gtttaattaggttaacaatttagaagaccagtttgtgaggatacatcccgtttgtcagggaaaactgagagcgcaggtagccctggagctgaggaacagctttaatctttggcaaaatctgcaaatccacagctttctggtcagcctttcgctgctctgtaatctcgtatttctccttctctgtgtcgaagatctcgccctcctgatgcctgggcttgcgcantgcttcttcttgaagtaagcgtcagtcaggtgtttggggattttaacatcgctgatatcaacttttgtagaggtggcaatgacaaacttctggtgtgttctgcgcagaggaactctgttgatgacaagaggcccagtcacaagcagcaagccactgtccagctgcttcaggaaaaccactctcttggcccctgtggcgcccagtgaggatgatcaggacagttccgggagtgat

SEQ ID NO: 429926 - DNA, 446 bp, Homo Sapiens
  misc_feature (181)..(189): n is a, c, g, or t
tgataatgcagattgttgggaaatctataaggaagtaactgactctaggcaaattgttttcttcctcctacccgcccaaccccctacccgtccgtcaccttttaggaacacagtatgccagtgtaatgtgggaaccattgagactgtatttgccctgagtaccaaactaatttaagtgaannnnnnnnnaaacatactggtaaatgatgtccacaaatttccttagatatattttaattaattgtcttaaaatacattgatatttattaatcattggatttggggacagatttttgactgtggcagatggtagggaacagaacagtaaacagttggatgagatcaatcagggcgaattacatttttctggttacactggtgatcatttgagaattgatttacctcagtgtttaacagtttttgttttggttttaaaatactaacta

SEQ ID NO: 429927 - DNA, 432 bp, Homo Sapiens
  misc_feature (296)..(296): n is a, c, g, or t
  misc_feature (346)..(346): n is a, c, g, or t
  misc_feature (359)..(359): n is a, c, g, or t
  misc_feature (392)..(392): n is a, c, g, or t
ttgctgtaggttcaaggccagtcagggctgtgtatcaaaacatctccaaagaacaaaatattgagggtaagtaattccatggagttttacggggttttaaatgctgattgtaggaagggttacatcactttgtagcatcagggtcacatcaagctataaccttgaagcgttctatttccagcctttgcatacagtcacttatgctgtgtattttatagtatttaagataatagggatggcattggaaaggaaattactttcatgggcaatatttaaagttttgaaatatataaggntaaaaacaaacaaacaggatatccattttaaaagccgaagaattgaaccngatttataatgcnactttttaaaacttgaatgtgttgtttgttgcnagtggccgaagaaggggctggccttactcctctgcatatt

SEQ ID NO: 429928 - DNA, 479 bp, Homo Sapiens
  misc_feature (418)..(418): n is a, c, g, or t
tgctctggtcacctttgaggaccccaaagtggttgatcggttgctacaacaaaaggaacacagagttaacttagaggactgccggctgcgggtgcaggtccagcccttggagctgcctgtggtgaccaacattcaggtgtccagccagccagataaccacagggtgctcgttagtggttttcctgctggacttaggctgagtgaagaggaactgttggacaagctggagatcttctttggcaaggcaagaatggaggtggggatgtagaagacccgggagatgctgcaagggaccgtcatgctagggtttgctgatgaagaagtggcccagcacttatgccagattggccagttcagagtcccactggaccggcagcaggtcctcctgagggtctctccctatgtgagtggtgagatncagaaagccgagatcaaattccagcaagcccctcattcagtgctggtgacaaatattcctg

SEQ ID NO: 429929 - DNA, 482 bp, Homo Sapiens
  misc_feature (88)..(88): n is a, c, g, or t
cgggtgaaaaagcgcctgatacaaaggagaagaaacctgcggccaagaaggctggcagtgatgctgctgcctcccggccccggcgccnaaagtagccaaaaaggttcaccctaagggtaaaaagcccaagaaggcgaacccgattgcagccgaaaccctgtcctggtgagaggaattggcaggtactcccgatctgctatgtactccaggaaggccttgtacaaaaggaaatactcggctgccaagaccaaggttgagaagaagaagaaaaaagagaaggtccttgctacttgtcaccaaaacagttggtggggacaagaacggtggcacccgggtggtgaagcttcgaaaaatgcctaggtattatcccacccgaagatgttcctcggaagctgctgagccacggcaagaagcccttcagccagcacgtgagaaggctacgctccagcatcactcccggaactgtcctgattatcctcact

SEQ ID NO: 429930 - DNA, 442 bp, Homo Sapiens
agcactaacaacatgatagactttcacaaatcataaagcacacactatttaaaatattttgctgttcacaatttgaatgtagcattattactgtttggtactaggctcaaagacgacattttgattcctcaagccttcggtgtactgctgatgtcaaaacgagtgtctagtcacgcagaggagagaaactcaaaagcggtctccttttcctcggtcagctcctttgctgtcagggtccatcttttcacgggagaagtcattaatggggaggccttcaacaaacttccaggtcttattcttgatcacgacagggaatgagtagagcaggtcatcagggacaccattaggagttgccattcagaggttaacacccatcagacacagaactctccctctgggggttccaaaccagatgtctctgatgtggtctgcgatggctttc

SEQ ID NO: 429931 - DNA, 415 bp, Homo Sapiens
cttttaacaaaactataattttaattctttaaccatacaaggttaaacttcctcataagcattacatttaataagcatgcctttaggaggctggagagatgacacagcagtacggaagaccatgtttagttcccagcatagacatagcagctcacaaccatctgaaagtcaagtcccaggggatctgagagctgcatgtggcctccgtgggcactgtatgcacatgacacacagatacagagtgaggcaaaacactcaagacacataaaacttaaaaactacatttgttaaagtacaggttttagccagcaatgtattcttaagattatcatctaattacaagagttaagaactataaatgtaaaacatttagatgaaggcaaaatacacttactgggtaaagaaaactaaagga

SEQ ID NO: 429932 - DNA, 445 bp, Homo Sapiens
aaatattttattaagaaactgtttcaaagataaatttgcactgctcctttttcttgccccacccctcctgatgggacaaaagggtgaagagctcaaagaaccccgactcccccctcccctcccacctcattgtgtaccatgaggggtccttgggaaatgtcttacctcttgtgttgaatggagacctgggttgagatgtgtctgctcttgtaggaagatcttttgtatcaggaacatgtacactaggccctgttcccgtccacaagctgagccatatgtacataagctagactgttttcttaggtgtgcacttttatagtctgtttttgaagattaacacatttgcaaggtgattgacaccatctttgcctaaatgcagtgagtgtacaggaagctcgttctcgagacagtacatacaatccggagggggtcacatagactaggg

SEQ ID NO: 429933 - DNA, 439 bp, Homo Sapiens
  misc_feature (12)..(12): n is a, c, g, or t
  misc_feature (228)..(228): n is a, c, g, or t
  misc_feature (233)..(233): n is a, c, g, or t
  misc_feature (273)..(273): n is a, c, g, or t
  misc_feature (325)..(325): n is a, c, g, or t
  misc_feature (350)..(350): n is a, c, g, or t
  misc_feature (366)..(366): n is a, c, g, or t
  misc_feature (378)..(378): n is a, c, g, or t
  misc_feature (425)..(425): n is a, c, g, or t
taatgtgtgacngccgctttcttggttcaaggacatgaacatttctacaaaataattaaatttccttgggatgttcaataatttttctgagatgcatgattaaataatttgccattaaaaaaataatgtaaataaaatattgaggttgtaggccctgtacattgcaaataggcttgtggcattttcttagcatgttatagtgactaaactaagttttacattagtagnaaagnagtccctgtaatgttttttaaaaatatatacttaatttcnaatcctttgggattgattccactgtcagttttactccagtttttccaatacnaatccataaggagagggttaaaganggaatatgacttttcnttattgcaaccntgtagattgtccatttgatgccttcatgaaacttctgtgtacttccngggccttacatact

SEQ ID NO: 429934 - DNA, 184 bp, Homo Sapiens
  misc_feature (171)..(171): n is a, c, g, or t
acactttaataagaagacagaattcacaccagaggcacactctggggaatgtaaataaccatcacaagttactctgctgggagaataaaatgaagctctctcagagcacacatacacaggagggaatgatttaaaataggctcatgacttacaatcacattatactgtatnaagcacttaaaac

SEQ ID NO: 429935 - DNA, 422 bp, Homo Sapiens
  misc_feature (11)..(11): n is a, c, g, or t
gcacctgccangcagcctagtcctctgtcctcgccggctgtgtcactaaaactattactttgctgtcaacagagatgtactgtccaaaacacggactcttacataaatgtttacatcctgtagccaacagccccttggagctcattaggtgaccggggctttggatttgtactgaggaagttgacttggcaccttctctccttatttttctcttctcctctgcagtcatgacactggctcaggactgagatctaaacagtcatcttcgtggcaacaggtattattggtaaaagagagtctaagaaattaagggcctagcctttctttgagaggccagtatagctggagttagtaaaaagtcaagtttttggagtcaggtgtaacttaacccacaatccaagttatgaactgtggagtgaatg

SEQ ID NO: 429936 - DNA, 406 bp, Homo Sapiens
aacattgtacaagtatactttttactacacagagatggaataacatgcatgtgtttttaccagaatctgtatcaccaagtacttttaccacagtcagtaccaatggctttccagagattatatctgtcctatgtaaattttatcatgaataaaaaagcttacaactcttttcaaataatgcagatttatatttatgttactcttcctgttcgaggtgctttggaaaactgttacataatataaaaattaccttagcttacagttttgaatgggtagtactctctagcattgatcaagtctcccttatattgtcattgtagacacactatacttacttgggatcaaagtgttatggatgtcaatagccctcatactgtgtaggaaagcaaataacaattttccggaa

SEQ ID NO: 429937 - DNA, 443 bp, Homo Sapiens
  misc_feature (421)..(421): n is a, c, g, or t
gggaaaactttttagctttcaaagaaactttttaataacatacaatgttcttgccctgattggatccaataccaatactaaaataatggggtagaatgggggctgggagacaactttaggtacagactagacaatggctgttagtgggacaggactactgtcttggctgtggcactggctggtctggtaaaaggccctacctcttagggcaacactagggataaatagtctcatgatactgcaacttacttttaaaatacacgtacatgaatatcgagagaaaacacactggcaaatgctaacctccttcagtctagatgaagggtggctggcagtcacagcccagcgctgagacggttctgagcttgctcttgccactcacacacctgggggggctcctagggttgggggcaggccaggncttctcctcctgggaaatgagc

SEQ ID NO: 429938 - DNA, 475 bp, Homo Sapiens
caaaataatgatttattacgccttcagctatttacaaagatgatctggttggaaatgtcacatggcttgggtaaaatattcttctatgatggaaggtctcttttcatttcacctgctggcgtgagttaatattcaaaacgcatgttggttttctagagtcatggctgccagtatttgctctagccttcttacgatatttcctcctggtgcagtagacactgacgagagtgatgattagcatcacagcaaacacggtgaccgtggaagaaacagcgatgataacagtgtctcgggtggaccctctcttctcacaccttttgcccatgtaccaccagtcttctcctgcaggacacttgcactcagctctgccatcttggacaacacagatgccaccgctctgacatacaacctcagagcaggcattatggacagccaaggtggggactgggtcgggggacagctgatgtagaattga

SEQ ID NO: 429939 - DNA, 239 bp, Homo Sapiens
  misc_feature (69)..(158): n is a, c, g, or t
tggtttttgcattttctatgaatactatctgtgtctcttgtgatgtggtgtcacgatctagaatgggannnnnnnnnnnnnnnnnnnnnnnnnnnnnnnnnnnnnnnnnnnnnnnnnnnnnnnnnnnnnnnnnnnnnnnnnnnnnnnnnnnnnnnnnnccaaccaaagacaatcatgtctatcctctctccatgaaagccctttggaaaatgcagggtgatccaaatagaaagtgggtc

SEQ ID NO: 429940 - DNA, 474 bp, Homo Sapiens
  misc_feature (92)..(92): n is a, c, g, or t
  misc_feature (394)..(394): n is a, c, g, or t
  misc_feature (433)..(433): n is a, c, g, or t
ggcagacagcttttcgcttaacgatgccttagctggctctggaaacccaaaccctcaaggatatccgggtgcatgggggaaccagcctgggnagggggctacccaggggctgcttatcctggggcctacccaggacaagctcctccaggggcctacccaggacaggctcctccaggggcctacccaggacaggctcctcctagtgcctaccccggcccaactgcccctggagcttatcctggcccaactgcccctggagcttatcctggctcaactgcccctggagccttcccagggcaactggggcacctggggcctaccccagtgctcctggaggctatcctgctgctggccttatggtgtccccgctggaccactgacggtgccctatganctgcccttgcctggaggagtcatgccccgcatgctgatnacaatcatggggacagtgaaaccaacgcaaacaggattgtt

SEQ ID NO: 429941 - DNA, 504 bp, Homo Sapiens
  misc_feature (23)..(23): n is a, c, g, or t
  misc_feature (71)..(71): n is a, c, g, or t
  misc_feature (127)..(127): n is a, c, g, or t
  misc_feature (185)..(185): n is a, c, g, or t
  misc_feature (189)..(189): n is a, c, g, or t
  misc_feature (236)..(236): n is a, c, g, or t
  misc_feature (243)..(243): n is a, c, g, or t
tggatcccggctgcaggaatcgnacgactggaatattgcaggcactttggaggagcgtgggggaataatgncctcacagaggtgtactgtctagtgaaccgggcccgaggaatggagttgcctctcnccagaaagatttggtaaatgcgtgcaagatgctggaacgctaaaattgccctatcagnttcngggtttttgacagtggtgtcatggtaattgagcttcaaactcacaanggaaganggaaatggtggcctcggccttggagaccggtttcagaaagggggtccttaacatcccgaagagtttgccaagcttgtgggaatgtctgtccttctggctaaagaaaggctgctccttgcagagaagatgggccacctttgccgagacgactccgtggaaggcttgcggttttatccaaatttatttatgacacagaactaagaattttgtacctgaaatgctttatgtcaataagcttgcattttgccaaggtctcacgac

SEQ ID NO: 429942 - DNA, 107 bp, Homo Sapiens
tttgatgccccttttaagtgccattgtaccgggtagcatagatgaatgtttaccaaaggactatgtattccaactcatgggtgtatatatattgcttggaagttttg

SEQ ID NO: 429943 - DNA, 436 bp, Homo Sapiens
  misc_feature (58)..(58): n is a, c, g, or t
  misc_feature (72)..(72): n is a, c, g, or t
  misc_feature (101)..(101): n is a, c, g, or t
  misc_feature (108)..(108): n is a, c, g, or t
  misc_feature (122)..(122): n is a, c, g, or t
  misc_feature (136)..(136): n is a, c, g, or t
  misc_feature (261)..(261): n is a, c, g, or t
  misc_feature (263)..(264): n is a, c, g, or t
  misc_feature (266)..(266): n is a, c, g, or t
  misc_feature (374)..(374): n is a, c, g, or t
  misc_feature (388)..(388): n is a, c, g, or t
  misc_feature (408)..(408): n is a, c, g, or t
  misc_feature (421)..(421): n is a, c, g, or t
ccaaagtaagccattcacaaaattgaatgattttttagcagtacagctaaaaccccantgcatggcagtagngtggagtacagtggcccagaataaaggcngctgtcntaaggaggttcctntttggccagcaacntctgcagaattttttaaacaaattttatgacagcagttaagcctcatagcagattccttcctagaaaagcaaacaacatttatgaactaaccttttatgaggccaattcccatcattaaactagngnnancccctcccattagcaacccacccaccctcccaccatttttggggaaatgttatctaatattactttgagccattacttttaagaaaatgggtccaaggaagggtaaanaaaatttaagggcnaaaacgtatcatcacaaatngaaatggtatccncttccctttaagatt

SEQ ID NO: 429944 - DNA, 511 bp, Homo Sapiens
  misc_feature (376)..(376): n is a, c, g, or t
  misc_feature (492)..(492): n is a, c, g, or t
gaagaaagtgccaatcactggaatacaattgtctctactttggtgtgtactgatctgtaaggaatgccgtttgtcaatcaccttggaagaaagagatctatttagaaagtgcaccccagccttaccctgccccccaccccaaagcaaatctgtgcagcagctgtttatcagaaaataaatgagccaaaatacttcagaaaagtaactagagaaaatataaatatttgaataagctaaaaaatcaacatgtttggtatttttccttacttggaacgcatggctgtgtgaataggcagaccgacgaataaagcagtccccttctggaacacatctaaagtgaatgtgctcgcctacagtcaacggccttttaatttcncctgaaatttgccagaactgcctttctcacagctacttcactccactggggacacagcaggctgggcccccagaggcagctgctggagctctgacaagctccccgcagaatctccntccaccacgtggggctccg

SEQ ID NO: 429945 - DNA, 289 bp, Homo Sapiens
tctttttaggactacaaattacaaagggaaagcagatcactacacagaatctaatgaatacatttgcctgtgcataaaactttatcaaagtcattcattttacaaattcaccccacccaccaatgtttttgctacagtgctcttaaggttactatacctttatttcaaattatattacaggttattctctcaagataaactttaaataccaaattcttggcttctaagaatggcaccttcaaaatgggcaatgtccactaaagtctctggtggcattattctcttacta

SEQ ID NO: 429946 - DNA, 174 bp, Homo Sapiens
tcctctcacctcacctcggagatcaatctgaagcagcctcggatctaactaaagctctccacagacttccgctgagggggatgctaactctaaggcctccacctctctcagagaggcatgctgacttctggcatcagccgcctcttcagagcaccttctgccacgggacaggag

SEQ ID NO: 429947 - DNA, 426 bp, Homo Sapiens
  misc_feature (229)..(229): n is a, c, g, or t
atttggaacctggttgaatatatagaagtgtctgggaaggcaaaggcttctaggaatcttccaagtggccagtcctccttcctctctccactcagctcctgacacggcatccctgtcaggtatgtggggatttgcctgtttggacctgaaggtaaatcgtgttttctttggcctttgatttcctccttcccaggttctccgcttcttcaatagtctcaggcagagcacngcccttggtctccggaagtagaagggtcacagccccagcactcaggcccaaaaccccaaacaaaatgaggggcagggcttgccaaacctgtctgcaatgtaacccacaaccagggagcccaggaagaagcccaagttcacacaggactgaaaaaggtccactttccaggcgtctccacacaccaggttaaactcagt

SEQ ID NO: 429948 - DNA, 456 bp, Homo Sapiens
ctgtccctaatactttatttggtttcctatagacctgggcccagctaggtgtgctcagggcaggatcactattcaccagattccaggtgggtaatgagaaaacctcagcctagactccagccccttcagagagtggaggaaaatctagcattttctgggccagcacaggacatccaggttggggcacaggtgaaatccaagcttcaggctcacccatgtttacccatctcagttgtgtttggagaagtattccttgctgtcatccacattgggcttgatggtgtcactgccgggcttccagcaagcagggcagacttccccatgctcgtctgtatactgaaaggcctggactaggcggagagctccgtctacagagcgtcccacaggtaggtcattgactgtgatctggcgaaggacacccttggcatcgatgataaagagacccctgtaagcaat

SEQ ID NO: 429949 - DNA, 321 bp, Homo Sapiens
gaacccatcttcaagcttttcagcggagaagacgtactgtatgagggggactccattgtgtaccctgtgttcattaatgaggctgcctattatgagaagcacgtggcattcctgaagtctgagaagatcagggtcacagtgcctgccctgctgaggttgaccccccgctccacccagactccctaacccaaatcatacctggcctgatctcagttttcctatctgaacaatgggtcccaagcccagggtcccctatctcactctggacaccatatccctttccagacaactgatctcattatataaaatagactgtgcccc

SEQ ID NO: 429950 - DNA, 274 bp, Homo Sapiens
  misc_feature (254)..(254): n is a, c, g, or t
caatatgtgttaggagattgtcgcctgggggtaattaatccttctctgtgttagacaagttgggcagtgctcttctgttgaaatgtctgccacctctatcgccatatctgccacctctgtcgccatgtctgccacctctgatcccatgagaaaagggtagaaactctcacagatgttcatgacactggccacaacggcagaccctgcagagcccacgatgacagtagatggcacggagagtccagcagctccancagactgcagaatggccacc

SEQ ID NO: 429951 - DNA, 308 bp, Homo Sapiens
  misc_feature (18)..(18): n is a, c, g, or t
  misc_feature (126)..(126): n is a, c, g, or t
  misc_feature (201)..(201): n is a, c, g, or t
  misc_feature (222)..(230): n is a, c, g, or t
tggttctgcctatatgcntatatgcaatccacttgtacagtgttagttcagtactagagaagttctgcctatatgcctatatgcaatccacttgtacagtgctagttcagtactagagaaaaaatnatcctcatttaggtctctacttaaagtacatctcattaatgggatcttccatgaccattctatcaaacctcagcncctcccaccccttttccctannnnnnnnnaccattcatactactatttggaaaagttggattacatacttattaactggtctcaccatgagagcagggggctttttt

SEQ ID NO: 429952 - DNA, 496 bp, Homo Sapiens
  misc_feature (472)..(472): n is a, c, g, or t
tttaataaaaatacatctttaatcataataattattgacccacatcaggctgaatgccggctgagataaggtggcgtacacaccattctgtagaagctttacagttaactacagtcagcgctctccatccgccaggccgtggcttgcaggtgggaaggcagaggtgcagcatgaagagcacacggcacttgtgtcacaggtgaggaatgcaagctgaagagcggccagtcctgtgtcaacactgtaaaagttgtcccattgcaatgacactgcaatcccgaggaacgttctcccagctggccgagtggtctctggacagaatctcacagctggcgagcaggcgagcagaagtctttctaaagcattagcggcctttccgcttcttcattttgcccccagccaccttgttcctcacaccaatggcgccctccttatcatcatcatctcctgcatcctctcgcttccggtttcntccttttctccggtgctcccttaa

SEQ ID NO: 429953 - DNA, 432 bp, Homo Sapiens
  misc_feature (214)..(214): n is a, c, g, or t
  misc_feature (263)..(263): n is a, c, g, or t
agacaccaacctcagagacaaaaattgtctacaacccgtggatggtaccatgtcccttgatatgaaagagcaccctgatgctgaggtacaaaagaaccaagtactaaccctggaagactggaaagagaagtgggtgacccgtcacatctcattccatcaggagcaagggcatcagctgttgaagaagcatttggatacatttcttaaaggccangagtggactgcgagtgtttttccccctctgtggaaaagcccgttgagantgaaaatggttcgcagatcggggccacactgtagttggtgtggaaatcagtgaaattgggattcgggaattttttgcagaacagaatctttcctacacagaagaaccgctcgccgaaattgctggagccaaagtatttaagagttcttcagggagcatttccttatact

SEQ ID NO: 429954 - DNA, 160 bp, Homo Sapiens
  misc_feature (130)..(130): n is a, c, g, or t
gatgcctctatctggtaagagcttcacagaattgcaggggttgtggttgctgggaagggttagtctgttagatcaggtgctgcagaatcgagtgtaacccttcctccctttagtcttactgtgtagcccngtgctggcctgcaacttgctatgtagacct

SEQ ID NO: 429955 - DNA, 577 bp, Homo Sapiens
  misc_feature (101)..(110): n is a, c, g, or t
  misc_feature (437)..(450): n is a, c, g, or t
  misc_feature (463)..(463): n is a, c, g, or t
  misc_feature (470)..(470): n is a, c, g, or t
aagactaatgaaaactaaatgtgattgtgtaacttataattttaatgctactagatttactttataaaacagaaaaccgtctcccaagaacagccaatgannnnnnnnnngttgttacttatcaaacacagaaaaaaagttttaccattgttcctctttgttaacaagttccacaacagtattttttgtagtccatggcctgctgacaccagaaatagatacccaaaccctagcgacggtgacttccacactcaggcttcctgctgctggggcttctctggtaaggaaaaggacctagccaatgatgtattgcctgccccagctctctaggcagccaggcttccttaggctgaaataagtttttcctaatgacacagagtgtataaaacaccttctaggaaactgtggtggcgatgctacggtgcttgcttgctcannnnnnnnnnnnnnggtataccctganggtgcanggccctcccatccctgagaactctagggacatgtgtggcacatgagctcaattgggcctttgatctcaattccaagatgggatctgccagggacaaagaggttcaag

SEQ ID NO: 429956 - DNA, 297 bp, Homo Sapiens
  misc_feature (94)..(94): n is a, c, g, or t
ctgctcgctaccagacaattgaagagaacattaagatctttgaggaagacgcagtggaattcatcagtgtgcctgtaccagagtttgcggacancgatcctgccaacattgtgcacgacttcaacaagaaactcactgcttatttggaccttaacctggacaagtgctacgtgattcctctgaacacttccatcgttatgccgcccaaaaacctgctggagctccttattaacattaaggccgggacctacctgcctcagtcctaccttatccatgagcacatggtgatcaccgacc

SEQ ID NO: 429957 - DNA, 434 bp, Homo Sapiens
  misc_feature (28)..(28): n is a, c, g, or t
  misc_feature (63)..(64): n is a, c, g, or t
  misc_feature (289)..(289): n is a, c, g, or t
  misc_feature (371)..(371): n is a, c, g, or t
gaagaatggagagctaaagagccttcgnagaaggtcaagccgatctgacagccaggtgcgcanntgcgggagaagctggacgagctgaggagagcgagtctcccctacctcccctacctaagtggcctgctgccccccagccacgagcctcccaagctgaatccagtggtggagccgttgtcctggatgctgggtacctggctgtcagacccgccagaagttggtacctttacgacactgcagcccttccaagtacctggaaggaaggtgcacatctcccacgtgggtnagcctatgctcaacttctcgttcaactccttccatccagaaacacacaagccaatgcacagagagtgtggcttcatccgcanaaagcctgacaccaacaaaatggcctttgtcagtgcccagaacacaggggattgtggaagtaa

SEQ ID NO: 429958 - DNA, 149 bp, Homo Sapiens
  misc_feature (121)..(121): n is a, c, g, or t
caaagttgctagagtcaggagacctgagcatgaactccatcaaagtcgatggcattagtatgtctttccagaatcttctggcaaagatctgcttctaccaccatttttccgttgtggagcngagtagactcctgtgcctccatgtacag

SEQ ID NO: 429959 - DNA, 330 bp, Homo Sapiens
  misc_feature (54)..(54): n is a, c, g, or t
  misc_feature (61)..(61): n is a, c, g, or t
  misc_feature (114)..(114): n is a, c, g, or t
gaaccctacgctgcggtaagatgtagcaggggttgctcccagcagcggccgccncaaggcntgcaactggcaataatcactattgatttaaagctttatttagtctcatctgtnccttcatagttaataaggtcttgccacattttattagtgagattgagagatgaattatttgtctgttgtcctccccgccttccctcccccaatattaaactgtgaagtttgtgattttgtttaaacgctgggtgaatcatagtgttagtttgcatgtccagctaatttgtttctatacattttgtttgattctctttctcctcagggcttttacaa

SEQ ID NO: 429960 - DNA, 352 bp, Homo Sapiens
  misc_feature (15)..(15): n is a, c, g, or t
  misc_feature (73)..(73): n is a, c, g, or t
  misc_feature (75)..(75): n is a, c, g, or t
ctaagcgcactgctntccagtactggtcggcctattgcgtttgtcagaaaaattccttggaccgcggcagagntngagctgagagaacattttgcacagtttggccatgtaagaaggtgcactgtaccttttgacaaagagactggctttcacagaggcatgggttgggttcagttttcctctcaggaagaacttcagaatgcactacaacaagaacatcatattattgatggagtaaaaatccacgttcaagctcaaagagcaaaggctttgcacggagctcaaacatctgatgaagaaagatttctgagatgatcagtgtaccgtccactaaataaacagaattgagaca

SEQ ID NO: 429961 - DNA, 474 bp, Homo Sapiens
  misc_feature (454)..(454): n is a, c, g, or t
  misc_feature (462)..(462): n is a, c, g, or t
gtgcctccccctttgaacactgccatgtagtgaccactacaacccacaagaccctgagaggctgccgtgctggtatgatattctacagaaagggtgtgcgcagtgtggatcccaagactggcaaagagacttactatgaactggagtccctcatcaactctgccgtgttcccaggccttcaggggggtcctcacaaccatgccattgctggtgttgctgtggccctgaagcaagccatgactacagaattcaaaatctaccagctccaggtgttggccaactgcagggctctgtctgatgcactcacagagctaggctacaaaatagtcacaggtggctctgataatcacttgatcccaatggatctgcgttctaagggtactgatggtggaagggctgagaaggtactagaagctgttctatcgcctgcaacaagaataccatgctttctttngtgggtgnttccgttacctg

SEQ ID NO: 429962 - DNA, 499 bp, Homo Sapiens
  misc_feature (37)..(38): n is a, c, g, or t
  misc_feature (463)..(463): n is a, c, g, or t
  misc_feature (474)..(474): n is a, c, g, or t
ttttctaacattgccttacaccgtgtttctctttttnngggaggggtggggtgtctaatgctgtggtcttgctcatctgcatggtagtgccatgagggtagttgggttcctcctggatctctcccaggtctgttggagagaacagacagacttagaacccctggagggaagctggcagcttacctcacccttgggtacagagtcttggaggtcctcctttctggcatcagctgggtaggcaggactttgttctctgagtcactttgggtcagtcccttgcctcgctggctctgcaggctgaattcaccttctcaacacctagcccatgttttcctgcagccttatggctgctattcctcccaagtgagttccagcactggctcaggcatgctagttctttaccacagagctgctcaagtgcacaagcaactgcagtggaagccccatgacattccagtctgtngagtgggcaanacctgggaagcaagttcaatgccgt

SEQ ID NO: 429963 - DNA, 363 bp, Homo Sapiens
tttttaacatcagctagtcactaatgccagaaattccacttcaagtgtatttattttcttgtgttaagcattattctacctggtttatgtctacaatgtagtattagtgtacttaggattcttgacacctcagtgtgcaataaataaaattttgaagttgttgtttttcatttgaaggtgagaccacagcccctgagtgctaaggggacctgggaatcctaggggaatggaggtggtggacgataagaggatggttgagggcaggagtttaaaggacacagaagctaggagagcagaaaatgtactccaccaccttctgtctaacttgtctcttaaaagtgcttttacattttaactttttta

SEQ ID NO: 429964 - DNA, 419 bp, Homo Sapiens
  misc_feature (217)..(230): n is a, c, g, or t
  misc_feature (328)..(328): n is a, c, g, or t
  misc_feature (347)..(347): n is a, c, g, or t
  misc_feature (403)..(403): n is a, c, g, or t
tgtctaagtcaaataatgttacaatctgagttattttactttccattttctttacaccacccctagcatggtttttccccagccccttaacctgaaaaagaaaattgggacccacacatgctcggaatgaaagtatttgagccttttaaagatactactataccttgccatgagagaatgcattggactgttatccaaaaactgtggtttgaggtgnnnnnnnnnnnnnngctgtattggacaggtcaatgatgttatctgcctcactctcaatcacaaggaaagaaaaaaatgcctcccctacaatctccatggaaaaaacatgttntattccacatgacctgccnttgtcctccacatcatagctaatgtctgcaaaagcagccaagccttggtagacctntggagtggcagacata

SEQ ID NO: 429965 - DNA, 512 bp, Homo Sapiens
  misc_feature (377)..(377): n is a, c, g, or t
  misc_feature (401)..(401): n is a, c, g, or t
  misc_feature (439)..(439): n is a, c, g, or t
  misc_feature (457)..(457): n is a, c, g, or t
  misc_feature (463)..(463): n is a, c, g, or t
  misc_feature (470)..(470): n is a, c, g, or t
  misc_feature (475)..(475): n is a, c, g, or t
  misc_feature (489)..(489): n is a, c, g, or t
  misc_feature (494)..(494): n is a, c, g, or t
cttgatgcatttcttgtacagtgtaagggtctgtttttaacatcaccagcacagttttaagaatgtgacggttgctgagcggttcaggtcagcttaggaagaaaaagcctttgaaaatggaagttctgtaaacagaatttcaggtgttgcattcctgtcttaaacacatttctttaaatccacacaacggcagacttttctaccaggtaataagcattcgagataactgatagccagcataacttactgacttaccagttaagtatagtcatcacttactgtgaaattccagatgcctgccagctcagcttgtatcttcatccttcgagaagcatctcaacaggctgggtttccctgtgttggtttagaaagctttnctgcctgggcattaaagaaagaangtggccttgtgtctgctctggacagatcctggaggatntgagataccctgtgagtnacactngtcaatnttctncaacgatactctanagccntcaggtctgtcaccgtag

SEQ ID NO: 429966 - DNA, 408 bp, Homo Sapiens
ttcacccatgttcctcaggcattgcttttgcatctgtcatgctagggtcagtctgtgttgcagtaacaagcatcaccaagcctaagtggctcaaaacagcttcctgagtactcagcactgaccgtggctgtgtcctggctgagagaccagcttgcctggggaaaaactaatggctgacagaaatattcaggaactggggcagtttctgcctggaaataggtgatgccacgcctacctgcatttcattggctagggtaaagtcacatgacctcacctagggcattggtcccagtgtgtgatctttatcaacccgcttgccaggatcagtcagagtgggccccagcttgcttccccatggcggaagagcaagctctgtctgtctccctggttcacaggaccgggtcagtt

SEQ ID NO: 429967 - DNA, 478 bp, Homo Sapiens
agacagcctgccaggagtatactgtcacagagttccagcctctgtactatgtggccgagagtttcaatgatgccaaggagaaagtgaggacttttgctgccacaatcccccggcccttctccgttcgctatgacccctacactcaaagggttgaggtcctggacaatactcagcagttgaagattttagctgactccattaatagtgaggttggaatcctttgccatgccctgcagaaaataaagtcatgaacagaaagtgacgtcatagacagaacttaggaggtcaaccaaaaaaatctgctgatagaagtatagtaactgcttcttttccctgaagaagaaaagttttatttgcaatgtcagcttttaatatattttcctaacatagtggaggatcaccaaataaatcaatttctctgaaatgaaagtatattaaaacccatcagtggtagatcttcagagtcacatttgattta

SEQ ID NO: 429968 - DNA, 430 bp, Homo Sapiens
  misc_feature (35)..(35): n is a, c, g, or t
  misc_feature (167)..(167): n is a, c, g, or t
  misc_feature (389)..(389): n is a, c, g, or t
ggcacgaggttgctgattcccttagggagcggcanacgggaagagtggttcttttactgtgcccccgcccccaccctcagcctaggggtatgtttctcccagcctcttgtccaacttcacaccccatttatatgctgttgagaacccagtctccagggagccagagnccccactcccagtctctctcagctaagctctctaagctggcctgggttctgagctacatggaaggcagagttctcaagcccttgttttatagtttcccccgaaaccccttgtaagggtctgagacaatacaaagtcagactcttgagacaagcacatctcagcctgaatctctcaacaacctcatttggcaagcaagaactgactgactgtgctgtgagtcntggagacactccatgcatggccctgctcttttctgctgttt

SEQ ID NO: 429969 - DNA, 581 bp, Homo Sapiens
  misc_feature (182)..(182): n is a, c, g, or t
  misc_feature (238)..(238): n is a, c, g, or t
  misc_feature (327)..(327): n is a, c, g, or t
  misc_feature (496)..(496): n is a, c, g, or t
  misc_feature (526)..(526): n is a, c, g, or t
  misc_feature (532)..(532): n is a, c, g, or t
  misc_feature (539)..(539): n is a, c, g, or t
  misc_feature (551)..(551): n is a, c, g, or t
gtaatgccaagtgactgttcctgagagccagctctgggctgtcttcaccatgtaggtgggcttctgtctaaggagaacagcattaggagaggtgcatcggcccatgagcgtgaagtccacccagcctagtggacactgaagtgctcacaaggcctccacctgcctttgtaaaagccgaatgntgatctcaaaccatgggaagcccgaccgccccacccctcctcaccccagcgtttantgtttcaggggtcagctattatctcaagatttctatccaagtggaaacaaactgaatcatgcacacgacttatctgtgtggtgtcagtnacactcaggctcttgctacggaatgcaaagaacaactcacataccagtgtcaaacagaatgcacagaagagacctaaaacagcagcaggtcactcggttcacaaaaggtgactcccagtcaagtctgacacactgtcttggttgtagagcacagttgccatcctctttncctgggtaacatcaccgaagattcatattnaaagcnaatgttncctccgttctgnatttaaaagcaaggctcaatgttctcaagg

SEQ ID NO: 429970 - DNA, 598 bp, Homo Sapiens
  misc_feature (455)..(455): n is a, c, g, or t
  misc_feature (467)..(467): n is a, c, g, or t
  misc_feature (488)..(488): n is a, c, g, or t
  misc_feature (544)..(544): n is a, c, g, or t
  misc_feature (550)..(550): n is a, c, g, or t
cgtaaaccatgatgcccactacagttttcaggttcagtgtggattaattgtggtggcctataaggatgggtcccctgcgcaccctcacttcatggatgaagagctctgttccaagtattgggccaagtggttctccgactagaagaatatacagaaaagcaaaagaacctgagcgctccagagccagcgtagaggcccgggattgcttggcgatgctgcgcggcgatctctgtttgggagatgcactgctgtccactgagtttctaaagaggaatgcggggaactgagggctacattaacacaagctgaaggtgtggtgggttgggatgtacccaccgagaagccagagagtctggaggtcagcgcctgactcaccagctgcacgacctctggctgtttctcaacctgagaggaggacactgggattggcagctgcccagggacttcttgggctnccttgcaaaacntctgtgtcccttggcaggatnccaagtctttgaattgagatcagaaggccaaatgaagcatcatgtgcacacatgtncctaanagttcccaggatggaaggggcctgaaccctcagggtttcagagagaga

SEQ ID NO: 429971 - DNA, 401 bp, Homo Sapiens
gctgtcggcggcgctgaaaacggcgcgtattctgacagtctgcgtggcggtaatgttgctgttgagcgcatggggattgttcgatttctggaactggctgcaaaacggcgcggggcagaaaaccgtagatatcctgatccgtatcgcactcattcttttcttctcggcggttggctggacggtgctcgccagtttgatcgaaaaccggctggcttcggatattcatggccgcccgctacccagcgcccgcacgcgtaccctgcttacgctgtttcgtaacgcgctggcggtgattatcagtaccatcaccatcatgattgtgttgtcggaaatcggcgtcaatatcgcgccattgctggcaggtgccggggcattaggtctggctatctcgtttggttcgc

SEQ ID NO: 429972 - DNA, 447 bp, Homo Sapiens
gtttgcagtcttctgcggcaggcattctcggaggaaaccagccaaggactaactacgaccatgagattggcagtgatttgcttttgcctgtttggcattgcctcctccctcccggtgaaagtgactgattctggcagctcagaggagaagctttacagcctgcacccagatcctatagccacatggctggtgcctgacccatctcagaagcagaatctccttgcgccacagaatgctgtgtcctctgaagaaaaggatgactttaagcaagaaactcttccaagcaattccaatgaaagccatgaccacatggacgacgatgatgacgatgatgatgacgatggagaccatgcagagagcgaggattctgtggactcggatgaatctgacgaatctcaccattcggatgagtctgatgagaccgtcactgctagtacacaagcagac

SEQ ID NO: 429973 - DNA, 444 bp, Homo Sapiens
  misc_feature (15)..(15): n is a, c, g, or t
  misc_feature (75)..(83): n is a, c, g, or t
ggcacgagactcaangcacgcatttaacagaaatgttaaaccataacaagcaccatttgaggaataacaggaacnnnnnnnnngaagatttgaaacgaactcgactttctgtataactgtacctaaactaaagtatttataaaaaagctcattggagcctccatctatcagatttttgagtttgttgttgggaccacaaaataggaccttattttctatttcttttgtccttaaaattgttgtaatctctgtatgcactttgctttaaaccaatcgtaatctgaggtgagccctgtgacttttgagtagtgctaggaagagactgtctgtaacaccagcatggatctgcttcccattgtggtgaattgtgagtgagtagtgtcagcctgctgtggacttaacattgccagatgaatctacagaaatacttcaattttattttca

SEQ ID NO: 429974 - DNA, 348 bp, Homo Sapiens
ttttgtttttagtacacaatcatttttttatttatgcctttaaaataaaaatattcatttaatatgaaacagaggcaataatatatatgatttcatcagcttttcaaaatcattaaaaaaagagatttgtaattttagaatgcttaactctttttctagaatattcttctattcttctagaatattagggggaaaaataacctcacaagccaccatatatggtaagaaaatgaagttctatgtcactcatattctcttaatcattagggatgaaaacccagttgattcagctgctggcatccaggcccctaatttggggggggttgaaaacttgatcgaaattcccat

SEQ ID NO: 429975 - DNA, 579 bp, Homo Sapiens
  misc_feature (462)..(462): n is a, c, g, or t
  misc_feature (503)..(503): n is a, c, g, or t
  misc_feature (516)..(516): n is a, c, g, or t
  misc_feature (559)..(559): n is a, c, g, or t
aggtatctaggaaactacagtcccacaacatacagagactctaatccaagccaagggtgcttgtcactgccaaagagaaggctatgagcccccgcacacctctggagccctgatttccagatgtcctgaaaacagcatcatgcctctgcgtccactcagctcccgctctgcatttgctttggcttgagtctttcctgtttctgagatgccctcctcccagagtcggtcagctcacttcctgtgcttccagaagcttggttgttttccacactgtttcatccccatagaagacccaggtctctcggtgccattgacatctgtgagagtcataggtttactgaaatagtcaacgtgttgttaagctgataaaggctctgagtaacgaacgggtgctgcctcccacagtagagccaggctaatgtaatggtccccgttccataaatgggaaaacaggaaactgangctctgagaattggatagtgtccaggattccagcagcaagngcctcaatgcctnaaagtttttattgagctgaacaggaccttcagtacctcctganggtgaacccagaaatgcatt

SEQ ID NO: 429976 - DNA, 601 bp, Homo Sapiens
  misc_feature (509)..(509): n is a, c, g, or t
  misc_feature (524)..(524): n is a, c, g, or t
  misc_feature (531)..(531): n is a, c, g, or t
  misc_feature (549)..(549): n is a, c, g, or t
  misc_feature (575)..(575): n is a, c, g, or t
tggcaatccttggtattatggcaaagtcaccaggcaccaggcagaaatggcattaaatgaaagagggcatgaaggagacttcctcattcgtgacagtgaatcttcgccaaatgatttctcagtatcactaaaagcacaagggaaaaacaagcattttaaagtccagctgaaagagactgtttactgcattgggcagcggaaattcagcaccatggaggaacttgtagaacattacaaaaaggcaccgatctttacaagtgagcaaggagaaaaattatatctcgtcaagcatttgtcttgatagtgctcgtcagcagtgactgttccacagctttaactggtcatgtaactggagactgagaaagtgctgggccaattgtacttgcttggaaagtgctgtttctaactatatgagaattgactataatacatgagtatttttgttataactcagcccatacgtatatctacatatgcagtgcatctctatgaagagttcttatcctggnctactgtttcttgcngttttcnctttcctccacatgaagnttgatctgaacgataattggtccaantttatgagaatcttatgcgtcttatt

SEQ ID NO: 429977 - DNA, 388 bp, Homo Sapiens
  misc_feature (94)..(94): n is a, c, g, or t
  misc_feature (158)..(158): n is a, c, g, or t
  misc_feature (207)..(207): n is a, c, g, or t
  misc_feature (350)..(350): n is a, c, g, or t
  misc_feature (357)..(357): n is a, c, g, or t
  misc_feature (362)..(362): n is a, c, g, or t
gatcgcttttccttctgcttgtattgaaattgagtattttcctttggttcatgtggatgtttttaatgggctgttaaatattagtttggttttngttttttaaagattaaccttgaatgtttccaagaattattcacctagtttctataaccaatcgnaagcctcatagctacataaagacagcagatcaagaaagtcatgttcctnaaagacttagaaatgaggaacactttgctttcagaaggcctagcaggaacctggaaggacaggaggcattcgggttaacccacagcacccactgagcagtgtctgtcaaagtaattttgcataaattttatttaagggaaaanccggggnagggnaaatatttggccaaatcctatggggg

SEQ ID NO: 429978 - DNA, 427 bp, Homo Sapiens
  misc_feature (259)..(259): n is a, c, g, or t
  misc_feature (327)..(327): n is a, c, g, or t
  misc_feature (342)..(342): n is a, c, g, or t
  misc_feature (387)..(387): n is a, c, g, or t
  misc_feature (394)..(394): n is a, c, g, or t
agcattcaagagttagattgtaaataaacatattatgagtaattaagatcgccatttattataaataccaactaagttaaataatactattttaactatcccctttgagctggagttcagataccttttctcaaacatgaataaaatctttagtgttgtgttgccttttctttcaccatctggacccaaagcttccctttataaactaaatgagacctagaactcttgacagagccttcttcccatctattctaatggnaaactaacctttctgtgggttagccccaaagcattacttcctgttctcggctttctagggctggatanctcacaaggggattncacacattcggaaaagtcagcagcagttctgtgtctttcacccanacccganttactgagatgagtatttgcacatgctgtcctt

SEQ ID NO: 429979 - DNA, 398 bp, Homo Sapiens
tgaacactggcagttttgaaaacttccagtctcttagttttataaatatatatgtgcagagtatttgatcacaaaaattagtcacgaatccaacgcatgttactacaaatctggttaaaatctggtagtcgctcaataggacccagaagcagcaatagctgggcttttgtcatgaatgtacttggtgcacactcgtccgaacccgtctccgcatccacagcatcaattcttgcttcaagctcggggataggaattctcctattatagcatagcatctggcctaccaatgtcttcacaaattggagttgacccatcaagctgcagcagcatgttttgttttcagaagattttttgcacgtgcaaccctcactctcagtcacatctggtacacagacgct

SEQ ID NO: 429980 - DNA, 370 bp, Homo Sapiens
tacataatttatttttaaaagcatgatttgaaagctcaccaaaatgaaatcaatttgactttgattttaaagttttgactcaagatttaaaatttagctgtctttggttttctacttatttatatcaacgtgcttctgagctggtagggtccctgtgaaaacccatgagttttgctcagattaatgaaatgcttgctattagtgatgggcccctgttcagatgtgtattgctaaggcagcatttgggatgcatcaggcaacactctggaaaccacctgtcctgcaactcaggttaaaaatatgccacagagcagacgaaagtggggctagcgtgagaatctagactaggcagccaaaccccatcgcaggg

SEQ ID NO: 429981 - DNA, 419 bp, Homo Sapiens
agaactgaagcaattttgctaattttgtagtattctgtaaagcagcaaactgtgatattcagtgaagttctcactgcaaattgggaaccgagaaaggatataacacatcctttgcactccctatagaacctatcaaggctaaagatgttgagcctgactctcttaacagctccagtgtctgaaataaatattctaatgtctaaatgaaattgtgctcattccctcagggtttagtgtaaaacaatatgctcttgaggtgaggacaagaaggccgtcacctgagcatgtgaagttttcatgtttgatactctgaacattccattctagactacctggaatcaaggaccacatctgagtgtgttatacttgcaaacagtttggcttattatcattgcaatttgggaatcctacaagcctat

SEQ ID NO: 429982 - DNA, 464 bp, Homo Sapiens
  misc_feature (443)..(443): n is a, c, g, or t
aagaaagataattcttgtgcttctaatgggttatcaaaatgtttcccaccatattgaaacaaaatttcaatgttaactacattacttgtatgggctcctggatataagcagcactaacaattattacaattctcaaaattctctatttattattttgaagcacctaaaattctcccataacaaaagagactaaaatgagatgttaataatacaatccatttcctagcactttgtgtgaacatacaaagttcctagacagttttaacagacaggtcataagtttggtggtttccaccttgggcaaaggctttgtatattaagagcaaaaatgtcttcctaagtagaaggtactacttaaactaaagaaacagataaatgcccctttctcatgtgaataatgattcaatgtggaaattaattaacaccaacctatatgacaggcnaagattaaaaccaggaaaagg

SEQ ID NO: 429983 - DNA, 430 bp, Homo Sapiens
  misc_feature (401)..(401): n is a, c, g, or t
aagccagcataaagcacttttattgcaataataaaacttgaaccgcatatgtagtgcagagggcaggggacaaaagctttctctcaccaaatcactacacaaggacagcagagggtgagaaggaactgaaggaggaaaagccaggaagccaagatcagcaaagagccaagcatcaaaacccaggagatgctgaagctgtgatgaccagcatcgtattcttagagaacactcaaggatttgcccgtggtggctgggcgtccgttgggtggtgagtctacaaacagcaccttcaaatttaaactttccactgaagttcttaaaatttagaaagtggagcttgaatagttacaagattacaaaagtccagaaaatccattagaaaaaccataggatgaaaaacnaattaagccaggtcacaaaggctttcaag

SEQ ID NO: 429984 - DNA, 427 bp, Homo Sapiens
acaaacaaaaagctcaatagcacctgagtttcgcaaagatggagttgctgcagtgtcttgaactaagagagcagaagatcactgcttaaaaaaatgttgagtttattctcacaaaagatttctaaggatttaggtaatgtgtctttaaagctccaacaaaccatggaatcaacttgggaaggaggccgaattagcctttgttgtgtggttgaaagcaaattagtgctttcagaacactggtaggggctgttgaaacagacatctattgttcaaagttttcttttcccttcaagaatggtattttgttgaattccaggaagccagtttgacttcctctttagaagaaggatttctgagacacattcaagtgattaaattcaaagcaaattgtcaacatcacaagggggatgcaatgttgcatctttcg

SEQ ID NO: 429985 - DNA, 340 bp, Homo Sapiens
  misc_feature (186)..(186): n is a, c, g, or t
  misc_feature (221)..(221): n is a, c, g, or t
  misc_feature (329)..(329): n is a, c, g, or t
aaccctccacccattgatccagctagcctggaggaattcaagaaaaggatcctggagtctcagcggctccctgtagtcaaccctgctgcccaacccagcggttgaggacccagctgccgcagacgctgggtgccagaatcgccacctgtggatgggggcagcaggtgccacagtgctggacaccgnccgtgcctgccggaagcctccacccccacgccttntctggcaccccttcactgtcccctgcatccccgccattccccagacactggatttaaggcacacacagctgtgagatgactttcacatcgacccctttgtgcagtganccggatggtgg

SEQ ID NO: 429986 - DNA, 380 bp, Homo Sapiens
ccattttcatatcctattttatttttgaagtcagtgtccagaaagaaaccgacgattcactcaatcaacatgtaagcgactgaggcatccctacacaccaggtttgcaggctagggaccagagacacgatggttaaacaagccagagccctgtgatcctagggcttacaatgctggcataagaaaatccttctggactcactgtccccatgcttgtgactgtcatgtgccaagtgcgctttacacaatctcatttttccctcaacttggggataggttttgtatcattcccattacagatacggatgctgaggttactgagtggaagaggaaacctgaattctgctgctggaccccaaaactcatgtttaattacccaaa

SEQ ID NO: 429987 - DNA, 451 bp, Homo Sapiens
  misc_feature (334)..(334): n is a, c, g, or t
  misc_feature (416)..(416): n is a, c, g, or t
gttttcctttaaaaagtgatcctaagtggacataaaatagacaatagaataataatttggagtattttgaataagcctcaacattttctgtaataaatttcacaatagcttcaatataggaaatgaaggataaaataattagatctctaattttcttaatttaaatctataaaatgggttttactgattttttcattaaaatttaatatttctaaataaggtttaagagaaaacaggatattctgacataatgaatctaaataatttggcaatgttaacaacataatattttaaaatgcaaaatcaccacagatgaagttgaattaattaatgnaatgtaatcttcctctaggaggccactggagactatttcagacagggaagcctattagggaacctaaaacctaaaatatacnggtgttattaagcccccttaaaaattggtattatt

SEQ ID NO: 429988 - DNA, 416 bp, Homo Sapiens
  misc_feature (193)..(246): n is a, c, g, or t
acacctttattacactacacatgaggctcatttgcctttccgggctttgatcttccgcagatagaactccagctccttgccttcgagcacatagccgtctgctctgccacactggcctggtcgtgaggcaatacaggctagaagcttgcccctgctggaactgctcctccaggaggcctgctgattttggcannnnnnnnnnnnnnnnnnnnnnnnnnnnnnnnnnnnnnnnnnnnnnnnnnnnnnaaaatctcttccctcctcaggagtcagcttggcccccttcttgcgggcccaggggaagtgcataagtgggactcggtaccactggtcggtacggcgtgctggtcaaataaagcacgatgcagttctttcaacaaggggtcttgggtgcgggacaaactcggttggttgga

SEQ ID NO: 429989 - DNA, 122 bp, Homo Sapiens
  misc_feature (14)..(14): n is a, c, g, or t
  misc_feature (27)..(27): n is a, c, g, or t
  misc_feature (45)..(45): n is a, c, g, or t
  misc_feature (55)..(55): n is a, c, g, or t
  misc_feature (69)..(69): n is a, c, g, or t
  misc_feature (77)..(78): n is a, c, g, or t
ccgcaccgccgccngccgattccgganctgggtagtcgcgccgcngcggcgccgntgagccactgaggnaccgctgnngccgcctgagtagtgggcttaggaaggtagagggcatctcgctc

SEQ ID NO: 429990 - DNA, 139 bp, Homo Sapiens
  misc_feature (25)..(25): n is a, c, g, or t
  misc_feature (78)..(78): n is a, c, g, or t
  misc_feature (94)..(94): n is a, c, g, or t
cggccatgtcgagtggcgcccacgnagggagggttcagctcggatgtggaaggccctcacctactttcgtggcgcttnccgggggttgggagtnagaatgcttcaacggtgttccttaaagtggcggcacgaagagcac

SEQ ID NO: 429991 - DNA, 414 bp, Homo Sapiens
gaacattgttcatcatttcttaagcttaccacaacttaatttctttctcacattacgttgtgagctacccagggacatcatccttttaaagacttttcggttctgattcttcatctgagaaaactcatttaaagctccgagaatttaaagtctccccaaatggataacaaactggatgtcttcaggagggagttagtggatgttgaaggtatccctctcttttggagcattgctgagcattggtcccaagtagagtcatttgaagcccggcctgatgacattttgatctccacatatcccaaatctgggaacaacttgggtcagtgaaatactgggatttgatctacaacaatggggatgcagagaaattgtaaaagggatgcaatctacaaacgagtaccattcatggagctt

SEQ ID NO: 429992 - DNA, 392 bp, Homo Sapiens
ctagaggcctccctgcccagccagtcctcggcctctgacagtcccacagaacagctccagagcaacgtgtgacagcgctggcctctccacatttcctgaggactcttcctggaaaccctgacccacccccacaggcggtaacactgaggaccttgcaaaacctcacactgtgttctggggtctcgcactgccccacactgtgactgagcagcctctgaggcgtttaaggaggaagtcacgtgtgtcataggggtcacatatgaaccagacacattccccaagccctggagtctgaaagggggtcactacatttcatagaccatcacctgatcctgatttcctgtgtctactgagaagccccatgcagggcagcagtgcctgggaatgatcct

SEQ ID NO: 429993 - DNA, 367 bp, Homo Sapiens
  misc_feature (300)..(300): n is a, c, g, or t
  misc_feature (337)..(337): n is a, c, g, or t
cgaaccatacaagaatccccatcttcctttgaaactttgctgaaactctttagttttctggctttgctcatagctgtcttcttgattttcctgtaagtgaaagatctaactggcttttcaaatgtatggagtataacgttccaactcctctaatgtaacaactttgtcttcataatcataaaccatatccaaagaatgaaaccctaccccctcccctttccggttcacctcactggcagcttggtattgctgggtctcttgcagctccattaggtttaatgccagaagataaggtccagnacttttggttcacttaaaatgttggaaggatccaggnccttttcaggaagaagctgcccccagagaa

SEQ ID NO: 429994 - DNA, 208 bp, Homo Sapiens
tcttgtctccttatgtataggaggtgggtgatgctgcagcttgcacatagttgtagtattgccctaagtgacagcctcatgaggtagtgctcgttttataagctgtgcccctggacttctggggaaatatgcaaatgactctgttcttcaccagttgtatgattattaaaacttctttccctgcctactattgctgattatcttagat

SEQ ID NO: 429995 - DNA, 351 bp, Homo Sapiens
  misc_feature (13)..(13): n is a, c, g, or t
  misc_feature (149)..(149): n is a, c, g, or t
  misc_feature (300)..(300): n is a, c, g, or t
  misc_feature (323)..(323): n is a, c, g, or t
atgttattgaagntgtttatagtagacttaatccacacaaagacaatgatgggggcgctggcgatctagaagactcattggtagccttataaccttctaaaatgcttttgattctgaaaattgggggaaacttttaatcacattttctncaatacaaggggaaatattcttgtgaattcacactgttttgtgatatgagcagaaaccaattagcatttcccaaccattgcctcccatttgtgttccccgtacttaccactcttaagcattgcctgggactctacagtattttttgccaanctcaggcatctgggttacaactngtattgaatttttggcccctagaaaaac

SEQ ID NO: 429996 - DNA, 326 bp, Homo Sapiens
  misc_feature (242)..(242): n is a, c, g, or t
  misc_feature (289)..(289): n is a, c, g, or t
tatcttaaatgtttattacatatgctgtacttagggagactccagctgtttgacaccagagttgacaggcacactcagcacggactgggttaagccaatgctcgcttctccttgtaggtcgccatcatcttcttgatttcccgcaatcgctttccccggattcagacccttggggcaaggtctgtgtgcagttcatgaatggtgtggcagcggtagacagagaaggggtcctgcagcttggncaaggcgttcccctgtgaagtcgtctcttggagtcgatcatccagcnaataagcctgcattgagaacttgaagggccccaggta

SEQ ID NO: 429997 - DNA, 316 bp, Homo Sapiens
  misc_feature (13)..(13): n is a, c, g, or t
  misc_feature (75)..(75): n is a, c, g, or t
  misc_feature (80)..(80): n is a, c, g, or t
  misc_feature (219)..(219): n is a, c, g, or t
  misc_feature (254)..(254): n is a, c, g, or t
  misc_feature (279)..(279): n is a, c, g, or t
  misc_feature (288)..(288): n is a, c, g, or t
atacaccccaccncacacatccagtgccctcccagccatacagatgccaggcttgtgcatatcatgccccacgcnggggnagagggaaatgcagactccactgaggaggggaagagggcctgttgcagaaggaaatgtaaagatttatgaggtagatagaaattatcacttcacaggctcaatccctgcagaaaagataagtacattcatcttgtaaanaaataaagatgaggtaggacttaagcaatgttgtncttttcttgttctctttaaaaaaanagagaaaanagaaatttccctgagactgtttcttctt

SEQ ID NO: 429998 - DNA, 367 bp, Homo Sapiens
taacagtagatgacttttttatcagacttttagtaatgtaaattaaaaaacaaacataagatgaataagtaaacagaggatttcaacaacacaatagaacaattagacctaacagtcacatttatatctctccactcaacagtagaatatgcaatacttttaatcacacatgccacaatattccagatagaccacctgttaagttaaaaaacacatcttagcaaatttcagcagatggaattacacaaattattcctaactatgatacaataaaacaagaagttaaaaacactaacatgtcaaagaataagtaaaaattaaacaacaaattctcaaacacactcttgttcaagaggttatagactta

SEQ ID NO: 429999 - DNA, 225 bp, Homo Sapiens
  misc_feature (193)..(193): n is a, c, g, or t
  misc_feature (200)..(200): n is a, c, g, or t
  misc_feature (212)..(212): n is a, c, g, or t
tgacaacctgcgcctggccctgggagccactcttaccctaaatcagtcacttaacccaaattcaaaagaatgttgagctagcctgttggtccatccacacccccatccctgttgtagcactaaacattgggaaaattggaaatgagctctgtagaaacaagcagttttggaaactgagtatcaagatagtggntcactgnctagataagagnttggaaaattccc

SEQ ID NO: 430000 - DNA, 392 bp, Homo Sapiens
gatattacgcgtgtcacccgttgaaaaaaccgtgccaatactgatggtcatttgttcaggaacatcatatctgttactaaagccggtcaggagttcgacatttttacgcatacgttccgcaatgatttttgcctgggcactattgagttcggtaaatagcaagccaaacacctcaccctccagtcgcgctaaaatatcatcggggcggatgtttgctggataatatcgacaattgaaaccagcactttatcacccacacgatgtccccattgggcattgatgcgtttgaactgattaatatcaaccagcatgacacagaagtccttaacaacaggtcgcgacaataatgactctacgctgttgaaaaagtagcgccgattataaatattggc

SEQ ID NO: 430001 - DNA, 454 bp, Homo Sapiens
  misc_feature (199)..(199): n is a, c, g, or t
  misc_feature (208)..(208): n is a, c, g, or t
  misc_feature (311)..(311): n is a, c, g, or t
caggtgatatttgtgtccttgaggatagaccagaggttttcagggactggtgcagtttgagaaatcccctggtatgcccccgacccaggagaggaggttggcttccgccactccttggaattcacttagaatttccctcttttccagcagttaaactgccatggaaggagctggccaccaccgttctcaacctatcccnactctaccntggagccctcccaggaaatactgggcaaagtggagacattactgtgaactccagaaaattccaccgagtgtaatctcttcccacgtaacccatctcccttccnccaaggatccccagcccaaatgcaaggttgttcagaggcgtttctgaaagcttgtcaatatgccaaaagggaataaaatatttcaggtccctttcaagtgagttcaggttctgtggttaagagaaagggctccttagggcagg

SEQ ID NO: 430002 - DNA, 403 bp, Homo Sapiens
  misc_feature (80)..(194): n is a, c, g, or t
  misc_feature (328)..(328): n is a, c, g, or t
cttcttggtacacctgtctgcgtctcctttgacctcctctgccatgttgcgacacagaacaaaatcctttgctaggaatnnnnnnnnnnnnnnnnnnnnnnnnnnnnnnnnnnnnnnnnnnnnnnnnnnnnnnnnnnnnnnnnnnnnnnnnnnnnnnnnnnnnnnnnnnnnnnnnnnnnnnnnnnnnnnnnnnntcccagtcctctgcgcaaattattgttctaactcttcttaaccgttggttacacctagagtaccaactctttgatttaaaagcaatttgagagtatctataattcttagtttgaaaattaacttattttctttntcttatatggagactgaaattagcaggcgaagtcacgtctctgttcttctatgttgattctgcaccaccagacag

SEQ ID NO: 430003 - DNA, 127 bp, Homo Sapiens
tctgttttgccactagtttaatagaatcaaacatgaaatgaataattgtatcttaattatgacataagctagacttttaactaagtgacttttccccttcatatttacaaatagcacctgttacaag

SEQ ID NO: 430004 - DNA, 390 bp, Homo Sapiens
agagatgaatggtcaattatcttgaaaaactgtagtacatacaatgacattctgatgtagttgtataaatagttgataaccagtaacatttattactcagatttatcgcctacttcagtaaaagattacttccaaaaactctattcactctcaatcgataatagtttgccatcactgaagatactcagaagatacaccaaagagttctgaaacgggagtctaaatacattttgagaaactggcatcagaacaatgtctagtcccttttgaactattaacacactagtgaatatatttccagcaagtatatttgtataataaacaccgtcctttaaaaaaatctttgaaatatggtgcttaaataactttcttttgtaaccttaaagtatc

SEQ ID NO: 430005 - DNA, 148 bp, Homo Sapiens
aatggaatgggaagtagagggtgaacagaaagaacacaatacatctgaggtgggacgcacacatgttgagtagtaaaaatctctggaggacttcttgttaggggatgccaaaaagtgggcctaccaagaagatataaaaaaggctgag

SEQ ID NO: 430006 - DNA, 409 bp, Homo Sapiens
cctggagacagaccaagttacttagtatcctgcacagtgctcctcgattgatggctgacagccatgtgactgcaactgtaggctccctggaggccctccaggaacaaaagaattagctttgaaagcaagttattttcaaatgtattagattggtctcatgggagtggaacaaataataatacagttgttttgctactaccacttgttagaaatatataagtagtccatggatatgtgattacaaaagaatcctatgtatgtatctagagtgagatgggaaagtgtcccgcttaccctccttctacctccaccacttcctggcccagaggtaatcactgctaacaggttacagcatgaatatgtagtctgtttttcataactctatagaaatatatgtacatatttatag

SEQ ID NO: 430007 - DNA, 118 bp, Homo Sapiens
caatttgggtaaatgcgtccaagaggaagaaataaaaatgaaaagactgacagtttaaaagcatgtggagggcttagaagataaagacgagtgcaagaaagggagagcgcggccggcc

SEQ ID NO: 430008 - DNA, 354 bp, Homo Sapiens
atgagcaccacccctggcctgtagtgaagaggggtcgttgcttggtcacaaggctgctgagtctgcactagggtccgcctttagttggcttgttacaaggggcttgggtagttgtaatttccattttatttttggactttcctctgtagggcagaacactagggcagttttttgcagtcgggtctgcatatggtgggctttatatcaggttgtggatgagtgcggttttcactgagtaccagagaggatttccccaggtaactgtgtgggtttctagttaggcagaactggccataaaccatggctcagggagctgggaacagtcattgaactgcttcagggtccacagtaaag

SEQ ID NO: 430009 - DNA, 433 bp, Homo Sapiens
  misc_feature (354)..(354): n is a, c, g, or t
  misc_feature (365)..(365): n is a, c, g, or t
  misc_feature (376)..(376): n is a, c, g, or t
  misc_feature (388)..(388): n is a, c, g, or t
  misc_feature (414)..(414): n is a, c, g, or t
tactgggatgctgtaggaggcggtgtctggtttgcacagggcccagggtattggttttgatgaggtgtgtcatttatgtagcctgtgaaaaacctggccctcctaccttacccttttaatgtgcaaatatgagtcgccatgatgttctgaacacacggtgttatttggaggtggccatgactccttggcacacctggtgacaagaaggaggcaggaatcgccatattgggtggaccatttctaatggccatgatttgcatatcaaatcttgccagcctggcccttcaagccattttctgttagaaaataaatggtttggggattgcttttattaaaaggaaaagcctttataangaactcctttngccctttctanctgcctaaaaanaatttcttaattaattcctgtattanaatgaaactaaaaagcgtt

SEQ ID NO: 430010 - DNA, 138 bp, Homo Sapiens
ctggccttgtgcaagagctgtcttggagaaaacttgacactatgatcataaaatttcatatagaaaaggagaaagtcaagaacaaaaaagaaaagcatatgtgtggtgaggggaaagatctgtacccagtaaaattgg

SEQ ID NO: 430011 - DNA, 414 bp, Homo Sapiens
  misc_feature (361)..(361): n is a, c, g, or t
  misc_feature (393)..(393): n is a, c, g, or t
  misc_feature (400)..(400): n is a, c, g, or t
acatgtgaaaagagtgtttattgctgaaaggattaaataagataagacgctgagtagttgagctgcaaatgcttgtggattgaagtctaaagccagcttacatagacccacccacctgcccatttcctgccgtggcctcctgtgtcccagccaccaccatcgtcccatggcgcatggctgacgtgctgtcctgcaaagggccaggcgttaccctctagcatgtaccactctccactggcttcgttcttggggctcatgatacatattatttggttacttccaccttggagtatcacaggtcaaatcagccagtaactcgtggaactaacccacgagtggtgtttaacccctggataatggncccagtggaaggggcttgggcttgaagttcanaacccancatgggtttttggg

SEQ ID NO: 430012 - DNA, 373 bp, Homo Sapiens
  misc_feature (301)..(301): n is a, c, g, or t
ggctaaaccaggtattatttaaggtcaatgtgttactatgactttttgtggcttcatattgcagatacatgagtagtcttatcatttttttgagcacttagactgagagcatggttattgaaataattccccaaagtaaaccttattattttcaagggatttacaatatattaccaaaacttgagcaatgataggtaaatttgagctagttctcctcttttccctcttccaaactgcttttacatattggtgatagattaatatttttcaaaaaagtctaggtcttgttgttttatttccntatttggaactcttgacattctgatgtttcctgaagcagtgcaaacaccctgagatagtattttaggtcctg

SEQ ID NO: 430013 - DNA, 283 bp, Homo Sapiens
cagccactgtccctgacccaggatcacatcttaattcgcctttgtatacccacacagcacctccacacacacgtggcaggtgatggggtttccagaaagtttgctgaaggagtagaaaatccactgtcattttcacggccaaagcctgacacctacagcttgagaaggaaggaattccttccccatgcccctcagcatatctcttgtacaggtccaagtgttcctattaatgctttgtggcttaaactttttattccttcagttttttgtttcttctcttccc

SEQ ID NO: 430014 - DNA, 555 bp, Homo Sapiens
  misc_feature (82)..(83): n is a, c, g, or t
  misc_feature (354)..(354): n is a, c, g, or t
  misc_feature (450)..(450): n is a, c, g, or t
  misc_feature (460)..(460): n is a, c, g, or t
gttcctatttactactgtacagacctaagttaatgatgagctctaaggaagttcgttcttctctgaccccataatagcgatnnatcatttcttcctatgccacttagtacctacagtcaggggtgatgttgaatgcttagccctagatgttatttggggcagaacataaaagttttcccttgttactcatgaagatcagtatggtgtaggttgctttgggccacactaaataagttgtccttgcctagaggagtctggttttgctgttaacaacttcttttccattttcataagtgttcatcatagcacaccataggtttttactatttagcttttttcctggttcttacatanccttaagttttctgaaggttttggttgaatcctcattatccctcactccagctcctgcatctcctgatttggagacatttcctccttggctccgcnttctggacantcaggcttaactcaagctaacttttgggttaaggcagtaatatgtaaaggattaaatgattgaattaaatgcattaaccaagcaatacatttaca

SEQ ID NO: 430015 - DNA, 334 bp, Homo Sapiens
  misc_feature (171)..(171): n is a, c, g, or t
  misc_feature (252)..(252): n is a, c, g, or t
  misc_feature (288)..(288): n is a, c, g, or t
  misc_feature (296)..(296): n is a, c, g, or t
  misc_feature (308)..(308): n is a, c, g, or t
gcgcccggcctaactcctgctttctaaacctcttgagttgaagctcctcaactcaaaacctgggctgtccccaaccccggagtcaatcccaggtgaatgcttggtccacctgtacccactgagctgtcacatttccctacattcccagtagatgggcagcaaatgcatgangcttttcctaaagcaactggtatggcctcaagggtcctcaattttaagaaccctttggctcagttcctgacttcctgacanagtcttatgacttctttaatgggaacagaatgctgnggtctganattttgctttantggagaggaagtagaatcttattctt

SEQ ID NO: 430016 - DNA, 542 bp, Homo Sapiens
  misc_feature (514)..(514): n is a, c, g, or t
gaattttgaccgcctcccatgaatcagaatgttcttagtggcatctagaatgctaaatgcttcccagaaggttttcaattgactttgcccagactcttcagaggaatcactagttagggcagctacagccttattaaatgtatttcttaaataaataagacttaaaagtcaaagtgactccttgacccatggactgcagcatagatgttgtggtagctggcacgaagacaacatgaacctccttgtacatctccatcagaactcttaggtgaccaggtaacattgtaatgggcagtaatatttggaaagaaatttgagcaggtctcaaccataggcttaaatattcaataaaccatgctataaacagatatgctgtcatctaggctttgttattccacttctagagcataggcagagtagatttaacataattcttaagggccttaagattttggactggtaaataactctgacttcactttaaggcaccactacactcgctggcatgaactcntctccccgctatgaagtccagatgacat

SEQ ID NO: 430017 - DNA, 316 bp, Homo Sapiens
atgaactactgcaccccggtcaaggccaattcttgaatccctgtgccaccttgaaggtatgactgagagaggagctagttatgacaagccttgctgagatcagctgaaatagcctcctgcttgctacgggctgttagtgacttatgcgccagactccaccaaacccatctgcagtcagccatccaggacaatcaggaagaggcccgagaacagaagagcatttggggaacttcctcaacccctctgtcaccaggaccaaatcatgtgaaatgtatatggtctgtcacgcaaaatgctttctgagcatcggaatttt

SEQ ID NO: 430018 - DNA, 286 bp, Homo Sapiens
ttcttattcatttaaaatcctgttctttctgtatgactcatacagaagtcctttattgattgtccttatcctgacaacgaattttttcagggaagataaacttcaccggaaaatatttttctggtcgtccgaataacagatgcgcgtaacgtcgtggcatcctgaccttcattacattaaatgaacgtcgagcgcaccactggggtgttcaatattgatattgccgtatcctacagaagggaccgatttgtcggggtgacggtgccttccaatgcacaactacctg

SEQ ID NO: 430019 - DNA, 224 bp, Homo Sapiens
agagccagctgtgtgggagactggagttgtattaattactcaaatctgtctccccaagcattcagggagcagagtttttaaggacaacctggtgggtggggggaagccagtgagccaggagtgctgattggtcagggatgaaatcgtggagagttggagctgtcttcttgtgctgagtgtgttcctgagtggaggccacaagattagatgagccagtttatccg

SEQ ID NO: 430020 - DNA, 586 bp, Homo Sapiens
  misc_feature (551)..(551): n is a, c, g, or t
atttgaatcaacaacattatcacctattacaagacattttagagaaagaaaacaatggtcattaaagggcaaagacggcagggctagatctgggggactagcctccacccataacacaacttttgttcttgggcttggagcaggctctgaccttactcaccgcctccctttgagcctacagttgattcctgtgcaggctgtggtccatttagggcttcaggcccagaagacggatgctagatgggaactgggctagacagagggaccaggcttctatgagcggggagaggcagggcaccgtggctcgtgtcgtaggacagctagaagccttcaagtctcatggtggcccaggtctggccaaagcagaagccccagcttgctccagacttggcaggctctctggagttcccgccttggaggaaacagttcaggtatggctcccaaagcccagaaaaaatgttgctgtggcagcctagagaggagttctgggggatcctgtaattaaatacacatccctgagctgtggccccagaacccttgtctccaggctnaccagtttccaaactttggtgggatgactgccgtt

SEQ ID NO: 430021 - DNA, 502 bp, Homo Sapiens
  misc_feature (398)..(398): n is a, c, g, or t
  misc_feature (433)..(433): n is a, c, g, or t
  misc_feature (440)..(440): n is a, c, g, or t
  misc_feature (489)..(489): n is a, c, g, or t
cgtttttgctgcgtcacagggagacagaagatgggctgctatttcgtcggctaaatgctatcattttaagcaccgttccaaagaaaacagggatcttgccagaggaaaataacatataccataaaggaaaaagaaatgtgcatcaaggcaaataaacagctctctactaagggcctaggatcttgctagacgagtcatttctctggttgaaaagcagttgagaaaggcaagacaaggggggcgggggccagcagggaccttcttgagcccttccttgctgctcttcaaagacaagacgcattttcctttcttacggtctcctttgcaaagtcttcttgtaaggcctttgccacctttcaggcttgacttgacttgcctccctttcaaataatcagcantttggaaggggtacttggggagttcgacaaccccncatggtntgtttagcttgactgcaggacgtctcctggttccaggtggttggacccnccatctaaaaatt

SEQ ID NO: 430022 - DNA, 207 bp, Homo Sapiens
  misc_feature (18)..(18): n is a, c, g, or t
  misc_feature (58)..(58): n is a, c, g, or t
  misc_feature (79)..(79): n is a, c, g, or t
  misc_feature (111)..(111): n is a, c, g, or t
  misc_feature (117)..(117): n is a, c, g, or t
  misc_feature (120)..(120): n is a, c, g, or t
  misc_feature (145)..(145): n is a, c, g, or t
  misc_feature (160)..(160): n is a, c, g, or t
cggggatagttctacatnaagacatcaccacggtcgcaccactgagataacttaaggncggaaaggctttgaggagganccgtggaccgacgcaaatgcaggaagtttaancacttnggnagaatgagacaagatcactgcacgnaaactcttcttgaangggacggcccaaaacttctggacccgtgagctggcaacgatgactta

SEQ ID NO: 430023 - DNA, 602 bp, Homo Sapiens
  misc_feature (29)..(29): n is a, c, g, or t
  misc_feature (34)..(34): n is a, c, g, or t
  misc_feature (108)..(108): n is a, c, g, or t
  misc_feature (146)..(268): n is a, c, g, or t
  misc_feature (277)..(277): n is a, c, g, or t
  misc_feature (294)..(295): n is a, c, g, or t
tttttgagataaagtctcactctatcacncaggnaagagggcagtggtgagatctgggctcactgcagcctccgcctcctgggttcaagctattctcatgccacaggntccccagtagctgggactacaggtgtgtgccaccacannnnnnnnnnnnnnnnnnnnnnnnnnnnnnnnnnnnnnnnnnnnnnnnnnnnnnnnnnnnnnnnnnnnnnnnnnnnnnnnnnnnnnnnnnnnnnnnnnnnnnnnnnnnnnnnnnnnnnnnnnntgacacacngtgcccgaccccccaannaaagagttgtttctatcagatacattcaactcatataatttgcccaaactgagagaagggcagaaaaagaaggaaaggcagtgaaaacttgaatgcctctttggtagatattattctaaggacactttcccttttgggtctaacatcaccatattttggtttaggagcagctcatggggccaaaccattaaaaaggaattacaattaggaatggactctttccaactaacatcttggttaattctcaggctctttagaagtcggggttaaagatccctgtgcattcttatcatgctgagtgagctgt

SEQ ID NO: 430024 - DNA, 429 bp, Homo Sapiens
  misc_feature (323)..(362): n is a, c, g, or t
  misc_feature (369)..(369): n is a, c, g, or t
  misc_feature (409)..(409): n is a, c, g, or t
agaaattgacgttgatacaatagcatcactaactaaccctaaataacttatttcagtttgccgattgtcctactagtgtcctttttaaagtccaggatccaatctagaatcccatacaacacttacttgtcacgtcttgttagtctcatctagtccggagagctcctttctataattttcacgacttaatacttttgaagagtcccgaccagtgattttgtacaatgtccccagtttgggtttgtctgatgttttcttaggataagaattagcttatgcatttttgacaacaataccactgaagtgatgttgtgccttcccannnnnnnnnnnnnnnnnnnnnnnnnnnnnnnnnnnnnnnnggagaanggggctccaactgttgccccgcccggaagtgcagtggcanatctcagctcactggaaacc

SEQ ID NO: 430025 - DNA, 459 bp, Homo Sapiens
  misc_feature (131)..(131): n is a, c, g, or t
  misc_feature (404)..(404): n is a, c, g, or t
tggcaccgagaggcctgcatgggcgtgtgtagcatgtgtattttcagagcccgacacttgaggagactgttgctcaatttaagaaagcacagctattggaaagccaggaaacagacccagagaggcggatnactgtgggagcaaagagctttgggcagcctttaaggtaggcattggcgtctgaaatcatgttattgccttttgtttatttgttagatggattttgtattggttttatgctttgttcggtttagagaattttcctttgatggagctgccaatatcaatagatttggttttgaaatcctcgggccgggttcataggataggctggagcccacggtgttagtgtagatgcctcaaagtccagaagagattggataccaaactggtgatgattttcnaaaggagattcaccttgcaaatcctcactgccattggagactttgctgggagtcc

SEQ ID NO: 430026 - DNA, 172 bp, Homo Sapiens
  misc_feature (131)..(131): n is a, c, g, or t
  misc_feature (144)..(144): n is a, c, g, or t
agtacgagtcacagttcccagcctcaaaatatattctttaaaaaacactatttggctttaagaattccataggctgtatatacagctgattaaaaactgaaaaattcaagcaactttctgattaattttgnaaccagaaacatntgggtatgtcaaactggcagagtaagct

SEQ ID NO: 430027 - DNA, 263 bp, Homo Sapiens
  misc_feature (127)..(127): n is a, c, g, or t
  misc_feature (169)..(169): n is a, c, g, or t
  misc_feature (188)..(188): n is a, c, g, or t
  misc_feature (203)..(203): n is a, c, g, or t
acttattcttaaataacttagaagtaagagagaaatagtggtcttgggataaagcttgaaatgtactgagtggcttcagaacaagaatggcctgttgccgatggactatattaatacatctaagganaagatgtgccaatctttatttttcagtctttaaaacatggtnttaaataaaaaccacgtancaaatgtatctccanagtatttaatatcatgagacatgtttacagtgtgctgtttaatagaataaaaatcatgat

SEQ ID NO: 430028 - DNA, 547 bp, Homo Sapiens
  misc_feature (195)..(195): n is a, c, g, or t
  misc_feature (398)..(398): n is a, c, g, or t
  misc_feature (428)..(428): n is a, c, g, or t
  misc_feature (461)..(461): n is a, c, g, or t
  misc_feature (488)..(488): n is a, c, g, or t
  misc_feature (494)..(494): n is a, c, g, or t
  misc_feature (514)..(514): n is a, c, g, or t
  misc_feature (523)..(523): n is a, c, g, or t
  misc_feature (531)..(531): n is a, c, g, or t
tttgcctgtgtgctaatcgcagcaataagtcactctcttttatgggagcatggccatagcaggaaagaagggtcaaattatttggtttctgggctcaaatatatgtcacaatctctcctatagggaaaagccaagtaagaaagtcacattatatggatgatgggttcacaaatatgtcactatgcccactatggnagggttcaggcaggaggctcacattaccttagttctgggccaaacaatatgtcacaatgcctgatgaggaaagtgctgaggaaaaacgtaacttcatttttggtgtttagcccagcagtatgtcaaaatctacattgtgagctgaatgtaggtagaaaaagaagcatcacaacagctaggtgctggcccagtgataggtaacnattctttctggtaagcagcaacctggtagnaaagagagtcacattacctgggtgatggatgcngatagattataatgcttcctgccagcnggatcnggcaagggaaagttacatcncccggatgntgcacatnggcatgttcccaatgg

SEQ ID NO: 430029 - DNA, 114 bp, Homo Sapiens
  misc_feature (65)..(65): n is a, c, g, or t
  misc_feature (84)..(84): n is a, c, g, or t
  misc_feature (95)..(95): n is a, c, g, or t
tcggtatggcattggcgtccgggcccgcaaggcgacataagctggcatccgggcagcatcggccnttgggggcttcggggcccngagacgcggcngtaatgagtggggcgtgcg

SEQ ID NO: 430030 - DNA, 113 bp, Homo Sapiens
  misc_feature (43)..(43): n is a, c, g, or t
  misc_feature (103)..(103): n is a, c, g, or t
gaccatgctggttgatagtttcaaggtatatggaaagggtgtntacagcaccccaccgggaacacagatttgactcaaaactcctcttcactacaccaaagtnatcatgtaaa

SEQ ID NO: 430031 - DNA, 501 bp, Homo Sapiens
  misc_feature (324)..(324): n is a, c, g, or t
  misc_feature (364)..(364): n is a, c, g, or t
  misc_feature (375)..(375): n is a, c, g, or t
  misc_feature (418)..(418): n is a, c, g, or t
  misc_feature (436)..(436): n is a, c, g, or t
tgggatctcttggaagctggacttgatactataagtcctaggcttctaaggtcgaacacagatcaaacttagtggcatgtttggttaagagttagattagacaaaaccaatgaagttgttaaaagtttcagaaacaattgaaaatgaaattgatgcatgattttagctttgcaacaaattcaactttagaaatatccttaagcctaagattaatcaagattcaggaccttgaagaattttcaaagttagaactgtaatttgtgtagggacgtaaaatctttattttcaacaaacagcaaatgtttccgttaaacaaatgtgtantttatttgaacagatgaatcataacagttggcctgcttanctaagtaatgntcatatatccaaaaaatacctaaaatagttctctctcatattncccgaagtttttgtcagnttccggaaagccttttgggtccgccaaaaggggcatttcaattgccgcatttgggaaaggttaat

SEQ ID NO: 430032 - DNA, 445 bp, Homo Sapiens
  misc_feature (235)..(235): n is a, c, g, or t
agaaaaaacttcagaaatttttatttagcaaggggataagttaaagacttgggaagagggtaggactcattggtaaaggtgaacaatggcaaagggttttagttgaacacaggtgcaatgcacgggaatggtcaggagcacacaggcaggacacacagatgcacaggtctgtcctgatgaaggaaggcactgccctcccactgtgcccactgtagtgattaagcctgtaattggnatattgggtacaatttctgagcaccaaatattgactacatttttatgcagctccagagggtgaatctcgggctgctgaaattctgggaaacatttcacttagcactgagaaaaatatacatcagattatgctagagggggtcaacaagacttaaaccaatccccctaaggttccagttcacaggtggccatctgctgtttgtttggaaag

SEQ ID NO: 430033 - DNA, 694 bp, Homo Sapiens
  misc_feature (643)..(643): n is a, c, g, or t
  misc_feature (673)..(673): n is a, c, g, or t
gagcacttactccagccctagccagaaggaagcgcccatcccagcagctggaacttgagttacagaaagccttgccaccacggactaaagtgctctggggtcctaaataaataaacttgaaaggctgtctagaccacaaggactgcaactcctgggccagttctgatgctgtgctgggctcagagccagtggacttggggtgcacacagcttagtgatacaccagccggggcaactaagggaatgcttgtgccaccaatctcccaaccccaggcagtgtagttcgtagctccaggagagactcctttcttccacttggagaggagagggaacagtaaagaggactttgtcttggataccagctcagacacagtaggatagagcactgggcaatgtcatgaggtgcctattctaggccctagctcccagacaacattttcagacacagcctgggcacaaaggaacccgctgccttgaagggaaggacccagtactggcaggattcatcacctgctgacttaaggcctgggtgagactctgagacgtgacatgacctagcacagtcactgctgtggtggctttaggagaggcccttatgcttgagaaaacgtaccagttgccatagtgggtagacaccagcagcnttaggtctcattccgaattgtttgaagatnatgactcctggcaaggaccat

SEQ ID NO: 430034 - DNA, 194 bp, Homo Sapiens
  misc_feature (39)..(39): n is a, c, g, or t
  misc_feature (75)..(75): n is a, c, g, or t
  misc_feature (181)..(181): n is a, c, g, or t
ctcttgcctctatgtatgccaaaacttttgtaaaagganccataaacacacaactactctgtacacaatgcaacnccctagctttcctgctccccagagctgtgcatgaaggagaatactgctttaaaatgcaatacttctgtgacactgtgcatctaataccataaattccaaaatatgncactctattgtcc

SEQ ID NO: 430035 - DNA, 149 bp, Homo Sapiens
  misc_feature (35)..(35): n is a, c, g, or t
  misc_feature (77)..(77): n is a, c, g, or t
  misc_feature (123)..(123): n is a, c, g, or t
ctgtcggcatcatgctgtaacggaagaaggtctcncatggaccggaaccctatacggggcgagactcctccatcacnccctggaggactgtataaccgtttcagttctggagggcccctgagngatggccgagccgagactgaatttac

SEQ ID NO: 430036 - DNA, 602 bp, Homo Sapiens
  misc_feature (202)..(202): n is a, c, g, or t
  misc_feature (431)..(431): n is a, c, g, or t
  misc_feature (466)..(466): n is a, c, g, or t
  misc_feature (505)..(505): n is a, c, g, or t
  misc_feature (545)..(560): n is a, c, g, or t
acaaacccatcagcatctctgggtgatcatttcagcaaagatgcaaagggaatagaggacagggaggatgacctccagcagtgaactggccttgacccctccagtttgacagactgtccagccagcctcttttggtgcagaaccttcttacaagacagctgcaaacgggcatgctccagggctctgaacctaagcttgcacntggtttgcacagtgactacccatgctgagttctgagttacagatatttctactttccagaaccccgtttccttctcctttccaatttgctaaagtggatatttattgcaaggaaaacagtactgaaagcttttattgcatttatgcagcactcagccaataaaacctcaactcagaggtaccatattttatgtagacagggatttggctttgacaagattctccccaanctgattttcagtggaaggagccacttcttatacanctactcgctaaatttccagattttaggaccagtgtatgnaatatactggggatagatgtcagtgaggtggacatgtagnnnnnnnnnnnnnnnnctggggccgcaaaggatttcaggcaggtaagaggtgaaccgc

SEQ ID NO: 430037 - DNA, 269 bp, Homo Sapiens
  misc_feature (86)..(86): n is a, c, g, or t
  misc_feature (204)..(204): n is a, c, g, or t
  misc_feature (222)..(222): n is a, c, g, or t
  misc_feature (226)..(226): n is a, c, g, or t
  misc_feature (243)..(243): n is a, c, g, or t
acaggtcagttttgttacagaggccaattagcagtgctaaccttcgcctgcggaaaaagccaagtaatgaccgggcaagcctgcgnaggggtgatgaataactcggagagctgtaatttgaaaggggggctttgaagcatttaccttacatgggacgccattgtcctgcagggtgtttgatcttaaaataatttcttaatgatncaccatgggagcaattgnaganaagattaggctgtaagnctaatggacatgggaaaagttaaatt

SEQ ID NO: 430038 - DNA, 232 bp, Homo Sapiens
  misc_feature (77)..(77): n is a, c, g, or t
  misc_feature (131)..(131): n is a, c, g, or t
  misc_feature (151)..(151): n is a, c, g, or t
  misc_feature (171)..(171): n is a, c, g, or t
  misc_feature (188)..(188): n is a, c, g, or t
  misc_feature (195)..(195): n is a, c, g, or t
  misc_feature (210)..(210): n is a, c, g, or t
ttttgcctcttcccagtcttcccccagaagaaggggggtcccccagggggcaaggaagttttaccccatctggtaanaattgacaattggaatcctttaagccactaaaaaagggtttctccttttctctnaaatcagaattttttcaagnttttttcaatgccccttggntggaattggttagggcnaataggncccggatttggggtntttaggaaaaattggggaccaa

SEQ ID NO: 430039 - DNA, 544 bp, Homo Sapiens
  misc_feature (196)..(498): n is a, c, g, or t
  misc_feature (506)..(506): n is a, c, g, or t
ttactagggagtgtgaggggcaggggacacatgccttccccagataacctgagggactacatccctcctccacactccaagtcaaatatttattgaggcaagagaagagactggagtgctccaagttgggaagacctaaccccaacttggagatgtgatggaaggctctcccaagatgtcagtatctaaacttacnnnnnnnnnnnnnnnnnnnnnnnnnnnnnnnnnnnnnnnnnnnnnnnnnnnnnnnnnnnnnnnnnnnnnnnnnnnnnnnnnnnnnnnnnnnnnnnnnnnnnnnnnnnnnnnnnnnnnnnnnnnnnnnnnnnnnnnnnnnnnnnnnnnnnnnnnnnnnnnnnnnnnnnnnnnnnnnnnnnnnnnnnnnnnnnnnnnnnnnnnnnnnnnnnnnnnnnnnnnnnnnnnnnnnnnnnnnnnnnnnnnnnnnnnnnnnnnnnnnnnnnnnnnnnnnnnnnnnnnnnnnnnnnnnnnnnnnnnnnnnnnttaaaatnaaataaattaaggttagtaagaagttgccaggtaaagt

SEQ ID NO: 430040 - DNA, 117 bp, Homo Sapiens
ctggcccaaaggaaattcttatagggcacagttattgacctaagtgtcttaaaattaatcttgcttaggtggcgaaccaggaaggaaactaaggctaaaaccaaattaccaaattcg

SEQ ID NO: 430041 - DNA, 373 bp, Homo Sapiens
  misc_feature (267)..(267): n is a, c, g, or t
  misc_feature (283)..(283): n is a, c, g, or t
tttttttatgttttcatacatagaaatacttttattttacttttaaaacacacaaatgcatggataaacaggtggtagtttgttctttatactgctcccatgctttccaattttttttaacaacagcacagaaaacatataaattcatatttagacagcctagccaaaggcacaaaatacatgaaattttgttgattcaaaatgaaaatcaaacaagtgtcctgtcattttaatcatgctaaatttatgaatcccacaaatacatanaaataactaatgtcantacaatccctgtcaaaaccccaacatttttgcagaaatagaagacttaatcctaaaattcatataggactttcaagggaccctgaatagc

SEQ ID NO: 430042 - DNA, 190 bp, Homo Sapiens
  misc_feature (53)..(53): n is a, c, g, or t
  misc_feature (56)..(56): n is a, c, g, or t
  misc_feature (62)..(63): n is a, c, g, or t
  misc_feature (74)..(74): n is a, c, g, or t
  misc_feature (82)..(82): n is a, c, g, or t
  misc_feature (87)..(87): n is a, c, g, or t
  misc_feature (90)..(90): n is a, c, g, or t
  misc_feature (99)..(99): n is a, c, g, or t
  misc_feature (101)..(101): n is a, c, g, or t
  misc_feature (105)..(106): n is a, c, g, or t
  misc_feature (108)..(108): n is a, c, g, or t
  misc_feature (119)..(119): n is a, c, g, or t
  misc_feature (134)..(134): n is a, c, g, or t
  misc_feature (137)..(138): n is a, c, g, or t
  misc_feature (142)..(142): n is a, c, g, or t
ccagagccagcccgccggcacctcgtcaccgcacccgcggactgccccaaggnccncgccgnngtctccagcgnctgcgcancaccnccnccgccgccncngctnntntaggcgccgtnatgacgaccgcgtcnacnnctgnaggtgcgccagaacgaccaccaggacgcagagtgccgccatcaaccgc

SEQ ID NO: 430043 - DNA, 123 bp, Homo Sapiens
actatacttcttgttataatgcaaatggcatattgttcttcttccggcattaacattaatttgtactttctatgacattagctgtataacaatgtgttctgaatctgttaaggagaagtcccc

SEQ ID NO: 430044 - DNA, 330 bp, Homo Sapiens
gaaaaacatttaacattttcaatttattcaacaccaatatagaatgaaataagttttcaagtactatgtattaaaaataaagctactcctcatgccctccataattggaaaactaagattatcacacatgggctaatacatgaaaaaaatacagttttaacattagaaagtttttaaacggggatacaattgtttaaaatatttacttttcatggtattatgaacacttagaaatccaaaaactccaatggccggaatcataatatgcaaatcataaagcagcctaatttgaaatgtttttctagtcatttcaagccatagtctgatttc

SEQ ID NO: 430045 - DNA, 323 bp, Homo Sapiens
  misc_feature (13)..(13): n is a, c, g, or t
  misc_feature (197)..(197): n is a, c, g, or t
  misc_feature (208)..(208): n is a, c, g, or t
  misc_feature (270)..(270): n is a, c, g, or t
  misc_feature (287)..(287): n is a, c, g, or t
ttctccttgcctnacttctcttccttagaacttaggacacaactcaggttttagttattgacttcctccacccctcccctgcaccctgagtccctaattccttcttgttatatatctcctaattctggactcttcccattccagggcagctcagattatgcagggaattgggaacaggtacccccaccatctgccgnataccaaccanggaagctgctcctcagaggagaaaatcaaggcgggggggatgaaaatacaagtgtccctttntgagggggggcttgagnttggaaacccccaaaaaggccccttttcccttggaa

SEQ ID NO: 430046 - DNA, 138 bp, Homo Sapiens
  misc_feature (12)..(12): n is a, c, g, or t
  misc_feature (32)..(32): n is a, c, g, or t
  misc_feature (35)..(35): n is a, c, g, or t
  misc_feature (49)..(49): n is a, c, g, or t
  misc_feature (59)..(59): n is a, c, g, or t
  misc_feature (65)..(65): n is a, c, g, or t
  misc_feature (75)..(75): n is a, c, g, or t
  misc_feature (77)..(77): n is a, c, g, or t
  misc_feature (94)..(94): n is a, c, g, or t
tcgacctcttcngtggcgggccctgaggaagnacncctccagggaggcncgccactacnaggacngccaccccgncngtcctcgtggcatgccncattgcactctggtgccagcttggtgctgatgggggttgcaaac

SEQ ID NO: 430047 - DNA, 147 bp, Homo Sapiens
  misc_feature (14)..(14): n is a, c, g, or t
  misc_feature (46)..(46): n is a, c, g, or t
tcgcgtcaggcggnttcaccactgtgcctggataacaaccgcagcnggcagtgcgtgaggccacggtgaggcctgtcagctgatgctctgctacctatcaggactcctggttccttgccttctgcagctgtcctcctaagatctagg

SEQ ID NO: 430048 - DNA, 560 bp, Homo Sapiens
  misc_feature (65)..(118): n is a, c, g, or t
  misc_feature (139)..(147): n is a, c, g, or t
  misc_feature (402)..(402): n is a, c, g, or t
  misc_feature (405)..(507): n is a, c, g, or t
  misc_feature (529)..(529): n is a, c, g, or t
  misc_feature (545)..(545): n is a, c, g, or t
ttacaggagacagggcctctttctgccccccagtctggagggcagtggagcaaactcttgggttnnnnnnnnnnnnnnnnnnnnnnnnnnnnnnnnnnnnnnnnnnnnnnnnnnnnnnatagtacctggcatattctcnnnnnnnnnaaaagttgagaggtattttttacaggtttggtgtggtaactgtttgtgctaacccattttgtactgctgtaacagaatagaacagactgagtaatttataatgaacaaaaatgtattggctcatggttctggaggctgggaagtacaaggttgaggggctggcaccttgcaagggccttcttgctacatcatcctagggaggaagggcaaagggtgggatgagagggagggagacagaaagaaagggcaggaganagnnnnnnnnnnnnnnnnnnnnnnnnnnnnnnnnnnnnnnnnnnnnnnnnnnnnnnnnnnnnnnnnnnnnnnnnnnnnnnnnnnnnnnnnnnnnnnnnnnnnnnnccaacttatccttttggaaccncttctgaaatacagcnttatctattcatgag

SEQ ID NO: 430049 - DNA, 289 bp, Homo Sapiens
  misc_feature (19)..(19): n is a, c, g, or t
  misc_feature (66)..(66): n is a, c, g, or t
  misc_feature (124)..(124): n is a, c, g, or t
  misc_feature (133)..(163): n is a, c, g, or t
  misc_feature (192)..(192): n is a, c, g, or t
  misc_feature (206)..(206): n is a, c, g, or t
  misc_feature (211)..(211): n is a, c, g, or t
  misc_feature (239)..(239): n is a, c, g, or t
  misc_feature (251)..(251): n is a, c, g, or t
ggattatcttttgaagagnccgaccagtgattttgtacaatgtcccagtttgggtttgctgatgtntcttaggaaagaattacttatgcatttttgacaacaataccactgaagtgatgttgtnccttcccannnnnnnnnnnnnnnnnnnnnnnnnnnnnnnagaaggggctccactgtgcctcctgagtnagtggacaactcantcatnaaccccgccccgggtcaagtatctctcncagctccgtgantggacacagaaaacacacgctgcaatttgatttagaag

SEQ ID NO: 430050 - DNA, 215 bp, Homo Sapiens
  misc_feature (83)..(83): n is a, c, g, or t
  misc_feature (98)..(98): n is a, c, g, or t
  misc_feature (112)..(112): n is a, c, g, or t
  misc_feature (133)..(133): n is a, c, g, or t
  misc_feature (158)..(158): n is a, c, g, or t
  misc_feature (186)..(186): n is a, c, g, or t
  misc_feature (201)..(201): n is a, c, g, or t
agtgaaagctgctgctactcggtgctggagaaatctggtaaaaagccacccattgtgaaaccagatgaaaatccattcatgangattgctattcagangattaatgttaacnatattaagtagttgtctacanccatactatacagtccatcatttcnatcattagaaccattggaccctaaattnctttgggaactgcangcagatgatgcccg

SEQ ID NO: 430051 - DNA, 107 bp, Homo Sapiens
  misc_feature (24)..(24): n is a, c, g, or t
  misc_feature (29)..(29): n is a, c, g, or t
  misc_feature (38)..(38): n is a, c, g, or t
  misc_feature (45)..(45): n is a, c, g, or t
  misc_feature (58)..(58): n is a, c, g, or t
  misc_feature (66)..(66): n is a, c, g, or t
  misc_feature (93)..(93): n is a, c, g, or t
acgcagctcttccaacctgagcanatatnacaggcaangaagatntgcaataactatncccgaggnactacaccattgaaagagatattgacntgtttgaccgattc

SEQ ID NO: 430052 - DNA, 295 bp, Homo Sapiens
  misc_feature (12)..(12): n is a, c, g, or t
  misc_feature (207)..(207): n is a, c, g, or t
  misc_feature (216)..(216): n is a, c, g, or t
  misc_feature (250)..(250): n is a, c, g, or t
  misc_feature (263)..(263): n is a, c, g, or t
tggatttaatgnaagggagctttattcctatgtgcccatctctgagaaatgtgttagcattcccaagtattttacactggcaatctggctacttaagacaaacaaattcaaacaacatttttatattttgactgacaccctcagctcctagatttaagagaaataatggtacttaactatttccaactatagtcttcagtgattganaatgcctcnattttaatctgtgactcctgatataattaagaanaacaatgcagttnaagggcctgacaacactgaaaataaaccagca

SEQ ID NO: 430053 - DNA, 329 bp, Homo Sapiens
acaagtcctgcatgttgcctctgatgggacaagatgactgtttttacctccatatcagtggtttagcatttagctacggtgtataaatgaggtaatgagagggacattcaacaaacaaaagaattccaacatccatccaaatagcatttaagaactgcccccactcccttgcctttagatttttccttcagtgtctgtctcaaatgatggggtcagactgttcattatgtctgatttcttctccccagctccattgcctgtatccattccttccttcttcttagagttggtggtggccagactaagaccagggagggtgctgctgacaa

SEQ ID NO: 430054 - DNA, 281 bp, Homo Sapiens
  misc_feature (16)..(16): n is a, c, g, or t
tgctgaccctcccgantgtaccagactgaagagactgggtcagtaacgcaaggaggtgatgtggacattcactacccagcattttgttcatcgtgcagcttttataaactgtccaaagcaaggttcagaaaaggcaggattttgcaaaaatctcacatcagtttcatctaggacgtgtggacatcacagtgattgggatgatgggctggctgacccttggtggttctcaacaatttccaggatgttgcatttatttatccatggacatgacatcagggggt

SEQ ID NO: 430055 - DNA, 333 bp, Homo Sapiens
  misc_feature (18)..(18): n is a, c, g, or t
  misc_feature (213)..(213): n is a, c, g, or t
gggaattagacagcaganagaagaaaagggagctcagggcaggagggataggctgagcaaaagcacggaggtgtgagcaaggctgggaggtgtaggcagggacagggtgagagctaaggcaccttggatggtatcttgcaggagatggggagctagtgcatgtatttagatggggagtggagctgtcaggtttatattttagagcactggccntgagcagcagtgcgcactggattagaggggaccagacctttgtaagaagagcagtcaagatgtgtatcagttagaaagccttagactgtaagtagcagcaaatccaacccaaaaaggctt

SEQ ID NO: 430056 - DNA, 325 bp, Homo Sapiens
  misc_feature (36)..(36): n is a, c, g, or t
ttttctatctgtaaaatggtcatagcaatgtgaacnatatgtgttacatcctagacttatttttctaccccagtaggttgtattgaaaggaaaatgttatatgtgtttcagcatgttttggtgaatcttcattcccctttcctgcccccttgttttccctcctcaaaggggagaaattagcacaaattagtatcaggattgtgcaggaaataaacatttgtgaaggttaagaaagaggaaaaggaagttatttcttcaacagattaaggatttttctacacacagttcttttgtggcattggccacattgtccatttagaccaat

SEQ ID NO: 430057 - DNA, 338 bp, Homo Sapiens
  misc_feature (183)..(183): n is a, c, g, or t
  misc_feature (297)..(297): n is a, c, g, or t
  misc_feature (301)..(301): n is a, c, g, or t
ttgagaatcactgctttgttgaaaggtatggagagattgagatggaaaaatatagggtagaattaaaacaaaatactttatcataggacagacagtttattatagaaatgggcaagggtgaggaataatgtcaaataagaatgagagagttgggactctagatttccaaaaaaatcaagaacntgtattaaaggtggtaaagctgcagaagaacatcagtttgtacttgtctcaaggggaagcagtagtttcacctttaagaaggagatgaagtgaagggctatactggcatatatnatanagtatttttctacaggtaactgtattgttacttggcg

SEQ ID NO: 430058 - DNA, 419 bp, Homo Sapiens
  misc_feature (300)..(300): n is a, c, g, or t
  misc_feature (332)..(332): n is a, c, g, or t
  misc_feature (375)..(375): n is a, c, g, or t
  misc_feature (381)..(381): n is a, c, g, or t
  misc_feature (394)..(394): n is a, c, g, or t
gggggtcaggtgaggagggagctgggatccagcaagcctagtgaaacccaggggacagtggactcggtcacatccaggatggtgatcaacagctgcatcatcccgcttccttctcaagcgacaattccagagccttggccacacggtgcttgtatctttcgtattcagaccccctgggttccagccccttactgccttcactttcctctcaccccttgactcatctttcctgctacttgtcacttgagatacctaagatgatgtgtgttatggagaggttagagcaccagcttcagaacnaccctgtgactttggcctagtcaacctgacanttctagactttggtgtcttcattcataaaggcagtgttggacngcttgnttgatgttatcgntgaacctgaattccttcttagagtt

SEQ ID NO: 430059 - DNA, 514 bp, Homo Sapiens
  misc_feature (376)..(376): n is a, c, g, or t
  misc_feature (407)..(407): n is a, c, g, or t
  misc_feature (412)..(412): n is a, c, g, or t
  misc_feature (448)..(448): n is a, c, g, or t
  misc_feature (460)..(460): n is a, c, g, or t
  misc_feature (475)..(475): n is a, c, g, or t
  misc_feature (498)..(498): n is a, c, g, or t
ccaagcactttataaactattcccaattttctcaggactatccttgtttcacaagtagggaaatcaaggcactaccacatacaatgatgaaatgagccacagagtatgtctgggctggttcccaggcctgtgcttgcaacacaggcctttatggtgctcttgtaagctgtttggctaatgggggctcacatgaatgcttcccatttcacagtgaggttttatgcttccatgtgagcttaaacccaaggattccaatggcgtctacatgtaaagaagtagccacacccccagcagggagagtatgggtgtaaattgtgcaggtggcagttaattggagtagcatattctgctgggaagttaactgtataagaatctnaaagaaacgttgttatgttccccttcctttnccagnttttaggttagacagtcagtctgtccgagcagttantttttcctaganaaatgccggctttanccttcttttccgaacctcaagcnccattaagagctgtgg

SEQ ID NO: 430060 - DNA, 534 bp, Homo Sapiens
  misc_feature (516)..(516): n is a, c, g, or t
tccttaggaatcctgggtagaaggaattttctggatattcgagtctatcctctagctccaggtcattgtcagtggcccctgaaacatattattattatatgttaatgaatatttctccagtagtaaaaagtgagagctgcacttattgaattcacattatacatcatactttggattaaagttttacctatggtaaatttcatttattcttcaatatatgcctattgggtattatcaacttcattttacaaacgaagaaattgaagttcagcaacattaaatatcatgccccaagtcacacagctattgagccgcttttctgagaattctatccaggcgtgtttatgagatatgaaccacagtccctgccttctggatgtgtgccatattttgcctactagtgaagggactcatttttacatgctccttggtccaaagagtagaaaatggcctaatttcagcaagcaataatgaactgcagtttgtgttaatcatttgaagctgctgataaaattnggggttagcaactcacct

SEQ ID NO: 430061 - DNA, 248 bp, Homo Sapiens
  misc_feature (182)..(182): n is a, c, g, or t
gaaaatgttgagtataaatttcactgatgattaagatctggattcaacatttgttatgaaattgtcattactaataggatatcacatgatgatttagtcattgtaacctttgagtcatgaacactattcctttgacaaacagcatatgtttgtgatagtacacagatgtaaaatttcatttnttcttcccctcaacaccataactaaagtaaaggaaatctgccttaaaagagacattatccagtgac

SEQ ID NO: 430062 - DNA, 287 bp, Homo Sapiens
  misc_feature (196)..(196): n is a, c, g, or t
  misc_feature (242)..(242): n is a, c, g, or t
gggcagcaattttaaaggtactcttaacagctacaaagtcatctaaaacatatttttgaagctttattgcagtgaaatttgttatattctctcttataaatattttggtgtataataaagatatgtgtatgttaagggtttaattcttctcttgatgctttccatagcatgtggaataccaattctagattatacngtataagaattaatatttaaacattgacttgaacaggttgggcttntttcatgaattgtcaagaggctagctagtcaaaaattccaattaa

SEQ ID NO: 430063 - DNA, 453 bp, Homo Sapiens
  misc_feature (324)..(324): n is a, c, g, or t
  misc_feature (382)..(382): n is a, c, g, or t
  misc_feature (411)..(411): n is a, c, g, or t
aatagcctttttgactgagaaggaaaagagaaattcaacaacatcaaagaatgggagtgactaaagtgtgtttttcagctggtacataggagccagtagagagaaaaggttgaagatggagggaagagaagaaccagttgttaggacaaggtgccagggatgttgggaagaaaacagatccagggacatatgatggagggtggacttaactaccctaagatttgagggcaacaaatatttgcttggggcatgggagtgattaggatggtggcttaaggagagtgacaaaaattttagaatagctgctaaagggagaatgaaacnaatgaagagttgtctgcccagatggtgttaagagccctctgaaagtgaaaccatgaantgttcatcaatcatccaatctgccatggnagatgctgcccttcctttgaaagcagccttatttccttccct

SEQ ID NO: 430064 - DNA, 537 bp, Homo Sapiens
  misc_feature (429)..(429): n is a, c, g, or t
  misc_feature (461)..(461): n is a, c, g, or t
  misc_feature (466)..(466): n is a, c, g, or t
  misc_feature (477)..(477): n is a, c, g, or t
  misc_feature (507)..(507): n is a, c, g, or t
  misc_feature (515)..(515): n is a, c, g, or t
tctgtaaatatatgtgctttcctgaccagcctctatcccagagttaccatggctactggtaagttttatcttctttgcaaccattttaacagtttttcttaagaaccaattgttttccttacaatagaagagtgtcttccaaaatagaccctgcgcatatccatgatgacagatcagtagataaactgtataattggcagcaggtaatgttttttctcactccactgtccacactcccctgtaaacaaacaatccacccccatagagagggggcacattttcttaagttctcaaatgtcacaagtatttttcctcccttttcaaagtcactatttagaaaatctctaatgggattttaaatgcttattttagtatatttggccaaggatattggcacttttcttccataaagtatttaaggtttgatcnagacctcacagtgagcactgtgtatgtggttngttcnctttggggctntaatggttaaaaagtagaaatgttagtttnaatgtacntacataaaagtccttggggagg

SEQ ID NO: 430065 - DNA, 611 bp, Homo Sapiens
  misc_feature (476)..(476): n is a, c, g, or t
  misc_feature (506)..(506): n is a, c, g, or t
  misc_feature (551)..(551): n is a, c, g, or t
  misc_feature (560)..(560): n is a, c, g, or t
  misc_feature (586)..(586): n is a, c, g, or t
  misc_feature (593)..(593): n is a, c, g, or t
ttagattagggcccacccaatggcctcatgttaatttgatcacctctttaaagaccctagctccaaatacagtctgttctgaggtacaggggttagagcttcaacatatgagtttcgggggtatacatttcagctgctaattgtgtcttttgcctatttcctagttgattatttattttactgtcaagttttgagagctgtttatatatcttaggcactagtcactttgttgtgatttgcagttattttctcccagtctgtagcttgtcttttccacctttgtattagtctgttctcacgctgctaataaaaacatacccaagacggggtactttataaaggaaggaggttgaattgactcagttacacatggctggggaggcctcacaatcatggcagaaggcaaggaggagcaaagtcacgtcttacatggtgataggcaagaaagtgtgtgcaggggaactcccatttataanaccatcagatcttgtgagattactatctcnctagaatagcatgggaaagaccctccccatgattcaatactccancaattcccnccatgacacgtgggaattatgggaanacaatcnagaagagattgggtggga

SEQ ID NO: 430066 - DNA, 590 bp, Homo Sapiens
  misc_feature (199)..(213): n is a, c, g, or t
  misc_feature (445)..(445): n is a, c, g, or t
  misc_feature (511)..(511): n is a, c, g, or t
  misc_feature (525)..(525): n is a, c, g, or t
gatgagggagtcaagagtatttacaaaacagctgaatagtttaattaaataattaatatttaaacattaaatagacttgagagtaactttaccaaaggcctaagcatgagaaatatgtttgataaatattattctggtctgaaaaccctgagtgggaaaacagaactaattccacctggatgaccttctggaaactcannnnnnnnnnnnnnnaaattaaaagaaaataattccttccaaccccaatgggtttaagtgtgtgttttgtgtttatgagcttgttaacaataaagtcatataaaagtattggttagcagcaacctgattttaaggcgtattggcctcttgtggttcccaagaaaaccttggatgattttgataaaaggtttgggttctgtatatttaaatctagcattaaaaaataaatccatatttatacgatccnggtatgaccaagctcttttaacagtttagacatttactgtatgacatatgtattgggtttaaattnccctaggaaccaantgaaatgctgaatccaattatggagaggttaacaaaggaaaacatgcaaccatgaaaagaattgt

SEQ ID NO: 430067 - DNA, 729 bp, Homo Sapiens
  misc_feature (193)..(223): n is a, c, g, or t
  misc_feature (461)..(461): n is a, c, g, or t
  misc_feature (486)..(486): n is a, c, g, or t
  misc_feature (492)..(492): n is a, c, g, or t
  misc_feature (503)..(503): n is a, c, g, or t
  misc_feature (509)..(509): n is a, c, g, or t
  misc_feature (514)..(514): n is a, c, g, or t
  misc_feature (521)..(521): n is a, c, g, or t
  misc_feature (534)..(534): n is a, c, g, or t
  misc_feature (543)..(543): n is a, c, g, or t
  misc_feature (551)..(551): n is a, c, g, or t
  misc_feature (564)..(564): n is a, c, g, or t
  misc_feature (619)..(619): n is a, c, g, or t
  misc_feature (627)..(627): n is a, c, g, or t
  misc_feature (645)..(645): n is a, c, g, or t
  misc_feature (662)..(662): n is a, c, g, or t
  misc_feature (686)..(686): n is a, c, g, or t
  misc_feature (692)..(692): n is a, c, g, or t
  misc_feature (702)..(702): n is a, c, g, or t
tagcaacgagcctgtctgtaactgagtccctacatttaataataataaaaggagggccttttagtttctttagttgagagtttcaaagtatgtgtgtgttatattttttcacttgggattgatacattgaatgctttttctaacattgagggagaaattattttctttaagcctttggtgattactatagaannnnnnnnnnnnnnnnnnnnnnnnnnnnnnngaaagctaatgtactgttaacaaaattgtttttaaaaaattgtttcttatgtataggattctcaaatggtagtagactccttcaagtctggctttgaacctccaggagactttccatttgaagattacagtcagcacatttacagaaccatttctgacgggaccatcagtgcagccaaacaggagagtggcaagatggattcccagtccacagtggggaaggcccagggcaagctgtngctctttggaaagaagccaaaggtnaaaccnttaaaatcccntatgcnaatcnaactctncttagtaagttgnaaagacgtngatggtanaaatttttgccgnttgagggtaatgccctccgctgaatggtccattaatcttccctattggaaacgtntgtcctgngccttataagtggggatntaccggtttataccagnaattcagttttccattgttttggngcgatnagtttttttntcgccccccggggtctttgggaaagaa

SEQ ID NO: 430068 - DNA, 647 bp, Homo Sapiens
  misc_feature (468)..(468): n is a, c, g, or t
  misc_feature (555)..(555): n is a, c, g, or t
  misc_feature (604)..(604): n is a, c, g, or t
  misc_feature (619)..(619): n is a, c, g, or t
agaaatggaagagcggtgggagaaggcgcgcccagcactgaataactgggtagtgcaggcatgaaattgcccgttcattccaccaaagacttgaaaagaaacaagcaaaaactgttgtaacaaaggaaacacaggaaggttttaaattctctttgagagacattttcaagctaaatgtagtaaaatcctcaattataagtttcatagagcaaagcagtaaagcctttatagaacactagcactcattttttgataaactaactgctatctggagagactaaaagacttgtccaggctcactcaggtttaggatgcagaagctcacctttcctgagcaagtcctccttctctcatctactgcattttggggcgggcagagtaaggaaaatacttggatttaagtgacgcttgtgcaccagctctggcctaccactttgctacttggtggtcataggcagctctcgtaanctcctagatctcaggttcattgctctaaaatgggctgcattgtatctaatgtatgggttattgtaaggattaaatatgtgctacaangcagggtttcgagagcttagacatgttggctatttcacatgtaattccnccttaagcgccatcngattccttttaaaaccggtttaaataaa

SEQ ID NO: 430069 - DNA, 604 bp, Homo Sapiens
  misc_feature (93)..(93): n is a, c, g, or t
  misc_feature (95)..(95): n is a, c, g, or t
  misc_feature (133)..(134): n is a, c, g, or t
  misc_feature (138)..(138): n is a, c, g, or t
  misc_feature (142)..(142): n is a, c, g, or t
  misc_feature (158)..(159): n is a, c, g, or t
  misc_feature (544)..(544): n is a, c, g, or t
ctacatgctcggagagttcacttagctatttagggatccagagtctttccaaggttgaccttggaagctctgatcactttcgtattttgagangnggaaggcggagaaggaggaggatatgggtacagaaggnngggnaganagaggaggaggaaaannaaataatgctgatgggtgctacaaagctttaaatattcacatgtaataaaataatgttagcatataaatataccatcccatctgtataattacaacatttacaagataactgcagagtttactgaaaatattcattgatggtgtgttgtagacactctggatgaagaatgggacatggatttcaagttgtgtgataaacatctactttcagtcctattagtgcctttacttcatttgcaggacatatttgaatttcaaacttaacatcttgtgtaaatatgagactggggccaaagacccagctttttccactcattctcctttctcctgtgacaggcgctggacacatccacctctccccttaatctgtcttaggtccatgtangtaaactgtcacacagtgatctgatcccacttgtgcaagtgaagctagattcttcagccc

SEQ ID NO: 430070 - DNA, 452 bp, Homo Sapiens
  misc_feature (354)..(354): n is a, c, g, or t
  misc_feature (388)..(388): n is a, c, g, or t
  misc_feature (394)..(394): n is a, c, g, or t
  misc_feature (438)..(438): n is a, c, g, or t
ggaaccacaattgaagacaagatttgggtagggacacagccaaaccatatcactgacctaccaagccatgaagttgggcatgcacagcagcactccatcaccaaatgaaagtggtgtattcatgatccagtttaagcagaacctaaaggcacaaataagttacatgaagaagtggcccaaatgtccgtggtccccactcccgctacactgccttctctctcccagcctgcacctatggtgtcatggagagatccccctaattagttgacaactcaggcctagtttatagatggtgtgcacaatataaaggctggtgccacctgaaagtggacaactgtagcacgacagttcctntctgggacatccctctaaagcacagcggtgaaanggaaantcctcccagtgggcaatacttctggcagtacacctggttgtggnactttctaagaagg

SEQ ID NO: 430071 - DNA, 310 bp, Homo Sapiens
  misc_feature (111)..(162): n is a, c, g, or t
ttgaggttttctttcctttgatgcagatgcttgggtttccactctggctgcattgcagtcggctcccagccctgccggcgtgggcacagaggccagaggggctcacttggnnnnnnnnnnnnnnnnnnnnnnnnnnnnnnnnnnnnnnnnnnnnnnnnnnnnctcgtgattgtagtgatggcttcaaagacacagagtaagtggaggagtgggctgctggtctactgggcactctacttcctgttgcaggataactgtaaatgtatatattttaattgcactggtctagaccactgcaccaacagcctct

SEQ ID NO: 430072 - DNA, 346 bp, Homo Sapiens
  misc_feature (116)..(116): n is a, c, g, or t
tttatttttcaagcagaagttacattctcgtatcaatatgacattacattatagtgctgctagttcttcagggatatgattgattcctatagtagggtggatataggagccttagnagtgatgctgtatctcaagtgactaagataagatacaggcagctcactgcacagagagccactagccagtttacctagcatgacttacagagcagttttcaccaacactgtacttagactggcatttttagtcctacttttaaatttgaaaagccaaccagtggtcaatcaggaacacattcaatcccatatatttgtaatatttatcttactttatggcaggaattcta

SEQ ID NO: 430073 - DNA, 319 bp, Homo Sapiens
  misc_feature (241)..(251): n is a, c, g, or t
gaaatcataaagatattaagttataagcatggatttctctgtagagattatctgtactggcgagtctgtgattaggaaatgtcagtttttgtttgttttgcccaagtgtatttcctagatttggtctttttcttgaacaagagtgctaagcagaatctctgattctatattgaaatccaatttttgatttctttgcacaggtgacttattctctattctagattagccctaacagattgannnnnnnnnnnaacccatccacctgcctatttcttctgtggaatgtctgtctctgaatatgatcattttaaaattaagg

SEQ ID NO: 430074 - DNA, 263 bp, Homo Sapiens
  misc_feature (90)..(90): n is a, c, g, or t
  misc_feature (132)..(132): n is a, c, g, or t
  misc_feature (143)..(143): n is a, c, g, or t
caggcccgccgtcccaggcctgcaggaaccccggcggtccccggcctcctccccgccgcccggtgagcctcgttaccccgagccctcggnttctaggcccgggcccttctggttgtgtggcctgagcggacnacgaagtggcngcttggtgaaggccgacgagagctgtccagctcccccttaaaaaagagtcacttcctaactccccgcctggattgccgaaactccttgcaaagactcgggccagcctttcagcttcccgc

SEQ ID NO: 430075 - DNA, 298 bp, Homo Sapiens
agcgacccacaaataacaaatttggtgtagtctattaatgttgtgcattataaaggatgcacctctatgtttgagcagtttcttggttatcttttatcctcagcttgatatatcctgggacatctgaaaagagctgcttgcaccacactagcttgcaggcatattgtggcacttttatccctggattccctgactgttgtccgtatgacacagtcaactgtgagtgcttccatccctacgcaggtagtcttggcctatatatgaaatcttgctgtgcattgtgccaatgaatgaacca

SEQ ID NO: 430076 - DNA, 309 bp, Homo Sapiens
  misc_feature (153)..(153): n is a, c, g, or t
tcctgatggggcctgttaccagggtgggcactcatgctttctcttgagctcgatttaaagactcatcaaaactcttccccctaaagttttatattgaaccttagaactgaatcacctctaattgaattgaacaagcagccaataacttagccngttctttgaatccagtttcccaggtgttggaacagactgctgtcctgtgtgctgcagagtctgtcccttgttggcacttaggaagatccagtttctccctcactggaagtctgcacttctcaagcagaaggattaagcctctggggttgcttgcag

SEQ ID NO: 430077 - DNA, 121 bp, Homo Sapiens
  misc_feature (81)..(81): n is a, c, g, or t
tcacaatataataggtatgctataaaattcaacacactctaaaattcaaccaatttgttactttactcagaattgtgaggncatcaatacacaacttatttatagaaaacttcaattacac

SEQ ID NO: 430078 - DNA, 123 bp, Homo Sapiens
ggtttctgatgaagagctacctgcaggctcaagtgtccccaggatccataccacagaagcctctccctcagtccgtcatgtatctcgccacaccaaagaccagccaggtgcccagcccagaca

SEQ ID NO: 430079 - DNA, 141 bp, Homo Sapiens
  misc_feature (47)..(51): n is a, c, g, or t
  misc_feature (59)..(59): n is a, c, g, or t
  misc_feature (67)..(67): n is a, c, g, or t
  misc_feature (72)..(72): n is a, c, g, or t
  misc_feature (74)..(74): n is a, c, g, or t
  misc_feature (78)..(78): n is a, c, g, or t
  misc_feature (81)..(81): n is a, c, g, or t
  misc_feature (89)..(89): n is a, c, g, or t
  misc_feature (93)..(93): n is a, c, g, or t
  misc_feature (97)..(97): n is a, c, g, or t
  misc_feature (115)..(115): n is a, c, g, or t
gagaaaccagcaggcttgaaggctacaagtgacgaggaagattccgnnnnnaatatagncagagganaagangntggnganaaaactangagngtgncttctcggaaaaaaccanccttgaaggtacaagtgatgagaaag

SEQ ID NO: 430080 - DNA, 251 bp, Homo Sapiens
ctagttactagtgatatagtgggcaactatgttctggttctcaagaatattcatagtcaataataagcataacatagtgataatatgatacttagggagatacataaggtcatattctggcatactctggagagagataccgtaatcagccttgaggtgcaggatgtgatctgtaaactgagacctgaagtatagttagaccggtaagaggaatgaggatatatatggtggttaataaaaagacattccgg

SEQ ID NO: 430081 - DNA, 649 bp, Homo Sapiens
  misc_feature (16)..(16): n is a, c, g, or t
  misc_feature (490)..(490): n is a, c, g, or t
  misc_feature (502)..(502): n is a, c, g, or t
  misc_feature (569)..(569): n is a, c, g, or t
  misc_feature (579)..(579): n is a, c, g, or t
  misc_feature (584)..(584): n is a, c, g, or t
  misc_feature (594)..(594): n is a, c, g, or t
  misc_feature (614)..(614): n is a, c, g, or t
  misc_feature (622)..(622): n is a, c, g, or t
aagaatccatagcaangtactcagctctggcttctgaacaataggttagacaatgagaagtcctggctgttttagtttctaatgtaaatagggtcccttagtaaaagtgaattcagtcttacttaggatggattgggtaactacacatgagatggcttttacctttgctcaaacgagcgtttgggatcatctttgaggaatgaaaagcggtcgtgcattttcatcaggaaaagatacaagatgtgtataacatttggaaatgtgtctgaggatgaatggaaatgttctcattttattgaacgctaagaacaacaacaaaaaagaaatgtagggtgctactaaggatcttggatgccaagagatattttaaagccaatttgtaaaaacgataacccgtaaattctatttaaaattggaaaagtaggaccagaattttgaagtaagccagtttatctttagaatgatattgtgaaattggctttaaatatancattccgatccnatgtatttatggagtctaattcatagcctgttactgtcattccacacaggctaaaacgcctctatangataaatgangtacncttcctactngtgtggcttagagtgtcccnccaagggnctattatgacctgatgttgtagcatgt

SEQ ID NO: 430082 - DNA, 161 bp, Homo Sapiens
  misc_feature (139)..(139): n is a, c, g, or t
caaagtctcctctcctcccattcaaaaacaagtttattttccttctgcattgggaatcttgtcccagagatctaaagtaccttagttttgtgtatctttctcccgctttctggagcactcctagaaatattggttgccnacagacttagaatctgtgctta

SEQ ID NO: 430083 - DNA, 213 bp, Homo Sapiens
cctgatgcggtcccgcacagcctctggtccagtgtcacatccctggagggcacccgtagccgctcccataccagcgagggcccccgaagccgctcgcacaccagtgaggggtcccgtagccgctcccataccagtgaggatgccgtctcaacatcaccccaactcgggtgcaccggaaacaatgcgggccaagttcattgaggtgtctgtaaa

SEQ ID NO: 430084 - DNA, 505 bp, Homo Sapiens
ccggcaacgtacaccttttttattaaggggcttctattgtgttctgaagttccatctctgtgacaacattaatatactttaaatacctgggatgtggtctggtacatacatggtggatgctgtgtgtgtattatatatactactatattatgaacacctgagtcatggaagtccttgcaaagtgtgccttaaaatcctcaacctttttaacttttctcatacatcgaagtcagtattcttatgaaggcccccatattgaaaaaagtcaccttgtcctgagaggttgtagccatcatcattttccagcggctgccatcttttattctgggaacgttttctgggttcactgacatcattactttgtactaagttttcctcgttgcttaaaaggctgctctgtagcaacaactgtctcatcccttcaaagcttttccaagcagtttagctatttgaaaagggggctttctaacttcatcttttcaaaataaactgctgggcatgcgtt

SEQ ID NO: 430085 - DNA, 458 bp, Homo Sapiens
  misc_feature (388)..(388): n is a, c, g, or t
  misc_feature (398)..(398): n is a, c, g, or t
  misc_feature (426)..(426): n is a, c, g, or t
tgaatagtactacccgtgctggtcctcttgctatgacggcaattactgggtatttatcccaacaaaagtagatacagtagatgtcttgtaaaacaatagtgctgtgtctcaatctatgccactaggttttaaagaattgcaaaggtagaatgaacaactatttcataccaataagcagtcaaaaaataaacatacaccagatggtgtcatggaggtctccctggtcagcattctcccctcctgtctagcttgaagatataacagggctaagcttagagatgggggaggcattaataaaggtgatttcttataaagtagtaacttcccaccctgaagatatattgctggaaacagggaagtgtttataatgaacctatatctgaaagcngagaaacccntgcatcatgagtgttaagaaagaaatcngtacaactcttctatttccaggatgaagatct

SEQ ID NO: 430086 - DNA, 478 bp, Homo Sapiens
  misc_feature (463)..(463): n is a, c, g, or t
tctcactgagcctggagctgggcagcaggagcatttcttgtgtctgtccccccagtgctgagtatagagacactctagaagttggctctggttcttcctcccagcatcatgttcccagaaataagactcagactcaaaatatatttacaaatgccttagccatattgctaagctcttttctggctagatcataactaaagataacccatttattttaacctccattctgccatgtgggtgcttacctgtgctgaggtaccaagcacctgtctagttacatcttcctgggcaaatctcctacctctggctctattccagaatcctttctgcctcctggatgtccctccttgcatttcctgcctaagtcacggccatgagccttttgattgaatcggtacaatacagaaggtatcttctccatagataactcagtcattcccagcttcttattaatagggaatgnaacttgagtcctatg

SEQ ID NO: 430087 - DNA, 264 bp, Homo Sapiens
  misc_feature (178)..(186): n is a, c, g, or t
atgaaccactatactcagccactatccatactgtattgtacttctttatgtccatgtttacctttcccctaccagcctgatatccaaacttcctagagcttataaggaggcagttggtaaatatatgttaaataggtaaatatctatttgttttatctccagacagtgagatcatcannnnnnnnnctaacttaatggaatattttaggccataacatagacttcattttaattctacaagcaaaaccaatagaaccatttcaa

SEQ ID NO: 430088 - DNA, 441 bp, Homo Sapiens
  misc_feature (385)..(385): n is a, c, g, or t
tcacttctctttagtcttttgataagctggtgaggtgcttttgcttgttccttaggaggggatttagtagatgctactttataagcttctttaactgtaaaatcctccttcattgtcaagtactagtaagcactggtgattccttgagatataatttcagaaatgttgggataaggcaccatgtctacatttcttggttaacaggcaaatgtggcacccagaggagtggcctaatagccagttaccaataatatatcctgttaaaactcccaaagtactctgctttgtgttacagttgattattaagagtgcaactgttggctttttatgccttgaaaaagtgcaatcatgtagaatgatgatcactagatggtgaatgactganctgaaacagtgatattacgaattccccatgtgcacaaattagagaggtcaggtgta

SEQ ID NO: 430089 - DNA, 288 bp, Homo Sapiens
  misc_feature (69)..(83): n is a, c, g, or t
ctcaggaaaccttcagtcatggcagaaggcaaaagggtaagcaggcatgtcttcacatggtggagcagnnnnnnnnnnnnnnntgaaggggaaggtgctacacacttttaaacaatgagatttcatgagaacatattcactatcatgacaacagcaagggggaagtccaccctatgatccagtcacctcccaccgggcccctcctccaacattgggtattacagtttgatatgagatttgggtgggaaccaaatccaaaccatatcactggtttatgtataaaaggga

SEQ ID NO: 430090 - DNA, 152 bp, Homo Sapiens
tccccactctagttctgaatttaaagaaagaaaaaggtaggttagcaaatataggtatcagttatttctattgacagatcatttggagaacatgtttttgggcgtgggagaaaaaagattcctaactctccgccccagaaataattttgctg

SEQ ID NO: 430091 - DNA, 230 bp, Homo Sapiens
tgagaaccactgttctggaagtttttcaggactaaagtagtttgctgtggagaaagccaattgggatttcaagtgcgatatttcaaaggacagtattaaataccttgaagtggctttttattatatgcaagacaaagtctagaatcgacccacagttctctttaaaatatcctattgtactaatctgcagaatggaacctctgctttaccacttctgggcttttgttcat

SEQ ID NO: 430092 - DNA, 375 bp, Homo Sapiens
  misc_feature (30)..(30): n is a, c, g, or t
tactacccatggaggcattggccaatgctnttagatatttatgtctatgtcctgctaccaggacccttgttgatgttcccgatacaaaagctgttctataacatttgatgctcatactcaagatgattcagattcaaccagaaaggctcagactgagaaatcagcagttatttgcttttgtacactatgtgcctatgagatgaagtgcaaaccaccaccaaccacaaacacaaattcctctcccaggaaccactgagtctttactctcagaaaaatccatgcctctacctttgctgccattatcaggcatggcctaagaatctcacaacaggctgtggctgaagtttatttaatctgcatgctatagaggtgttt

SEQ ID NO: 430093 - DNA, 415 bp, Homo Sapiens
  misc_feature (221)..(221): n is a, c, g, or t
gaaatatagtaatattggttccttatcagggcagcaagtggttcttccactggcaaacttttccgatcacccaaatcaccggcacaaaggaacattgttggaaagatcactgatgctttatgatgtgcttgagacatcactgaagaacataaaacttttatattagtctagaatatagccagtttttatggattctaattattacagaggcctgatggccntgaagaagataaaagttggactaactgccatcatagaacattttttgctaagctgcatcagtatctacaaccaagttttgctacttagaaagcactgtctaattatacacagacaataaactagaaagaattacagcaagaaatccagagaaccttccaggatattgtcagagtgtggccatacaccatcaagc

SEQ ID NO: 430094 - DNA, 315 bp, Homo Sapiens
  misc_feature (203)..(261): n is a, c, g, or t
atgatgttatctcaggggacggaacccaagtctaaacaagaaaaccatttacgtttctgatacactttgtacacatagcctgagggtaattttctacaatattttaaagaattttgtgcatgtaacaaagctttgactacgttttgactgtgacgcatcaaatgaggtccggtgtgaaattttccacttgggtcttgtcggtnnnnnnnnnnnnnnnnnnnnnnnnnnnnnnnnnnnnnnnnnnnnnnnnnnnnnnnnnnnttcagaagggttgcggcaatatatgtcacaaggtggtgagggtctggaatagaa

SEQ ID NO: 430095 - DNA, 333 bp, Homo Sapiens
  misc_feature (228)..(228): n is a, c, g, or t
  misc_feature (264)..(264): n is a, c, g, or t
  misc_feature (286)..(286): n is a, c, g, or t
  misc_feature (313)..(313): n is a, c, g, or t
ttttttcttttgaggccccaaaatacagttatagaaagtttgtgaaaaccgctttatatgaggaaatggttatatcttcaatcaccaacaaagaaataaacaaaggatttgagtgctggaagagccatcatacataattcattcaatatctacttgtccatcagttatttcctaaaattgagagagagcttaagtttaatgttttgttatctccctcactcttctttnagcactaggaactttccatccttataattatttcanatatgccacaacattaattacnatcaaacagttctgtatcctaatcagntctttggactcagagcaccc

SEQ ID NO: 430096 - DNA, 155 bp, Homo Sapiens
acttgcttaggtcagggtatggattaactgtgcaccaatttcttctcagaagggagaaaactttaactgccatctccactttacgcctgagttgctttaagattagcctttggaattctcaagcaaacaccgtagttagatatatgtatagcaag

SEQ ID NO: 430097 - DNA, 427 bp, Homo Sapiens
gtgtgatcttctactcaccaaatccagaagtaagaccagggcagtccagtcaaggctgcccaacacctgccatttccatatggttcacccactgctgaatttcccacatggctggaccagagacatgtatgggcactttggtttggacaaaccacacaccaaagcaaatgcatactgacatacatttaatttgagcatgttctgaatgttgtctgacaccatgaaatacctgttcttccagggaggtcaaggaaacggctgtagcaaatgcaaggaaagggcttcccattgccctccttagagagaacaggaggcactgataactcccagcaacaagacactgtctacaagggattatttcctctgtgatatcctaagcactgcaccacagagggttaacttctgaagcagtataagagggaagtag

SEQ ID NO: 430098 - DNA, 416 bp, Homo Sapiens
tttctcagcctttggtaactatcattctactctccatctccatgagttcaattgtttcagtcattagtcccacaaatgagtgagaacatgtgaagtctgtcatgtagacaattttgagacacattctaccttgctcctagctcaataacacacttgcataagctttcctctattcctcttatttcttgcctgtttcccactccttttcattcactttacaaaatagcatatctgtattcaaactcttgtctcaggctctgctttctagggataatccatacaaaatcatacaatcagttccctttgacatgaagtaaatgcaccgcattcagctgatcccaaactacttcttcaagtctgtgggcagcccatggtttacttacagcttctctctcctgtctttttgtgcctggcag

SEQ ID NO: 430099 - DNA, 388 bp, Homo Sapiens
  misc_feature (175)..(175): n is a, c, g, or t
  misc_feature (378)..(378): n is a, c, g, or t
ttttgaagttttagtaaaagaaattctgtagattacattcccaagaacataatgcttacacaaaatgtatattccacgttttaaagcttaattgtattttactttacatatacacgttcagttaacatagagcacttagaatctatttggtatttttgatttctcaaagtaaaanaaaaattagatttttaggtttgatatggttgtgtcataatcatctcgtaattgacaattttaacttttggcaataaaaggaaattgggatatctttggaactgtaaaacctggtttaatctttttctttctaagactccttgatagattggataaattaaaccagtatcccagagaaacctaaaagaaatgggccattttaanttgcctaatt

SEQ ID NO: 430100 - DNA, 338 bp, Homo Sapiens
  misc_feature (120)..(120): n is a, c, g, or t
tacaagagttcaaatcagcagagactgctgttgtgaatgcttaaagtaggtgtggcagcacgaacgcacagaaactgaccactcctggtcaaacaatagctcccctgacattgtagaccntgcggatgaacccaccagatttgtttctcttattactcatccatctccagcctttttgtgtattcacgttccaggatgggagagaagcggaagtaattttctgcttctttaaaataccaggtgcacagaataaatgcttgccaccacactaatgccccctgctgatatgcttactgttggtggcctaaaatttggaacatactgtgcttttaagaact

SEQ ID NO: 430101 - DNA, 242 bp, Homo Sapiens
  misc_feature (126)..(126): n is a, c, g, or t
  misc_feature (130)..(130): n is a, c, g, or t
cgcgtaccgaatctttaaagaacatcagataatcaatgtgatcggtgtacaacgaatcctgaatgctcttctgatcatcatacaaaacgaaagctgttttcggtgccacatggctgcccctaaatntagnacctttccggcacatcaaagctgacaccgccactcagcagcgttgtcaatgagcccatctccacacgcatcccctgctgacgtcagatcaaccggcaattgccactaatctt

SEQ ID NO: 430102 - DNA, 372 bp, Homo Sapiens
gccgttgacacctgctgggaacatctagaagaatgcttcgtagagggcagagcagtcggcactttgaaactacaggggttccacttaataaacaagcaatctaatatatgacctctgcagattaattttctgagagcaagcaaataatctggattcaaattttccctgattatgcatataattacagtatcacttaccaattaacacattgatttaaaccttcttgggattatgtatttcagagtataaaagagatcatccaaacgctcaatgcctctccagtttggcaaagaatcacatggaatgcaacttcccacccatctgatttctcttatggaagaaaaaaatctgtgatggtaacagattacagga

SEQ ID NO: 430103 - DNA, 152 bp, Homo Sapiens
tgacaacttgcgcccggccaaccacagcttttaaataccaaaacacaagtcataattaccagttttcctataaatggaacagtctttctactgttattaagaaagcttacctctttcccatgaattgcttactgaacacatgaatcagtatg

SEQ ID NO: 430104 - DNA, 360 bp, Homo Sapiens
  misc_feature (277)..(277): n is a, c, g, or t
  misc_feature (302)..(302): n is a, c, g, or t
  misc_feature (315)..(315): n is a, c, g, or t
  misc_feature (328)..(328): n is a, c, g, or t
ttgttttttagtgctggcccaaagccagtccagcactgcctcctctgactctaaaatcagaagagtcctgagaaaacgataactaagatggaaatatatttgcaaactcatttcattcattcctttaacagtttttactgaatgcctattaggtgcaatgtactcttctagaaaatgtgatcttgacccttgtggaattccatactggaattacttaaaagccacacaaataaatataattccaaacctaagttaagcaagaaacaagtgctatttngtggtaccactgccattttttttcnaaggtaaaaatcnatattgatgcatncatcagttttctaaatttaaatatttttttcc

SEQ ID NO: 430105 - DNA, 350 bp, Homo Sapiens
gtttttaatttttcccaattaccaggcatgcttctgattcactaaaatggttaacaggataaaaaaggaatgttccaagtaagttggtcaagaggagggctagattcacagcattaaaagcaccacgttaagcaaatatagcaacattattatttgtaaaaacaatctaggcgtgtttatccggattgttacacaattcctttgggttttgtgtctgaaaaccttctaagtgtgggaaaatgtaatacaagctatgctctacaatgctgcctaattgcttaagcgcagtacagtcagcatttctgggcaagggagacccacctcaaaggccatccaaaagtcattggaca

SEQ ID NO: 430106 - DNA, 362 bp, Homo Sapiens
  misc_feature (148)..(254): n is a, c, g, or t
  misc_feature (269)..(269): n is a, c, g, or t
ttttaaatttaaaaaaatgcccaagagcagatgactttattggcaatttccattatatactgaaaggagaaataatatgaattctttacagattcattcaggaagaagagacactttacagctcattatatcagtccagcattattcnnnnnnnnnnnnnnnnnnnnnnnnnnnnnnnnnnnnnnnnnnnnnnnnnnnnnnnnnnnnnnnnnnnnnnnnnnnnnnnnnnnnnnnnnnnnnnnnnnnnnnnnnnntgcaatatgaaaaanataaatcattaccaaataagaattatcccaagaaagcaatgttggtttgggaacagaaaatctattagtctaatacacaattattaaccagga

SEQ ID NO: 430107 - DNA, 296 bp, Homo Sapiens
  misc_feature (215)..(215): n is a, c, g, or t
  misc_feature (242)..(242): n is a, c, g, or t
  misc_feature (280)..(280): n is a, c, g, or t
gtatatatgcaaacttgtagatttcagttactccctagtcacacagaggccagaccacacactagcccctgtatctcctaggcatcaagacattaaaatgctgctggccacagtgaccatccatgggaaatgaagggaatacctgatgggaggcaaagtgcagtttttctgaaaatgtggagctgcaagtaatctaagcctttcaagcttgtcanaaagttgagggattcaagaatccacantgtaagttgaaccaggattttaccctaccaattgggancctaaaggaccgggat

SEQ ID NO: 430108 - DNA, 304 bp, Homo Sapiens
  misc_feature (61)..(61): n is a, c, g, or t
  misc_feature (187)..(187): n is a, c, g, or t
  misc_feature (193)..(193): n is a, c, g, or t
  misc_feature (267)..(267): n is a, c, g, or t
aaaatctatttttgatccagcttttattgttctgacatgaagggatacaagagctggtaancataatcttactcattaaggctgactggatggagatgcacataatcgtcacatttacattttaggataaaatctcacagatgttggataaatagaactgaaactaacacatattgaacatcaattntgtgcnagtcccatataatgaaatttatactcatgatctcaattaaaccactcagagttctacaaattagatagccattnggtatcttccccttaaaaaaatatggttaaaaaatta

SEQ ID NO: 430109 - DNA, 434 bp, Homo Sapiens
  misc_feature (153)..(153): n is a, c, g, or t
  misc_feature (304)..(304): n is a, c, g, or t
  misc_feature (306)..(314): n is a, c, g, or t
  misc_feature (328)..(328): n is a, c, g, or t
  misc_feature (353)..(353): n is a, c, g, or t
  misc_feature (392)..(392): n is a, c, g, or t
  misc_feature (398)..(398): n is a, c, g, or t
  misc_feature (413)..(413): n is a, c, g, or t
aaggctttaattgtattggatggccctgccgatgaccaaaggctgccttatgaccactgggaccaccactctcataacagagagcaggggttgggtgtgcaggtcagagccacagcaggccatggaggtccttcttgtgggaccctggtcagnagcagtggtactcacaacacccaatagccagcagacttctttatgtagaggaagtcaagagcagcctgttcctcaggctatggggcagtcttcatgaaagacctgtgggatcaggcagggcaaaactcaaactagcagcctccctaggggngnnnnnnnnncccttcctgctccnaggtggggagtggcttagatcctcnttgggaaggtagctgaggtgatctggggggcattgttcnaggtgnacttgaggtggcagnagggtgtgagacatcaggggg

SEQ ID NO: 430110 - DNA, 398 bp, Homo Sapiens
taggaaacactcaccaaatagcatttcactggcatttggaccactcaggacaggtgggtacaggggtacacaggtgctctgggggtgccccacttttcccaggaacttcaatatgtcccaaagaggagagaggtgggggtagggcgggacttattgttcttggtgaactcttgggtttatgcagtgaagatttcttcacacattccaagtagtacttacatactgtgtagcaagttcagtttgtaagaatctatttaaaagatgtcaccacacgtgtcagaaaaaatattcttgcaaggaaggagttagtcatgtttcatattgcaggcaatttggaagaatgggatttggattacaggatatgagtgcaatacaaatgtaattgtttggaggtaatt

SEQ ID NO: 430111 - DNA, 393 bp, Homo Sapiens
gaggttgcaaagaatatttctttttattcagaccttgtattctctacatgatgaaaggattcttggcacatagttggcaattactatctaggttttctgcataacataggttttttaaactaagcttttaactcaatagacatcaggctccaatgaaaatacatgtggcctaacacgagcagaaataaacacaattctaatcaacttaactgttgacaaaagcatgtggtttcattgcttgcggccaaagttgtaagagtggactctgatttcttgcaggaacacccctcatttatgtgtgcaaatagggtaattaagtgtccaattaccagatttgcattggcaaatgggggctttgtgtgggtaaaattctccatggtttgggaccagctg

SEQ ID NO: 430112 - DNA, 423 bp, Homo Sapiens
cttttaattttcaaagtgtattttttgttccctgatttattatcacccagagaggaaaatgaaatatctgacattaaaatatactttggtagaaagtgtagtggaggaaagtgttagtattccatgatgtgtatgtatcacattatctggatccagtttgtcattgctggacagttaggctgatttcacgtcattcatattgtgaatagtgctgacgtgaacatatgtgttcatgtgtctttatggtagaataatttatattcctttggatacatatccagtaatgggattgcttggttgaatggcatttctgtctttaggtctttgaggaatcaccacattgtcttccacaatggttgaactaatttacgcccccaccaacagtatatgagcattcctttttctccacaaccttgccagcat

SEQ ID NO: 430113 - DNA, 120 bp, Homo Sapiens
ccgaagcaagaatggtttattcggatccttgttcagttatgttttgagctgacttttggtcatgggtcccatgatgtattctgaagttacatcgaaatacaaagcccagtgataactttg

SEQ ID NO: 430114 - DNA, 414 bp, Homo Sapiens
ttcaaacttctaatttccctttaatttgtaggttgaaccacaggactgccctgatttcccaggctcaggcacccttctttgacggggcaggcctgctgcagcccttctcaaactgagtcctgcattccctccacacccaggggctggctgtgggcataggcctggaggtgccgtgaatggcagttttcagacaaggggtgtttatctgcagtgtggtacaaagacaaacgagagagacaagagagacgcacaaacaaagagcctgatcttctggtctgcggactagaactgttccgacagcaattcacatagtctctgagagacggtgtctttgctggtacgcaaggtgagtctatacatctgagcttgcaggtttggctccaggcgcaacaagcagccaatctggggtggttt

SEQ ID NO: 430115 - DNA, 429 bp, Homo Sapiens
  misc_feature (276)..(276): n is a, c, g, or t
  misc_feature (279)..(279): n is a, c, g, or t
acaaatgctgaaactaaagttcaaagagtttaagtaaggttatgaaaagtcactaggctattagtgacatagcttagttctgatatctggctccaagacccatacttttttccaccaaactatggtgctaaaattaacaacagtaatttccactccacaacactgttactttggaataggaagaaaaagttgtgtaattatctggtgagaacaaaacaatgtatgaacctaggccaactctattctcatattctcagactcgagaatttctagaanaanataataaatggcaaacccaaatttaattttaaaatgacaagagccacaaattggaaagacccttcacaatgctctggtcactaagcttgggtgtggacatgggtgacaagcactctccaattctagtgcagctttccaaaaagcaatttg

SEQ ID NO: 430116 - DNA, 533 bp, Homo Sapiens
  misc_feature (84)..(182): n is a, c, g, or t
  misc_feature (190)..(190): n is a, c, g, or t
  misc_feature (481)..(481): n is a, c, g, or t
gctcaagcagttctcttccctcagcctcccgagtagctgagaccacaagcacacgccaccataaccagccaatccttttaattnnnnnnnnnnnnnnnnnnnnnnnnnnnnnnnnnnnnnnnnnnnnnnnnnnnnnnnnnnnnnnnnnnnnnnnnnnnnnnnnnnnnnnnnnnnnnnnnnnncgcgtgancaccgtgcgtgccctgccttaacagtttttaagtgtgcagtctagtgatattaaatatatttaaaatgttgtaaaccatcactaccatctatctccacaactcttttcatctcgtaaaacaaaaaacatatacctattaaacaataacttccaacccctctccacccaccccctggagaccaccattttactttctgtctcatgattttgactatgctaagtaccttctataagtggaatcatacaatattttttgtgtgtaactgggcttacttcatctagcataatatncctaagggtcatccatatgtaatgtctgaaatttttgtttttaaggcgataa

SEQ ID NO: 430117 - DNA, 591 bp, Homo Sapiens
  misc_feature (190)..(190): n is a, c, g, or t
  misc_feature (572)..(572): n is a, c, g, or t
tcatatgcagagaattttatttgttaagcatactgtactcagagtcaggccaatcagaaataatataagaaaagaaaaactggttaactctttctatctatattagtctaaggagtaccagggctaacaaatcttgatagtatgctaatttgttgtgtttcaaaacttgctctttatcctgttgcgaaantgaattcaatagaaaaatgattatatttttaaaataaatgaattacatgagcccacagcactgattttaaagtaggacttgcattgatacagtttattgaataaagcaaaaatttttacaagtattttataagtttaaatagcaaattgaaattgtgcgaaatagtgattttgtgattattaaacattcattgttttaagagtgctgtaacaaaaagtatctgtagttacctacactataatagttaaatacctgttaatatgtataagttactcacatttgtaaagttccacattgtcatgtgtgtcattatttatttaactccttttaggaaaatgaagccatttaaattagcattataaataagtgatggggatcagcnggggcatgaggccaccata

SEQ ID NO: 430118 - DNA, 403 bp, Homo Sapiens
atgtgtgccaccacaccacatagtccctctccacagagatggttgagaaggctgatggaaaagccagatacttgttctacagctttccctgacactagtatatcatccacatactggagcatagatatacactttgggatgctcatcttttctaacacctcctcaagaatttggccaaacaagttaggagaatctgtaaatccttggggtaagactgtccagcagtattgttgttttcacccagagtgagaatcttcccattcaaagtgaatatatccaactatcttcagctaaaggacatgccagaagcatctttcaggtctattctgtaaccatgatggtcatatggaatttgctgagatagatatggatggaacacaggtgatggtttacatttgtaatg

SEQ ID NO: 430119 - DNA, 512 bp, Homo Sapiens
  misc_feature (440)..(440): n is a, c, g, or t
  misc_feature (471)..(471): n is a, c, g, or t
  misc_feature (486)..(486): n is a, c, g, or t
aacattcactgaatgtaatgagccagccttttgccaagacaagttttacctgcttattattttataaatgtctctctgtatacacagtattggcaagacagcatttcactggtttttcatgctgatatagaagtgcctctactgttccattcatttgaccactgaccactcactgcaagacacatttagggggcagaaaatggagagctacagactactgaccaagaccttcactggtgagatggtgaggggtaggcaatctatagtcactagatttcttcctgctaaaatactgaagtcctgaaaatttttgtttcctagatattccggtgacaataaacaggggaaattgagtcttatcatatcttgcaatgagatgtcatacatttaattcataattttaatattttcctaatccaatgagagaatttggtaattcnttggacatacttctcttcctggccttttccnctctgcaagcctttnccccctatacctttattaccccctaa

SEQ ID NO: 430120 - DNA, 386 bp, Homo Sapiens
  misc_feature (51)..(51): n is a, c, g, or t
  misc_feature (283)..(283): n is a, c, g, or t
  misc_feature (286)..(286): n is a, c, g, or t
  misc_feature (339)..(339): n is a, c, g, or t
ctagaatcatgtttgagaagagtatttactgttacatgccacagttgcttntcttccagctgagataattaaatggtagagtataagaaatatagttgaaattacaatatagtacattttaattgactgaatacatacttaagtttcaaatgtttgattttataagaaaattttcttctggtaaataatatgcataaccgttgcccaaaaatgtatacagcttgccctcccccaatttatatacatagtagtccacttaagaccagccctcttataacttatngantataatgtgctcttaatttataaatgggttactctcagcatataaaatatatnggcatgtatgttatacatacagaataaaaatataaaaaggagaaatg

SEQ ID NO: 430121 - DNA, 273 bp, Homo Sapiens
  misc_feature (262)..(262): n is a, c, g, or t
agagaaagtgatccagcaaatgtggggcatcagtgatttaagactcttgctatgcagtctactgtaccccgctcccattccacagtgaatgagtggatgacacctctgtccctcgggaagatggttttgatttgttgttgcattctttgaggcagagggagaacccagcaggtgacaggggtcccttgtctggggatgagtctttagggatgggaaagggtgggggatagaatgggccctggggattttgaggactcatggnagggccaagtg

SEQ ID NO: 430122 - DNA, 520 bp, Homo Sapiens
  misc_feature (44)..(44): n is a, c, g, or t
  misc_feature (48)..(48): n is a, c, g, or t
  misc_feature (452)..(452): n is a, c, g, or t
  misc_feature (499)..(499): n is a, c, g, or t
taattaaaattaacagtttagaaggactagactggaatagtgtntaanatcaacttctgggaaaaaaaagtcacatttatataaaagaaatgcagcaggtcagcagaaatccaaacggtacagctcccattattgcccatgggtgaaatgtactgcttggggtaggataatacttaggctgggtcacaggagaagagaaatcaaagagcagaatcctccagtctgcatttattctagacttggaattctccagtggtcttaaaatataactagtatattggacacatacatgctctttataaacacgtctgccatgcattttaagctacacacatcctatctgttccagtcttatgtgagcttactgtatagctctcccacacacagtacaacatttgcgtacaaagggcccagtgttcacactcatggaccacagggggaagtgagtttcncttttccccttatggggaaccataactggtaggcaatggtcaccctnggagcaacttcggaattttgg

SEQ ID NO: 430123 - DNA, 302 bp, Homo Sapiens
  misc_feature (98)..(98): n is a, c, g, or t
  misc_feature (137)..(137): n is a, c, g, or t
  misc_feature (215)..(215): n is a, c, g, or t
  misc_feature (241)..(241): n is a, c, g, or t
  misc_feature (248)..(248): n is a, c, g, or t
  misc_feature (256)..(256): n is a, c, g, or t
  misc_feature (275)..(275): n is a, c, g, or t
  misc_feature (285)..(285): n is a, c, g, or t
aatccaattgtttggattcatacacgtttgaaagagattatgttgtttgaaaacacaaaggagctttacagccatggtggtgtctgtggctgggtcangtgggagcggctcgaagcccttacctgctgtcctctcancagcagtctgtcagcagtgcactgtgatttggtgaaagcctgttgacgtcttctattcaatcccaatgttactgcagncatgagacgagctgcaccgaggacangcatccntgtcacgnctttagttggcgattgttnaaataggtgnactgttttattttaaaa

SEQ ID NO: 430124 - DNA, 400 bp, Homo Sapiens
  misc_feature (107)..(173): n is a, c, g, or t
  misc_feature (223)..(224): n is a, c, g, or t
gttttatgaaacttgcctgaaatcacttactttaaaaatgacataaagttctacctcttgggagcttggtaaaaataaaatttctcaaagaaaaattcaatgggcannnnnnnnnnnnnnnnnnnnnnnnnnnnnnnnnnnnnnnnnnnnnnnnnnnnnnnnnnnnnnnnnnnactactgaagaatctggctaatgctgcacatataagcagcaccactgganntatagaacaggttctgaagggcaaaagtctgagcaattacttgcaaagtcacacctgtggcaacagcctttggtttgctgctgatatgtttggggccatttgcacatcaagctggacaccatcctaccttctcagaagtcatcagccataattacgtccttcctgagagtctaaaa

SEQ ID NO: 430125 - DNA, 306 bp, Homo Sapiens
  misc_feature (70)..(70): n is a, c, g, or t
  misc_feature (290)..(290): n is a, c, g, or t
caaacatcttattaagaaactgccctggagagacatatacagtgatttcttgtcagcattcaatcacccntggcctggattcctgatctttctacacaaggtcagtggaactcctcctccacggtaggagttggcaggtaaactgatcccttgtctctcatgccgcctatagggcataactacttttcctctagcaactccaagatcctggaagtccgccaggccttgagggctgactcccaaccgatcaagtgtctctgatctgatcacatttcctataggaaaggttngaggtttagccacagt

SEQ ID NO: 430126 - DNA, 549 bp, Homo Sapiens
  misc_feature (433)..(433): n is a, c, g, or t
  misc_feature (451)..(451): n is a, c, g, or t
  misc_feature (473)..(473): n is a, c, g, or t
  misc_feature (522)..(522): n is a, c, g, or t
tatatactgtgactaaataaaaattgccttttgctttcccctaactcttaattcaagtggtatttaatgtttcatctctcgatgtgttaagctgtgtgtggttgcctctatatctattccttaagtatcaccaaccacatttccaagtttttatcagtactctctctttgggaaatgaggaaattgaggttcaaattaattattcaaaatcatattgtgatagtgaagattagaaattcatttaaccccaaaccctagtttttctttgtagtgaagcctacttaagacttacttaatgttgtctttttggtaagattatcattttgaagaaagacccttcaacttacttggtatttaaaatatacttgaattagagccaaggatcttgagcagattaccaaattaagctcgatgcgggtagaaaccaaatggnctttttaatccgagtaanctacctggtttaagtggtggcnggtgatggtaatgaggaaaatgtgtttgggaccttggtcccccggtccngacgtagagcttttaaatcccctggga

SEQ ID NO: 430127 - DNA, 405 bp, Homo Sapiens
gagccttcctttccgcaatttgactacatctcccaaaaatccgctggcaaagtttttgagtgtttccctggtgagatttcttgaatctagctatgcggctctcagccctgctggccttggcatccaaagccacttcctcccccttctaccgctatggaatgagccgtccaggttccatagcagacaaaaggaagaatcctccatggagcaggcggcgccaggtagtggtagagcccatctctgatgaagactggcacctattctgtggagacatggtagaaatcttagaaggcaaggatgctgggaagcaaggcaaagtagtccaagtcgttcggcagcgaaactgggttgtcctggaggggttgaacacgcattaccgatacattgggcagaaaccaaggacca

SEQ ID NO: 430128 - DNA, 427 bp, Homo Sapiens
  misc_feature (80)..(80): n is a, c, g, or t
  misc_feature (83)..(83): n is a, c, g, or t
  misc_feature (117)..(117): n is a, c, g, or t
  misc_feature (356)..(356): n is a, c, g, or t
  misc_feature (404)..(404): n is a, c, g, or t
  misc_feature (411)..(411): n is a, c, g, or t
gcctggacctcccttcccacctgatcacagggaattcaatgagggggatggccggggagcagcccgaggcccccagggantgnggaaggccgcagacctggagatgaccgcttcccncgggatcctgatgacccgcgatttcgagggcgcagggaagagagctttagaagaggtgctcccccaagacacgaaaggccgcgctcctccaagaggaagggacaactttcctggtcctgatgactttggtccagaagagggttttgatgcttctgatgaagcagcccgaggacgagatctccgtggtcgaggccgtggcacccctcgaggaggatccaggaagtgcttactccccactnctgatgagttttccccgctttttaaggaggacggaagccagacttctnggatggnaatcgagagcccgggg

SEQ ID NO: 430129 - DNA, 411 bp, Homo Sapiens
gctgtcacatatactactttatatgattcatctagtgaggtccatagactgaatttcattccattgcaaataacattgtaaaggagattcactgtgtatagtcaaaatggactccattggtaatagatatgcttggtaccaaaagtaatgatgacgaggatgacactgatggtgacgatactgacgatagtaataacacttactgaatactcactatgtgcccagcatgtgcaaaatgttttgcatatattaatactaaacctcccaacaccttgaaagtcgaatttttaagccatctctagattaataggggttgagtccgtttgctctgcatcacacagctgttgttcggtagaactgggggctcatattgaagtctattttaattccaaagtccagttattttttcat

SEQ ID NO: 430130 - DNA, 326 bp, Homo Sapiens
  misc_feature (46)..(46): n is a, c, g, or t
  misc_feature (117)..(147): n is a, c, g, or t
  misc_feature (154)..(154): n is a, c, g, or t
  misc_feature (169)..(169): n is a, c, g, or t
  misc_feature (210)..(210): n is a, c, g, or t
  misc_feature (245)..(245): n is a, c, g, or t
  misc_feature (252)..(252): n is a, c, g, or t
  misc_feature (277)..(277): n is a, c, g, or t
ttccgtgtgaccagaaagttagatgagtagttttaagattgagtgncctaactccgggagtattcttacctccactgtcataggtgttcatgtactaatgtggaatatcaaggtggnnnnnnnnnnnnnnnnnnnnnnnnnnnnnnnaagtttncagaggaaatagaanccacatacctctaaactcaaattgccccaaagatcaattcncagggaaatgagtggagcatcacgaagacatcaancttcctncctagttaccactgacttgctagtncctgctctagctgaataatgaggttaccaactcacggcagcaattttat

SEQ ID NO: 430131 - DNA, 413 bp, Homo Sapiens
  misc_feature (397)..(397): n is a, c, g, or t
caaagagaactcgcttctctttaaagtcacggacattgatttttttccctctgactaatcttgagctcagcactagccagtattctcagaagtggctcctaccctttctgttgttctgtgtttgtctctgctcggtgacacccttccctggagagcccagtcctccgtgtattacaccagtgttaactgacatagcatagaccttcttcacacttcagattcatagcagcgatgggatcccttcctttgaagtgaacaagtccttgtagataggtcaccccgtcaaaagtgtttgattatctacctttcaatcaacatgagattgcctccttaccattttcaacgattggttgacagggggtcctttggtttgaaaaataactgggggagagatacnggaatttccaaatttg

SEQ ID NO: 430132 - DNA, 141 bp, Homo Sapiens
gccctgccaagcttcctcccctcccttcctagtccaagcactccaccgtctgtgcagactgcataacagcaatttctggaaacaggctgaagaatctgggccagtccagaggcagtggattcctggtttatgtgtggtggg

SEQ ID NO: 430133 - DNA, 150 bp, Homo Sapiens
cataggctccatttataacaaggcccagcatccttcccaggaagccacctattgggattaatttgtccatttatccaacaactatttatttgagcgtctattggtgtacctggtcccatgtaaggggctggagacgaagcagtgaagcaa

SEQ ID NO: 430134 - DNA, 422 bp, Homo Sapiens
  misc_feature (311)..(311): n is a, c, g, or t
  misc_feature (371)..(371): n is a, c, g, or t
  misc_feature (390)..(390): n is a, c, g, or t
  misc_feature (406)..(406): n is a, c, g, or t
tatttttaaaacaatcttttatttgcccatcatatatatctgaacatatatttggataaacattatattattttagtagtaactgaataatttactctctagtataaattacaaagtctaatctctgacttccaagtatttaaattttttctagtatgatataaacaagaatagtcaactattcttgttgctcattttaatgagaaggagatagtctttcattgattagagctaggcagcgattctgaagtcaaattcaagaggtaggtgacagaggcagagagtgcacttgactgcaggatggaaaaacnacgtgcaaaggagaaccctgggtaacaattacagttccttagaaatacatcagtacattngaaacaatcaaattggacngaaaaacaaacaaacnagccctcagccaactt

SEQ ID NO: 430135 - DNA, 133 bp, Homo Sapiens
aagtatgtagtgcctttcacaggacagctgtgataatgtaccctgttggtagccgagaaaagcgcaaccaccaccctgcctagacagtcccaccctggtgaaaatcttcaaagtagctcagggagtttgactt

SEQ ID NO: 430136 - DNA, 214 bp, Homo Sapiens
  misc_feature (85)..(85): n is a, c, g, or t
  misc_feature (138)..(138): n is a, c, g, or t
  misc_feature (190)..(190): n is a, c, g, or t
ggcgaccggctgaaggcttgtgaaaaagcagttgaagaagcaccgctcaggggaggagcatgacaaactgcaacagctgcttcanggatggagcaacaagagatggcacagcaggaacgcaagcagcagcaggagctngctttggccttgaagcaggagcgccgggctcaggcacagcagggcatcgcantacttcctgaagaaatctgagcag

SEQ ID NO: 430137 - DNA, 220 bp, Homo Sapiens
  misc_feature (119)..(127): n is a, c, g, or t
  misc_feature (168)..(168): n is a, c, g, or t
  misc_feature (173)..(173): n is a, c, g, or t
  misc_feature (182)..(182): n is a, c, g, or t
  misc_feature (191)..(191): n is a, c, g, or t
acatacataaaccagaaaaccaatgacatcaagctctagcaatcttaatagagaaacaatattttacttctacttcagaaagcaaatgccagaacgatgtgctttttcatcttaaaccnnnnnnnnngatcaacattgaatggctcaaaactttaataaccaataacntaccnttggaccanggctataanggttttaagggatatttatgtacataatc

SEQ ID NO: 430138 - DNA, 335 bp, Homo Sapiens
  misc_feature (74)..(74): n is a, c, g, or t
tatccactttcatggggtctaaagtcttgtgggaaagataagctttaatcaaatttcaaaatcataatattatnaactaatgttacaaatgaaaggtattagaatctataagagtggaacaggaggtcctgatctactcttggtagtgagatgttagatattcaatgaatgttttttgaaaaagtatacaaatgattaattacaagattaattacagcttctcaaaattaagattctacaaaagtatgacagagactgctacttatctctcaataattgttctcccttgctataaaagtagacatgttaagcaggtgtatggcaactcagggggg

SEQ ID NO: 430139 - DNA, 211 bp, Homo Sapiens
  misc_feature (89)..(89): n is a, c, g, or t
  misc_feature (126)..(126): n is a, c, g, or t
  misc_feature (195)..(195): n is a, c, g, or t
ctgtcggtcctaaggatcagcgttctctctctgaacacccttcagtgctgctggccattctcattatggtcttgttcaaactagtgttncttgagtccctcctgtaagtctgttaatcctggattncaacctctggggcaaagagggcctgtttgaagttcccctaagttcataataatggcatctggagcaatnataagcccttgtgggg

SEQ ID NO: 430140 - DNA, 163 bp, Homo Sapiens
  misc_feature (48)..(48): n is a, c, g, or t
  misc_feature (73)..(73): n is a, c, g, or t
  misc_feature (79)..(79): n is a, c, g, or t
  misc_feature (143)..(143): n is a, c, g, or t
cacatgcccgtgtgtgccgcgtcagtcatgccgaagcacgagttctcngtggacatgacctgtgagggctgtnctgaancgtctccagagtcctcaacaagctgggaggagtggagttcaacattgacctgcccaacaagaangtctgcatcgactctgagca

SEQ ID NO: 430141 - DNA, 351 bp, Homo Sapiens
  misc_feature (240)..(240): n is a, c, g, or t
  misc_feature (310)..(310): n is a, c, g, or t
caacaaactcagcttgactttattacatggaagcttgcagggagccagcggggaaggcctgtctgggcaggaactccatggctgggctggactggactgagcagttggtgttccagatctgccggggagaccagatcaacagcctgcctcttcagtttatatccggaagactcgcccaggtcctggctacttggggccaaggtaggaaacagcctttcctgttttgttgagggttgccancagggtgtctgagctgtgcccaaagtcgatgcagaccttctttttgggcaaggtcaatgttgaactccantcctcccaagcttgtttgaaggactctggaaaacgggtttt

SEQ ID NO: 430142 - DNA, 446 bp, Homo Sapiens
  misc_feature (392)..(392): n is a, c, g, or t
  misc_feature (413)..(413): n is a, c, g, or t
ctttaatctagtctgcctgccttatttcatcaacatagtcttcaagctctgatattctctcttccgcttggtcaattcggctattgatacttgtgtttgcatcgtgaacgtcttgtgctgaatttttctgctccatcaggtcatttatgttcctctctaaactggttattctagttaacagctcctgtaatcttttattatggtttttagcttctttgcattgggttacaacataatcctttagctcagcaaaatttgtcattacccactttctgacgcctacttctgtcggttcatccatttcagcttcagcctgttctgtgcccttgctggagatgtgttgcaatcattcggaggaagaagagccatctaagcttttggggtttcagcgnatttggtgttgggttttcctnactttggtggaattaaccaccttgaatctttga

SEQ ID NO: 430143 - DNA, 437 bp, Homo Sapiens
  misc_feature (163)..(261): n is a, c, g, or t
agacagggtcttgcttagttgcccaggctggatggagtacagtggcacattcatggctcactggagcatcaacctcctgggctcaagcatcctcccaccttatcctcccgagtaggtgggactacaggtggacgccattatgcctggctaattttttaaaatnnnnnnnnnnnnnnnnnnnnnnnnnnnnnnnnnnnnnnnnnnnnnnnnnnnnnnnnnnnnnnnnnnnnnnnnnnnnnnnnnnnnnnnnnnnnnnnnnnnagtgtgagacacccgcatctagcaatatttcacttctttttatttctgtgtagtattatgttgcatgaatgtggtttatccattcctgtgttgatagacccttaggctgtttccagctttttggctactacaaataaagctgctatgagaattcacgtacaagtctttcttatgaa

SEQ ID NO: 430144 - DNA, 444 bp, Homo Sapiens
  misc_feature (391)..(391): n is a, c, g, or t
cttttacattcatttcagatttaaggtcgtcaacctcatgtatccactaaaatggaacttgtgcctccattcaaatatatgaggaaatttatacttctcttgaattttgagatattctctttcaaaagcttcatcacataaaaatctatccattttgctatcacctattcatattcaggaatctggatttacaatgtcacacgcaatattataaaagtattcctacaaactgatcatatgccatctgcttatgaataataattagcagccccctctcccaccccaggaacacctgtctcattttacccggcagcctatttagagccaagcggtcattgttacctgggatcttgatcctctttttcctggattaatgtacttatttagaccnactattttaaaggtttatagacaagctctgagcactactgggatagagagccc

SEQ ID NO: 430145 - DNA, 397 bp, Homo Sapiens
  misc_feature (80)..(117): n is a, c, g, or t
  misc_feature (304)..(304): n is a, c, g, or t
  misc_feature (343)..(343): n is a, c, g, or t
  misc_feature (379)..(379): n is a, c, g, or t
atctttcttgcctgctagctctgaagagattggctgatcctgatgagtgggattccccagcacagccaacagcattgctnnnnnnnnnnnnnnnnnnnnnnnnnnnnnnnnnnnnnnatgcctcctgattgggtgagacctcccatcaggggtcaccagacacctcgtacaggagacctctggctggcatcaggtcagtgctcttctgggatgaagctacccggaggaaagaaacaggcagcaatctttgctgttcttgcagcctccacaggtgatacttaggcaaaaggatctggaagtgganccccaagcaaacttcaagcaagaccttgcagaagaagangccttgacttgttagaaggaaaaattaaaccagaangcaacaacagcaatggca

SEQ ID NO: 430146 - DNA, 384 bp, Homo Sapiens
  misc_feature (12)..(12): n is a, c, g, or t
  misc_feature (358)..(358): n is a, c, g, or t
accactcttagnagttgtgtgcccattcccttaacacaggtagatctgtcttacccgtttcctgggtgggaccttaggaatccagtgccctgagactatgtctttattatttatgcctagtatctcagtcttcccacactggcaaagagtatagcaactggtggttagtgataattgacaaggttctgtccaggctgcttttttgaggtctttgttttagtaagctatgaaatggagctgtctcttgcatgatgaataaacactctaccattgtctccactggccctagctgtagtacctggctgataggattatggtggaaattgtgttattgggaaacctttgagccttgagagangtagaaattggttcagaaactgtgtc

SEQ ID NO: 430147 - DNA, 408 bp, Homo Sapiens
  misc_feature (46)..(46): n is a, c, g, or t
  misc_feature (121)..(121): n is a, c, g, or t
  misc_feature (180)..(180): n is a, c, g, or t
  misc_feature (191)..(191): n is a, c, g, or t
  misc_feature (281)..(291): n is a, c, g, or t
  misc_feature (340)..(340): n is a, c, g, or t
  misc_feature (385)..(385): n is a, c, g, or t
tcctcagactctgatttctttactggttgtaactggaaagtgaccntgaaagttagcagtgggaaaccaggatctgtgttgattgattcagtagacttaattttacacaaaatgtttagtnaaatagtcttggagggtaggagatgttgactctcctcaccagagaagttcagctgggcnttttggacaancaggatatttcctgctaccctgagatttgtggctatatcctaaaggggtgaagattattcttaagaaggatccccctgataagcagaagnnnnnnnnnnnataattggtagtaatcctaaagtttaattaccccaaataaaataatttnccctggagatttccaaattggaaataagttggtaattttttttantaagtgacccatggtccttttta

SEQ ID NO: 430148 - DNA, 324 bp, Homo Sapiens
tgacaccagcgcccggccaagcttctttctttatatggactttgaaacatttactgtgactcttgggatttctagttgaagtcacctgcaaagggattcccccctgtaaatgtccatattgcatattgcctgtgaatatgacctggaggttgtaacttaccctgaatgtttccctttcctgattacatgccaaggtaatactgaaagggaaatgtccaagaaaggttgtattggatgctttcagaagaatcacaaccttttcatgaataaacctcctttatttatgaatggacattgtgcggtctgtgacaatgtttaataagt

SEQ ID NO: 430149 - DNA, 333 bp, Homo Sapiens
  misc_feature (255)..(282): n is a, c, g, or t
aaagatattaagaagattagaaaaggttttgtgaaggagagctgaaatgggcctttgaaatacagatgacattttcattgatgagaataggaatatcataaaagtaattcataaagctgacataatgagcttagaaggaaatccataaaataatacctactttaaagaaatttcagggaggtaaaatttctgaaaactttagaccctagtcatcagactgtgtatgtgcatgtctgtctctctctcctctatcannnnnnnnnnnnnnnnnnnnnnnnnnnnggaggggatggagtagtaaaggaccataaggagatataacactgtaggaag

SEQ ID NO: 430150 - DNA, 369 bp, Homo Sapiens
  misc_feature (190)..(190): n is a, c, g, or t
  misc_feature (204)..(204): n is a, c, g, or t
ttctgaggtttgaataagagtattgaggtaaagacctatccagatatttagggaaaatggggaaattatttctcatagcaaccatggcagtgagaaagatgctttctccctagaaaaggataaaaatgcatgcagccaccatacctggtcacagattttttaatggggagtaaagcactataatatagcngaacaagagtaggnatacaaagatacttttaattttttacatgttataaactgtctgacactgggagtattgtttcatctgagatactgttttttaacttgtaacaaagctgtaacacttatcttttttacccctcctttgctgcttccagattccaccgctgttaaaaataacatgtc

SEQ ID NO: 430151 - DNA, 187 bp, Homo Sapiens
tgacaacccgtgcccaacaggtatatcgaatttaagatttcaatttgtgtagcacaagttcatttaaaatgacaaaggagtaaaggtataccagagttcagggagttcaaaagaaagttttaaataggtgggatattatatggggttggtttacatatacagtccaccctctgtatctggtggggtt

SEQ ID NO: 430152 - DNA, 427 bp, Homo Sapiens
  misc_feature (156)..(156): n is a, c, g, or t
  misc_feature (412)..(412): n is a, c, g, or t
tgactttcacatttgaacatttcaaacaaacagctttcaccagttgtttgtaaggacaaacgtggaaaaacattaaaagaaaaccgttaagtgtaaaaatgccaacattgaatttgaataaaagaagagtcaaccattctaaccagaggtgaaacntttaaaatttttgctttcagctttcacaataaaacaggtaaaaattgcctatctgcaacattcggttttttaaaatttatccaactatgccctttttatgttgtacttacattcccttggaaggaataggtgggtatattcatccgaaccttgttattattaatattaaccattagtattgacagcctaatattgagtgaatccttttggatgagagaagcactactgatggtcattatcatggtgtaataatatntaaaaatcatttgta

SEQ ID NO: 430153 - DNA, 146 bp, Homo Sapiens
  misc_feature (70)..(70): n is a, c, g, or t
  misc_feature (76)..(76): n is a, c, g, or t
  misc_feature (123)..(123): n is a, c, g, or t
gcacgcctggcctttactgtgtaattctaacatcgcattaaactttctgattttcaattttattatctanaaaatngagaagacaatatcagattcataggattgggaagactaatgagcatntaataattaatgagcacttaatg

SEQ ID NO: 430154 - DNA, 405 bp, Homo Sapiens
  misc_feature (65)..(65): n is a, c, g, or t
  misc_feature (184)..(184): n is a, c, g, or t
  misc_feature (283)..(283): n is a, c, g, or t
  misc_feature (392)..(392): n is a, c, g, or t
tttttgaaggctcagtgtgctttgtgaactgagttcttagtgtttagtggcaaggcaggcccgcnttttgcttgccttacaaggtcatttcatctctgttgtacaaaacacggctgctcctgctctacctctctgttaaagcaaagcaagtcacattcttgaagactggaatgcttactttttngtttgtttcttactgagaaccttgtataagcagctactactgccaccttcagctcctgatgatctgtgagccgggttctagccattctttaagatcctnggtcagactcccttcccttcgctctgtcagcccctcttaactattcctgatatcagacagcatgcagaaacattgtgcgcatgttgactcagatgctcctcagtgactngaattctttcagg

SEQ ID NO: 430155 - DNA, 410 bp, Homo Sapiens
  misc_feature (333)..(333): n is a, c, g, or t
ctttgtaagctttattttatcactcttatccaccacacatcaggaagctatcaacagtgcatcgcatggcgaggtcagtttacaatgaaactcaacaaggcaattgtgtttacagagaagttttcagcaaaagtacgcaatgcagctcgctgaaacacagtgctcacactttatagggaggtggaaataaagtcctctgctattcagcaagaaaatagacatctgaaagactgataatgaaaaaagaacatcttggtactaaaacacatctatctacatttatagtcccacttagttcaaacaaacaaaccaataatcaatcacacacaagcngcaaaacaccacaaaaaccagaatcatagcatcaggaactttaggaaatgcgaagagcaacacgcgactgaaagcca

SEQ ID NO: 430156 - DNA, 399 bp, Homo Sapiens
  misc_feature (299)..(353): n is a, c, g, or t
aggaatgtgcatgcccaaatgctaaaggtccgtgtctccagttggtttttgatcaatcaataaagatgcaaactgccaatagttgggcaggggatgcgacacttagagttgtacaagctaggatgagagaggaatgggagagaatcacaatgacttggggcagaaggatgggacacaggagcagcaggagataaagacaaccagccatgttagaccttcccgattgagcctgggatagcatgggaaagtttaaggaatgccaaacctttgaggtagccaaggcatttttaaaaatgagnnnnnnnnnnnnnnnnnnnnnnnnnnnnnnnnnnnnnnnnnnnnnnnnnnnnnnnttcatttgcagatccaaagatagctccagtacaagcacccatgcat

SEQ ID NO: 430157 - DNA, 416 bp, Homo Sapiens
tgtttccaaaaggttcctgattaacaatctttcagagagggaggaggaaagaaattacagcaaatgttcctttactctggtccctgctgggctgggaggctgctatttcagactcaatcagctacctgcagggtcaatggatgaaatgcctccccataggatcaggaggatgcagggccattgggaagcttccacagggacctgtggcctaaaaaccccaactgctcaaaagactcagggacctcaaacctaaaggggatgggagcccaatttctttaagaagcacccgtctttgaaaagcagcatttctcactctacctctgcagggggaaaggagcaacatacatcccctgaaagtaattaccttcaagttgtgaggatcaaacgccatccttaactggagataatccgaaatt

SEQ ID NO: 430158 - DNA, 389 bp, Homo Sapiens
  misc_feature (91)..(91): n is a, c, g, or t
  misc_feature (241)..(241): n is a, c, g, or t
ggaacctggaagcttgtctccagtgaaaacttcgatgattacatgaaagaagtgggagtgggctttgcacaaggaaagtggcaggcatggncaagcccaacatgatcatcagcgtaaatggggatttggtcaccatccggtcagagagtacttttaaaaacaccgagatttccttcaaactgggcgtggaattcgatgaaatcaccgcagacgacaggaaggtgaagagcatcataacccnagatggcggggcctggtgcaggtgcagaagtgggatggaaagtcgaccacaataaagagaaaacgagatggtgacaagctggtggtggaatgtgttatgaaaggcgtgacttcccccaagagtttatgaaagggcatgagcccaagga

SEQ ID NO: 430159 - DNA, 171 bp, Homo Sapiens
  misc_feature (67)..(67): n is a, c, g, or t
  misc_feature (84)..(84): n is a, c, g, or t
  misc_feature (90)..(90): n is a, c, g, or t
  misc_feature (143)..(143): n is a, c, g, or t
atgagccaccatgtccaagccagatgtggcaattttttgggccaacatttaaaaattcaggatatgnaattaccaaaattaagnaagganaaaaaccagtcttacatttctgggagcacttggcaaaatcaagcaggaaacanggcatgctggcccatacacttaagacat

SEQ ID NO: 430160 - DNA, 179 bp, Homo Sapiens
  misc_feature (31)..(31): n is a, c, g, or t
  misc_feature (42)..(42): n is a, c, g, or t
  misc_feature (56)..(56): n is a, c, g, or t
  misc_feature (70)..(71): n is a, c, g, or t
  misc_feature (82)..(82): n is a, c, g, or t
  misc_feature (84)..(84): n is a, c, g, or t
  misc_feature (93)..(93): n is a, c, g, or t
  misc_feature (133)..(133): n is a, c, g, or t
  misc_feature (140)..(140): n is a, c, g, or t
  misc_feature (145)..(145): n is a, c, g, or t
  misc_feature (149)..(149): n is a, c, g, or t
gttgtatcagtgcaggttatcactttacatnttctattcacnaaaacacggtgggncaaaggatgaagannaggcatgttgnanacttgggcnatgtgcactggtgacaaagaatggtgtgggcgatgtgtanattgaanaattntgtnaattcatttcaggagaacattgcatattgg

SEQ ID NO: 430161 - DNA, 408 bp, Homo Sapiens
gaaaaagaaatgtcaccatacacattgtatttcctgaaatttaattttgtcttggtttgggtctcttctgagcaaccctcttggattattgacatactacctcacattgtattgaaatttaaaaggtcttaacaaggaaataccacatcttcgcaccctggcttaccaacctaaggaaagcagtttcctaaattcacctgggactagatgccctcgatgacactttctctggaagattttaaagcagcagaggacaaagaaacccctaaaggagccatattcattgtccaccttccctacctcacttaaaagtacctagcttaacatgcctggtagaattgcctggtagaaattagaaaatgtggtctatgaacagggagctgagcaggaaaagagtgctgagggctt

SEQ ID NO: 430162 - DNA, 469 bp, Homo Sapiens
  misc_feature (294)..(294): n is a, c, g, or t
  misc_feature (386)..(386): n is a, c, g, or t
  misc_feature (414)..(414): n is a, c, g, or t
  misc_feature (432)..(432): n is a, c, g, or t
  misc_feature (456)..(456): n is a, c, g, or t
gagtttgaaagaacttttggataactgctacagctttggcaggaacagccatgtccacaagcccctgagcaagcacaaattattccaggtgcttcctccccgttgcatttggctaaacctttatatttgtcttaaactgtgtgtttactaaagttaatagtttaattctctcgaggttctcaaaatgaatttgcatgttttaataacatttgtaaacaataccaaaatgttaaacaaaattgttttaccttatgctctatagataaacgtgtgtgtacattcagaatcgcttgngtttggtatcagataattatataacgagcagcaggtctctccagttatacgggcctaatggaagtaaaaaaggggttatggcctgtgggtgngaaggatgctagaaaataccagaaaacngggagaaaagaataatcntttaggagaaggcagtgccggtcncccgagtttgggg

SEQ ID NO: 430163 - DNA, 479 bp, Homo Sapiens
  misc_feature (376)..(376): n is a, c, g, or t
  misc_feature (454)..(454): n is a, c, g, or t
atattactattaatgatggtgacagaattacaggagataccgccgatccatcaggaaacctctatggtgtaatgaccccagcaggaaacacgcctggcaatatcaacctgggtaatgatgtcaccgtcaatgtcaacgacgcctctggatatgcaaaaggaatcattattcagggcaaaaacagctccctgacagctaaccgactcacagtagatgttgttggtcaaacctctgccatcggatttaacttaattggtgactatacccatgctgacttaggcacaggcagcaccattaagagtaacgatgacggcatcattattgggcatagctcaacactaacagccactcaattcaccattgaaaactccgaacnggtataggcctaaccatcaatgactatggcaccagtgtcgattcttgggaagcggaagtaaaatcacgacccgatggnagtacaggtgtttatatcggtggtc

SEQ ID NO: 430164 - DNA, 464 bp, Homo Sapiens
  misc_feature (396)..(396): n is a, c, g, or t
gatggagtggtgctaccaaaggaccccaaagagatcctggctgagaagaacttcaacactgtgccttacattgtgggaatcaacaagcaagaatgtggctggcttctgccaacaatgacgggatttctaccagctgatgtaaaattggacaagaagaaagccattgcactcctggagcaatttgcttccatgactggcataccagaggatattattccagttgctgttgagaagtacacaaaaggtagtgatgaccctgatcagatcagagagggagttctcgaccgcaatgggggatgtggcatttggtgttccatcggtgattgtgtcccgtggccacagagacactggagctcccacctacatgtatgagtatcaatactacccaagcttctncatcacccccaaagaccccagaatgtagtaggagaccatgcagatgatgtccactctgtcctcgggtg

SEQ ID NO: 430165 - DNA, 354 bp, Homo Sapiens
  misc_feature (149)..(149): n is a, c, g, or t
  misc_feature (200)..(200): n is a, c, g, or t
  misc_feature (279)..(279): n is a, c, g, or t
  misc_feature (334)..(334): n is a, c, g, or t
gaagaatcaagagactgtatcctggactcaaacgaacagagtgttttcagtacagtaactgccaagtactacctggaagttgaatgagatgatgttatgtcttagtcaaggaaagcagtttggacttaatttttcttcctcttaatttntcttccttttataaatatgttgatgtagtgcactagagtaatctatcattncttgctttacttttcatctatataaaagttgaacaaagttaagctatgtgacctgaaccccaggaaaagatctaaaatnacccactaactagctcttttgtaacctattggcagattctgtgattttttactantacaattaagtcaagtatta

SEQ ID NO: 430166 - DNA, 126 bp, Homo Sapiens
  misc_feature (29)..(29): n is a, c, g, or t
  misc_feature (52)..(52): n is a, c, g, or t
ttccatggagacgagagcaggtggaagantatgtaagatctgaaacactganattgtctgcttctcatcttcagtgagattccaaaggatagtacagtgacagaacaagaataggcactctctaca

SEQ ID NO: 430167 - DNA, 329 bp, Homo Sapiens
  misc_feature (25)..(25): n is a, c, g, or t
  misc_feature (56)..(56): n is a, c, g, or t
tcagtagagagcatccagcttacanacacaaggctgatcaaagtgtagagactaantgactgtttactattcagctctgaacagaccatttctatcagtagacttgtctaaggctcagggagcactgaagaagtggtggaaagaatgaaggcctgaagcctggggaatagggccatgtatatataatgctgccttctggacatggcatggacaccacactcacaagctcacagcagctgtggtgatctgcagacccatattctagcttggatggaggagaggctcctaagactgcacccagctgaagagctattggtaactgatggctc

SEQ ID NO: 430168 - DNA, 484 bp, Homo Sapiens
atttatttggtggaccgcaataagttctcagaacatttgctgtaactcaggtagaaataggcaagtattcacattagtctgtagtccaaaaaggtatttcaactaaaatatgtcaattctcacatcggcagtggcttagagatagatggtcagtgttgtttctgcagcttcttcaagcagaggtacagtgctcaatgctttagaggggttagcaaattcatttcccttttgttcaacaatgcctcatctccactatgtaaaacctggtctccagtgccactatctattatctgccttacgttaggtcttacttcagggctattacacaaggtgattacgttataaaaggcctccagatcacttggttcaaatgttacagatggcttcagtactgattcaggagcaagggaacttcctccaatgattctcaggttgataaatttgattttccaagtattttccacaaaagggctacggataagtc

SEQ ID NO: 430169 - DNA, 448 bp, Homo Sapiens
  misc_feature (57)..(57): n is a, c, g, or t
  misc_feature (190)..(270): n is a, c, g, or t
  misc_feature (415)..(415): n is a, c, g, or t
tttataatatgcatctccttctagaaatcatgactgttttattcatcctagcgaacnagtaagcatttaatacatacttttgattgaatgagctaatcttatttggggaacatacctgttcttgaagatttagttcaaatgcacctttcctcctaaaatctcctgtacaggagaacatttgtggggatgnnnnnnnnnnnnnnnnnnnnnnnnnnnnnnnnnnnnnnnnnnnnnnnnnnnnnnnnnnnnnnnnnnnnnnnnnnnnnnnnntgttattaactcagcaaaactgttttaaagaaagggaaacatcttaagacaaaatgcagattttctcacacaaataaaagctaacaaaagttacggctatcagacctgcactacaaaaacaaatgctaaaggaagtttttatgcnaaaggaaaatggtaatagatgaaaatggtatac

SEQ ID NO: 430170 - DNA, 460 bp, Homo Sapiens
  misc_feature (135)..(191): n is a, c, g, or t
cttcctgagcgcctggacccatcctctgcctccagcctctgccccagaactcacacctgtgccggagcccctttctccctcccacactcgccatctcccaggccgtttcgtctgtgcagggctggtttgttctgnnnnnnnnnnnnnnnnnnnnnnnnnnnnnnnnnnnnnnnnnnnnnnnnnnnnnnnnnctgggggaaaaagccatatcgctaaaattctatagaggttgagatctttctcagtgtcaagtcctgaatgggctgggtttgctgcctctgggacccactgctaggaaagggccccagtactcctccacggatctggtttcctgcccagccctgggtaaacttagccggaagccttaggtcccattgtcggcgctgaggtgtctggcctgaggtcaatggtgcaaggagccgccaccgggttcgccagcctggagtgctgggctgtgtta

SEQ ID NO: 430171 - DNA, 168 bp, Homo Sapiens
acatcatccactttaagcctcatttttctggtctgtagaatgaagctagtaataaaatgggctagttctttagactggtgtgaggactaggtcatgccttgtgtgtggcacatagtgggcaccaggatacaatggcaggagtgctttggcactgcatgtggggggaaa

SEQ ID NO: 430172 - DNA, 184 bp, Homo Sapiens
atgcgattgtgttgaatgccctggttggttacgggtgtggggaagtggtatacagtacttttgatcctcctttggagaaggagatgctaatgtggataatgagaatttggttctttatctttagtttcgatttggccgccttccttcactgagtcacagtgctcactttgttttagtgatgggc

SEQ ID NO: 430173 - DNA, 201 bp, Homo Sapiens
aggactttcagggaaaacaatgttgacttaccaatgggcattttcaaagactctaagttggtatgtcagtcagtgtacagacaacgtgatccgcaagcacgggcaccaccctgccgtgaaccacatctcagccaatcttccgcaaagaaatgtacccaaaaacttttctgtaaattcaggaaggtgatccacaccttccaa

SEQ ID NO: 430174 - DNA, 181 bp, Homo Sapiens
  misc_feature (31)..(31): n is a, c, g, or t
  misc_feature (33)..(33): n is a, c, g, or t
  misc_feature (59)..(59): n is a, c, g, or t
  misc_feature (88)..(88): n is a, c, g, or t
  misc_feature (121)..(121): n is a, c, g, or t
acgaattcctggaggccctcagatgatccancncagcttagatggcaagcgtctttacntcactacatcactgtacagcgactggganaagcagttttaccctgacctcattagggaaggntccgtgatgcttcaagttgatgtagacacagtaaatggagggctgaagtcgaaccccaac

SEQ ID NO: 430175 - DNA, 565 bp, Homo Sapiens
  misc_feature (466)..(466): n is a, c, g, or t
  misc_feature (507)..(507): n is a, c, g, or t
  misc_feature (548)..(548): n is a, c, g, or t
tgaagttggcatcagtggttgaaaacaaagttctgtttcagaaagaatgaggagggttgtgagctgtgtgtgaaagataaggactgaagatgtggggacaagcttgtttgaagtgatgcttggccagtgaacaaacgagatctagaagagattaaacaaaaagaggggagtgggctagattttaagttgggaaggatgacagtgccaagtcacagatggaaaatgttgctctaaggaaacctgctcggttgcccccacctcttgttgcacaagtaccaccacactttctctgctttaagtactgtattgtgggaattcaacccacttctaactttctaagcattgtaggaaaaagtgcttatttcctttcctagctgtccaaatggttgcacagtcagaatctattgtgctgcctgtacttctatattagagctaatactctcacattttcatacccatatccccnaattacagcaaccaaccagtattatcctgattttcctggcnatagggacctaattggctgtttgggatctgaatattctggnaaagtgggaaaagtaga

SEQ ID NO: 430176 - DNA, 512 bp, Homo Sapiens
  misc_feature (276)..(287): n is a, c, g, or t
  misc_feature (320)..(320): n is a, c, g, or t
  misc_feature (403)..(403): n is a, c, g, or t
  misc_feature (462)..(462): n is a, c, g, or t
  misc_feature (474)..(474): n is a, c, g, or t
catcagctgtcgtttcactctgagagctttctccccctttattagattcttatttaatggattataatctgttattatcagtctttatcttgatgctgaattgctccagatctgaccagtgggagctcctcaggctgattcctttttccttttgacctgtcctcactctgagcattttcccattttcaaggcacaacaaaggtggcccagacttaccttacgccttctctgccccagccttggagtcagccattcttccaaggagacctgcttccnnnnnnnnnnnnaagcaattgtttattacactcctgctatatgcnaataagatgatgagcaaaaccagacacaatttcagccctggaaggagaaaagggaggtcgatattaatcaagtaataacattnatgggggcatttctcaagtgagagaagtgcactaaggaaagaatgtgattctatggtangggaataaaganccttgactggggaggggaacataccagtaattaacgat

SEQ ID NO: 430177 - DNA, 147 bp, Homo Sapiens
  misc_feature (18)..(18): n is a, c, g, or t
  misc_feature (25)..(25): n is a, c, g, or t
gcggtggcggcgcgtgcnccggagncgcgcggccacaaaaagaagaaggctaccccacttacagatgcagaccatgtggggctccggagaactgcttgtagcatggtttctagtgttggcagcagatggtactactgagcatgtcta

SEQ ID NO: 430178 - DNA, 154 bp, Homo Sapiens
atatataaaggactgggatgaatttgataattgtttgagatttcaggcttcatgatacaatttattggctatggatagccttgtaaaaaaagatgtccaagttctttttctgcatggtgcatttgacttctttttgatttagagaagtaatttt

SEQ ID NO: 430179 - DNA, 550 bp, Homo Sapiens
  misc_feature (490)..(490): n is a, c, g, or t
aaatccaagtgaaaaatatacggaggtgtccctcacatccaaataacagtaaagcaacttgcctaaggaagaaagtgtactaaaaattggaaccatgtatggactctttctcaggttgttgcctctgaacctatcaaaagtgatgtgcataggggagatgaaggtgtgacagaggctgcaaccaggtgggtgaaggagagaacaggcaattctcagaaaaggagtgctgggtagttaatccagtaggtgtctactacactatcctcaaaccctttagttaagaggaactcttcagagacttggcaatttgcctcttttaaattagctttgggattgttttgaaagtacaatttgaaatgcttttccgagtagtttcctaattatttgttgcacattatcccatctttaaggtgatttcagaaaaattttaaactccctcctctatgactgttccttccagattaagttaaaattagatttttttgtatgnctccttttcccttatccccagctaatatgcctggttccttttaccggttccccatatgac

SEQ ID NO: 430180 - DNA, 236 bp, Homo Sapiens
  misc_feature (29)..(29): n is a, c, g, or t
  misc_feature (36)..(36): n is a, c, g, or t
  misc_feature (53)..(53): n is a, c, g, or t
  misc_feature (62)..(62): n is a, c, g, or t
  misc_feature (99)..(99): n is a, c, g, or t
  misc_feature (109)..(109): n is a, c, g, or t
  misc_feature (120)..(120): n is a, c, g, or t
  misc_feature (128)..(129): n is a, c, g, or t
  misc_feature (181)..(181): n is a, c, g, or t
  misc_feature (197)..(197): n is a, c, g, or t
  misc_feature (206)..(206): n is a, c, g, or t
  misc_feature (215)..(215): n is a, c, g, or t
gaggagacgggcagcttgaacaaggctgngtttctngcagggtatccaacgangatgaaccngtagcttgagggcaacagcaggtacacctactactgncctagtcganggctgctccanaaagacanntgaatggggcaagacaatcattgaagacaaaacaaattaagccagctcgccngccgaacctttgacanttgcacctncttggacanttggtggtgcttgaccaagaa

SEQ ID NO: 430181 - DNA, 441 bp, Homo Sapiens
  misc_feature (226)..(226): n is a, c, g, or t
  misc_feature (362)..(362): n is a, c, g, or t
ggatgccgaagctatccggaaagcgatcagaggacttgggactgacgagaaaaccctcatcaacattctgacggagcggtcgaacgcgcagacaagctgatttgtcaagcagtaccaagcagcgtatgaacaggagctgaaagatgacttgaagggtgatctctctggccacttcgagcacgtcatggtggctcttgttactgcaccagccctgtttgatgcgacnaccttgaagaaatccatgaagggaactggcacagatgaagatgccctgattgaaatcctaacaaccaggtcaagcaggcagatgaaggaaatctcgcaggcctattatacagtgtataagaagagcctcggggatnacattagctctgagacgtctggagacttccggaaagctctgctgactctggcagatggtagaagagatgaaagcctcca

SEQ ID NO: 430182 - DNA, 369 bp, Homo Sapiens
  misc_feature (167)..(167): n is a, c, g, or t
  misc_feature (337)..(337): n is a, c, g, or t
cattatttcatttctttactggatatctttgcttgctaaagtctctgaatctgaggtctgctctttctgacaaacaagggtgagaggtgttaaaaataggctattatcaaagactttctcttgacttaccagaggcattgaaatgggtatgaagaagggccattacntttcactacatgactccaatgctaccttaatctaccactccatgggtagggaaaatgcctaattggggataacccctgggcttaaaataaatgttccaagggttggggcttgcttcccccattaaaacctggcataatttggagaccgatgggtttgaggtcagtgcccncctaacctttcccccggtagagacatggcttt

SEQ ID NO: 430183 - DNA, 292 bp, Homo Sapiens
  misc_feature (217)..(217): n is a, c, g, or t
  misc_feature (264)..(264): n is a, c, g, or t
tgacacccgcgcccggccaggtcttttattttacagtgttgggttcttgtcaagagagtctcaactgtcctttaaagaggccaagcccatcccacagctgggacaagttgtggctattgtttctggctgaaagaactccctccaaataccccagagaaaccttctccaataattatagaaaattctagaaaacatctaaccggtggtggttttttcnttttcctggaattcccttggattttttttccccaatccacgcggttngggaataattcggaccttattaggtaag

SEQ ID NO: 430184 - DNA, 451 bp, Homo Sapiens
  misc_feature (407)..(407): n is a, c, g, or t
  misc_feature (417)..(417): n is a, c, g, or t
agtgcaggtcaggcagaggatgtgtagaggggatgatgcagacacaatccctgtcttcatggaactccctgtcttttgtggggagagaggcaatacacagactcatacatattggagaaaggctgtcaaggtaatagcacgttctatttgatagaaaatagtaattcacccatgcggcagatacgtgttgggtacctactcggtgcaaaaccctgctgactaagacagagcttaccttctgattttagcctaggtcatcggggaaggcctcctctgagggtggtaacatttctcaagggctgaagaaggaggcagccctgcaaaagggccaaggagaacattcccaggccagaaggggaaattgtaccatcctttggagtccattgaaatataatggtaactttgtnccattaatgnccagagcctcaaatttcccaagcctgtcagtgat

SEQ ID NO: 430185 - DNA, 408 bp, Homo Sapiens
  misc_feature (374)..(374): n is a, c, g, or t
gactaggcttaagtgccagcgaagtatccaaattcctgatcctttccccagctgttactttgttaacccctgccttcctgcagaacactgacttggccttttcctgctgagggtctgagacagccgtgctataattaatgaacgaatgtctccccagccagactgtaagctcaccaaggacctctccccaccctcactggtctcatttacacattataactgcacctgggacagagtagacattcaataaaatatgctagatggcctgagatggataaattacctctctatcctaaaactccacatatgcacagaatttcagggtgttcacagttcccttagtattcatgaatgctgggtaagaaccactgtcnttaaaaggaccttggggggttatctctgagggga

SEQ ID NO: 430186 - DNA, 362 bp, Homo Sapiens
ttgcagaaaaagaaatcaactttaagaaataagcaaaaaggaaaaaattgcaaacacattgatagaatcaacagctggttataagaccaggctcatgaatgaactggattaaaaagaaacatgagatccttggaagcaggaaatacggatttatctgttaacagaaactatcccattggcaagcagtacagtgaattatattcaactgttactttcatccttgcactactggatcaagattttatctcctgcaagtgagactctctttatgacaagtctaggtcatgcacccactcgccatatctattgacaaagggagaaagaggatctggcctctctgccacccaatgcagaaagaaggc

SEQ ID NO: 430187 - DNA, 394 bp, Homo Sapiens
  misc_feature (154)..(154): n is a, c, g, or t
tgaactacacagattccaacttcctaagccaaacagaaaatcattagtaggtctttaattctagattgaatttcccttatcatgaatgagatggtctgaaataaaatcaagttcatttttgccattgcactgaacgatgccaatgcctatcagnagacaggttctgtcttgcatttgcttgcactttagagtgctgcatgaaagcagtgtgcagagattttgaggcggtccaccatcagggcaggcagccattgggagccatcttcttcaatcatcttctccacagatcttcaagagcacggttctgtagtctccagaagtatctggattggatggccgagtatagagagtagccatagtgcttcttgaactcatgtctgatggtccaaaagat

SEQ ID NO: 430188 - DNA, 414 bp, Homo Sapiens
  misc_feature (403)..(403): n is a, c, g, or t
ataaataatcataaaataggtaggttccatgatatatatacataatgcaaaaatgtcagaatctctcctcagttgacagcattaaaatcctcctctgaatcaaaacctgctacaatatcagattaggcttctgaaggctagtgcctaatattcatgaacaccgtgtttatgttttgattttttggacctacctaacgtggtttggtcaatgatgcctatgtaagtttttaatcattgttttacctatgtgaatttttgagcatctgcttattttgacctcttatccataatagagagtctgagtagtcagtgcaactttatattgagtgtagcataataacataatatgttgaatttgaaaaacccattgtgtagtactaacctttaaataagaaaatttcanatacatggtat

SEQ ID NO: 430189 - DNA, 304 bp, Homo Sapiens
  misc_feature (74)..(130): n is a, c, g, or t
  misc_feature (225)..(225): n is a, c, g, or t
gtacttgcaatgaagaaaatggtgaatggtacatacatggtaagtggtcaatacattttagtcattctattaannnnnnnnnnnnnnnnnnnnnnnnnnnnnnnnnnnnnnnnnnnnnnnnnnnnnnnnnaacccccttctgggtagttgggagaagtcaagcattaataccagtgaagcacttcaaatggtgctttgcatacagcgagtgctcaattaaatgtnaaaattcttaaaatcatcaccacgattctgaccttatggactttgaagggcagatgttgtgtctcattggctttcgtgt

SEQ ID NO: 430190 - DNA, 424 bp, Homo Sapiens
ttttgtcaaaatgaatgtcatttggttttaatgcaaatactgtatgttaattatcaagttgattctatggcacgaccatgacatcccctttgaaggatgatcactgtttatttatattaactttccttactgtgatcaaaagcccgacagaagaaacaagggaccttcctggaggcagaaacctgaggcaaagtctgctcgcatctcctcagatggagaaacaaaggaccctgctggcacagagttaagactcgatccctcaagaccctagctaaagcctgcccctcagttttcacaacctgccaaaatggctaccaaccagggagcaagtgggagtcctctcacatctggaccctcagcactctttaactaggtatctcggaatcaattcctgcgaaagtgtaagagagccagggctcagtct

SEQ ID NO: 430191 - DNA, 405 bp, Homo Sapiens
cacaggcaaagagaaaacagggctgtttaattaagagtcaagagtcgcttgttcttggctacagtgcttaacatgcaacacacccagcttttggtacagaaatggcaccctaacacttccctggtcagaggactcctgggcaccttaatctacatatccaccagaaactgtcctcttgccccaacagtggtaagttctctcctgcccagaggaactgggatgaggtcattcgttcaaatgagtagccatttacagcacagcaccattgactggccgatagagttgatatttcctcaagttccaatcaagaacttgtatatgtaacctgtctctgatgagcccaaaggcacttgagagtctggctgtgctccagggtcacctgttttcactggactaagtatgaag

SEQ ID NO: 430192 - DNA, 179 bp, Homo Sapiens
  misc_feature (106)..(106): n is a, c, g, or t
  misc_feature (157)..(157): n is a, c, g, or t
gggggacgtggtaccaggtggggctcagcactcatcctccccgagcaggcatacgggtttcgggctgttaggcaggacccaggatctgaagttggggtgtcctcanctccttctccctcttcatctgcatcccggtcctcctctccttcctcctcanaggagctgctcagttcctcctc

SEQ ID NO: 430193 - DNA, 299 bp, Homo Sapiens
ttctatacgaagggctgtttatctctttaactcagcaaaactggaatccacaatctgcaaaagcccgcagtgcccaggaactttttagcttgttttgcactggtcggtggaggagtatgaaacacagtctcttttttagctgcttcaacaggtaggccaccggactcttttaaggactcagcttctgtgttagcaccccttttgttatctctttaacacattgatcttcagccaaaagctttcttttgttgccaggtactatttaagttttctgattttcctgacttttgtggccagca

SEQ ID NO: 430194 - DNA, 517 bp, Homo Sapiens
  misc_feature (368)..(391): n is a, c, g, or t
  misc_feature (496)..(496): n is a, c, g, or t
ctttttcagcaagatggtcttcaaattctgatatcctttcttccacttggtcaattcagctgttgatacttgtgtatgcttcaccaagttcttgtgctgtgtgtttcagctccatcaggtcatttatattcctctctaaaatggttattctagttagcatctcctctaaccctttatctaccttcttagcttctttgcattgggttaaaatatgcttctttcactcagagaagtttgttattacccatcttctgaagcctacttctgtcaattcgtccatctcattctctgtccagttctgtgtccttgctagagaggagttcaatcatttggaggaaaagaggcactctggtattttgggttttcannnnnnnnnnnnnnnnnnnnnnnnattcttctcttcttcatgagtttgtttaagttttgatttttggagctgctgtccctgggtttttgttggtacttttttgtggttgatactgttgttgttgcttcngtttggttttcttcatggtca

SEQ ID NO: 430195 - DNA, 496 bp, Homo Sapiens
  misc_feature (26)..(26): n is a, c, g, or t
  misc_feature (42)..(42): n is a, c, g, or t
  misc_feature (51)..(51): n is a, c, g, or t
  misc_feature (66)..(66): n is a, c, g, or t
  misc_feature (94)..(94): n is a, c, g, or t
  misc_feature (179)..(179): n is a, c, g, or t
  misc_feature (201)..(201): n is a, c, g, or t
  misc_feature (242)..(242): n is a, c, g, or t
  misc_feature (264)..(264): n is a, c, g, or t
  misc_feature (384)..(446): n is a, c, g, or t
  misc_feature (453)..(453): n is a, c, g, or t
  misc_feature (483)..(483): n is a, c, g, or t
cacagtctctgtggatcagcagactnagcctttcctcctgcnactgctgangaatccaggcagccnagaccagtgggtttctgcccagtgaggnacatcccctccaccaagggacagtcaaagtgcatgattaaatggattctgttccctgtgccacccagctgagtgagacccttcancaggagttgtcagacaccctanacaggagcaattctactgacatcaggtcaatgtcccttganatcagagatcccaaaggaaganataagcacccaactttgctgttctccagcctccaggtgtggaagagaaccagatgaatagggcctgaagtgaacccccagcaaaccacagcagctgtagagaagagggacctgaccattnnnnnnnnnnnnnnnnnnnnnnnnnnnnnnnnnnnnnnnnnnnnnnnnnnnnnnnnnnnnnnnccccaanggacagcagctccacaaattccaacttaancaaactctgacga

SEQ ID NO: 430196 - DNA, 526 bp, Homo Sapiens
  misc_feature (414)..(414): n is a, c, g, or t
gaaaaagaaaaacagccatcaaaccaaggcagtaagtgccaggatataggagacagatgaagcttgagagacccttatccggtccatctgcgctgcctaaagaagaatttagcaatttagtgcaccaacttttacaagaagtgtccaaggaattacattatttgaaaccagaggcgaacataattatgatagccatttgtgcgtgtggttaaacacacaccatgttaaaaatcatgccactgatagaactcccacacacaaatagtgcttaatccttttttttcattaatgatttgtaaattgttgaaaaattgtatactcgatgaaggactctggcagtgctgtttttaaataaatgatgtggcactgaccatgatcttctgtaagatgataaaactgttggaacagcgacanctggccacagatgatgtcttcatgtcgcacctgtgttgcgcgggttgctggtcctgagaagcttgccttaggatttccactcacctgtcactgtcagctcgcttgatcctca

SEQ ID NO: 430197 - DNA, 492 bp, Homo Sapiens
ttgctttgctttgtgtgtatttgtttgtttcattttgccaggggatttggtgctcagcccttaccccctatgttttgtgaagcatatcttattctccaggcatgtcttattctccctcccttttatcttgtcctgaacacaggctagggggatgacatggtttccttttaggttttagaagaaacaggagtcttatttgattcctcctttgaaagaactgctgccatgggtgatttcctcattgatgcaaagaaactatgctttgccctacctttgagagcatttacaatagaaagtctacttactcttccagtgaactgatatatacttagtctctgccctgtgtctgggacgctgtgagatgctggtgaatttgctagctggcgtgatggattgtcccttaacttcctgctttcactcccaacagatgattattgttctcctgtgcaaaggactgtgaggacacttgaaataaaaggtagttccgccctc

SEQ ID NO: 430198 - DNA, 498 bp, Homo Sapiens
acagccaaacgcaaagtattaggcaaggctgctgagaactgacagaatggcagatcaagggtggaactgagatgatccaaaatatcataggcatcatgagaatgttaatggaagaatttattatctgagcatcctctgtaatgtcccttccaaatgactctgatctatatagttttcacaggccaggatctcagtggcacccgtatgttctgttcttgctttgtgatgagtctacataattaaagaggaagtccttcctcaggctctgataaaaatgcatcttcttgtagccttcacaaactttcccgtattcacagtgtccccaaattactgcaaaacaagccttataggacttccaaaagctggctcttcagctaaataaagaagagactggaactcgtagtcatgggcttaccttctgacacagactttcatatctttccagaaagatagaatgccagtctttcattaatctccatatccatagtaatcattagg

SEQ ID NO: 430199 - DNA, 543 bp, Homo Sapiens
aaaagggaagtggagtgataatgagaatcggtgggctcactgctcccattaggtgaaattactttttttcaaggaattacagtgaaaagttacatctgtgtggcctatatgacttgctcatttgggatttggaacttaggctttaatattaggctgagatttcctggatgaaattctaaggtgttttagcagtttctgaagctaatacattttcttagccattgtagaattttgttacttttaagtatgggagtggcatactaaaatgaataaccttacaattcagttttttatccataatctactttccaaatatagctctgtttattagtgattgctgaaaaaattcccacagaggaaagagcttttagtcatattagaacaagaattgaaaagacttgggcatctgggtgagaagaatgaaaaaaatataggtactggcttatgtgcctttgccacagtttcacagaaattagagatcagtctcttcacaggaagaatgcacttgattggtaaggagggcaaactagctagcattattcg

SEQ ID NO: 430200 - DNA, 317 bp, Homo Sapiens
  misc_feature (257)..(257): n is a, c, g, or t
  misc_feature (260)..(260): n is a, c, g, or t
agaggcctacttttaagcagctggtggaagctctggacaaggtcctgctggctgtctctgaagagtaccttgacctccgcctgacctttggacccttttctccctccaatggggatgccagcagcacctgctcctccagtgactcggttttcagccacgaccctttgcccctcgagccaagccccttccctttctctgactcgcagacgacatgagccggggagcagcaatgttgtatgggctacgcggcccatggntgnggtctcctcgctgagctgcaacctgatgcatcgacatttaatgttggcagtgtcagg

SEQ ID NO: 430201 - DNA, 541 bp, Homo Sapiens
  misc_feature (527)..(527): n is a, c, g, or t
gggcgctctttttcctggtgactactattcacgctgaactctgccatccagatgcagaaaatgcctttaaagtaagacttagcatcagagcagctcttggagataaagcatatgtctgggacacggatcaagaatacctcttcagagcaatggtggcattctccatgagaaaagttcccaacagagaagcaacagaaatttcccatgtcctgctttgcaacataacccagaggtgtcgttctggtttgtggtcacggacccttccaacaattatactcttcctgcagctgaagtacagtcggccataagaaagaataggaaccggatcaacagtgcattttttctggatgaccatactctggaatttttaaaaattccttctactcttgctcccccgatggagccatctgtgcccgtctggattattgtattcggtgtgatatttgcattgttacagttgcaattgcactactggttctatctggaatcggcaaagcagaaaggaacaacaaaggaccactggagtngaagatgcagaaga

SEQ ID NO: 430202 - DNA, 209 bp, Homo Sapiens
atggttggaaagtccgtattctgcttggaaatcaaaaggaacagccgagttgggaacaacagcagcctggagcagagctcagccaaccacaatcctgtcataagcacagtgtgttgatgtgactgtggtgtccgcactgtcaggggatcagccactggaagatggggctttgtccgaaggcgaaatggaggaccactgggaaggaagtg

SEQ ID NO: 430203 - DNA, 326 bp, Homo Sapiens
  misc_feature (35)..(35): n is a, c, g, or t
tgctcgtcaggctacggcggacattctgcgtgaangaatgtacccgtgaccgaactgcgggccggaattatcgttggcgcaggttccgcggcgttcgaagtcatgcgcgatatggtctacaacctgccagtcttaacgcctccgcgctgggttcgttcacgcaccacgcccattgcgctggaaaacttgctgcactatctggttgcgttgttagatcatccggccagcgaacaccgcatcttcgaagccgccggaccagaggtgctcagttatcagcaacagtttgaacattttatggcggtgagcggtaagcgcccgctggtttg

SEQ ID NO: 430204 - DNA, 356 bp, Homo Sapiens
  misc_feature (58)..(58): n is a, c, g, or t
aacttgctttctctgccatctgctccgcgggcgccgtcagcatgggtccctggacacntccttgcgcgccgtcctgctgctggtgcttttgggagtctgcaccgtgcgctccgacactcctgccaactgcacctaccctgatctgctgggcacctgggtgttccaggtgggccctagaagttcccgaagcgacattaactgctcgggtgatggaagcaacagaagaaaaggtagtggtacaccttaagaagttggatactgcctacgacgagctgggcaattccgggcattttaccctcattttacaaccaaggcttcgagattgtgttgaatgactacaaaatggtttggcgttt

SEQ ID NO: 430205 - DNA, 369 bp, Homo Sapiens
  misc_feature (58)..(58): n is a, c, g, or t
  misc_feature (67)..(67): n is a, c, g, or t
  misc_feature (259)..(259): n is a, c, g, or t
caggacctctccatgagggtccagtgaggagcctgtcacagagcctcgcccaggtggnatgcatggnggagtgactgggccctgacaaaggggaagtctgtgtgaggtagacccctggatgatccggcactgaggttcagtgacaggcagaaaaatggcggccgcatcataggtgtttcaatgggggattcacagcagagccatctccaaggccccacacaagctttcctggagacaaatgccagcttcagacggtccngccaagtcctgagtgcacaacgtcctattatatctggtcctattatataacccaaagactatgactattttttcctaagtcccccttcataggccaactctggggaggac

SEQ ID NO: 430206 - DNA, 379 bp, Homo Sapiens
  misc_feature (344)..(344): n is a, c, g, or t
ttaggcattgtattctccaagtgcctcttcagggctttctgaaatttcattggccccttttttctggctcttgtgtttgtactctagcttttgcctttggtactgaggatttcatttatgagaaggctttttaaccagccaggctttgtctagccctagagtatttagaatgctcctgaaactatgatttcaggccattcaatttgcatctagaaatgccttggttcacctgatcctactccctcatttaagattgagagataatgcaacagagaagaaagactacaggcttgacaaatgacccccaattcagattcctgccagtactagcttaatctttctgnaccatatcaccatcatttaaaagtgcaataatggg

SEQ ID NO: 430207 - DNA, 363 bp, Homo Sapiens
  misc_feature (337)..(337): n is a, c, g, or t
  misc_feature (343)..(343): n is a, c, g, or t
ttttatgaagccttaagaagcactgcatataattatacttcaggtttagatacaatctaatcatagttcaattctaaaataaaggttataggtgaaaccatgaaatttcctaacacttgattttcatacattgcactaattttctaaactgaggatacagtatttacaggtgggtgtacttgtgaaaaactgtcagctgttacgcatgtgtgtatatctaaaactcaagattatatgaactggagataaagattttatgcccgaacagcagaactagaggacaggaagctgagacctggaactgtctataaatatttttcaaagcatgggatctggnaaaggnagagatgtcatgtttcgaaa

SEQ ID NO: 430208 - DNA, 530 bp, Homo Sapiens
gaacagttagtgcaagggctataaggatgcggtcattgatgagaagaagtggtatggaagttggtaacactagttctcattcccccacacaaaaaggagacccatgagcaggaagcaagtttatgatactacagagagagaaggtgataagtgagggtgatggccagggcagaaggaggaattacagaacattttgaatcaccactagtctgttcatattacacagaaaacattcagtttacgccagatgatatcctgctgcattgggggaaaaagtcctttgcagttgtttcacagaattaaactttctcatcttagcagtatggctgctgctaccttttgaagcctcataatgagagccttctcatcttagaaaaggtctgacctagtgtgcttagagttattgtttttcactttttattccagaacttcaaaagcatttgcagagaagtgctatccttacgtagtagacaatttggtaaaatgtccttttctgagttccatggcattattctgaccaccagcaagaa

SEQ ID NO: 430209 - DNA, 146 bp, Homo Sapiens
attacaccagactatgtaagtcatccaaatatggtaatatgtaaatgtacctttggcatgtcaaaaagcaatataaatatcatcataatgaaattttggtatgttaatattttctaagctccagcaaatgattcactaatttatat

SEQ ID NO: 430210 - DNA, 473 bp, Homo Sapiens
  misc_feature (322)..(351): n is a, c, g, or t
ggaaacttaatcatgtatgtgtaattcctcttttaccctggccttttaaaacactgtgccgttgtaatgagacgtttctcatagggaaagatgttagtctcttttaattggacaacactgtcactcaaggcatagatgaaactttccttccattagaaagactaaaagatttaattcttggttgtaccttaatctattttttaaataggtttctttcaggctgcttatttttcattaagatgtgtatcagcttggatttgcctactgtttaattaaaatatttattgtcaaagtttgacaatctaacactctatggtagggnnnnnnnnnnnnnnnnnnnnnnnnnnnnnnttgcctgtgatttttaattggcccatgtctttagaatccaagtggttaagatgtatttgtgatttgaaatatagcatgttgataatatttagctgttggcctttacaaataactttcaaagc

SEQ ID NO: 430211 - DNA, 465 bp, Homo Sapiens
gggttggggagatgaaaagctaacaagtaactaatacctaaaaaaattacagattggaaaacaatagggtgatgtgataaagagtgatgcagggaggggaggtgttcgtgaacccaaatctcatggtctttccattagcgcaacagggtggagaagcacccgaagagacgagggccctgaggcattcttaccaaataagccatgaaactagcagaggcaaagagaccctcctaccctctaccaggacactgggctcgcctctccgataaacttagaaagatgcaacacctctgagccaagcagggatcagagcctccttgagtactggattcaaaatgtgtgcaattctggatgcgggtggctgaaacgggccttctctccaggagacgcaggggaatggtgcctccagagcccctcagactctgccctctcaccgagcagtcctcgaggtccctctccttcagg

SEQ ID NO: 430212 - DNA, 354 bp, Homo Sapiens
ggaattaaaaaaacaggaatagtatggcttattttggacttttccctcatttacactctccccactgaggcactgaagagatactcaggcttctctccaatcaggaactaaacaatggcctggcccgtgagagagagtcaggcttgaacttggccttcagtccaaagccctcaccttggccttaatcacttggaatattacttcaaccttatcttatttacccagagtctccttgggaggtgagccaggaattaataacaatacacctttacttttacttacagccctttacaatttacaagacctttgtacatgcactatcctttgtgagccccataatggtcccgtgtggtg

SEQ ID NO: 430213 - DNA, 337 bp, Homo Sapiens
ccccatagccctcaaagctctcaaaacgtccagttgcagattctacaaaaagattgtttcaaatctgctctatcaaaagaagggttcaacttggtgagtggaattcacacatcacaaagaagtttctgagaatgcctctgtctagttttcatgtgaagttattcctgtttcaaccgaaggcctcagagcgctccaaatacccacttgcagattctacaaaaacagggttcaaattgctcaatcaaaaggaaggttcaactctcttagttgaatgcacccatcacaaagaaatttctgagaatgcttttgtctagttttgatgtgaagatatgcccgt

SEQ ID NO: 430214 - DNA, 347 bp, Homo Sapiens
acttacaatttgccttttaagctgattttagttcaaatgagggctgagttttcccttttcggataatcttaacttcatatcataagtatatttattcttggtttactgaagagaagttgcatagctcatttaaaaacatacagaaagtgatgagtaaatccagaattgtaacttaggcctgtctgactctagaatggatgcacttttcatagtgttagtcaggggatgtgctgaaaatatattatgtaactttgaaaaggccatcactttgtttcagtcattctgaccaagaagggcttttcagaagcttaagtgaaacgcgaaaagatgctgatgaagttttgtcg

SEQ ID NO: 430215 - DNA, 495 bp, Homo Sapiens
caaagaagtattgcataaattgaaaatcaactcgaaatttaccaatatcaaaacaggattcttcaaatttttcttgcagcttttatggccaatttgcataatgctgtgattgattcccaagctttttttgataaaagcttctttatatttgtttctcaaggtgtcagagccccggcaatggaaggtggtaggctcggaggtagaaagaagaatttacccacagcagtataggtttgaaagggaaagttttattagatagaaagaacactgcagcagagtgcagtggggcacttcagcaagagaggactgagcacaccacgatgtatttttccttaggggcatttatggaccttgaagagggagcttaagggtaatttgggccatattacccacctaggccataataaataattacatttgtagacattttggtgccttgatgtcagcaagggttgcacaacgagtttcgacatgtgtgcattccagagatgtata

SEQ ID NO: 430216 - DNA, 222 bp, Homo Sapiens
tatttggaaaaagacctaccacacagaaaagcattgtgtaagcatttgctagtagtttgtggttgttatcattattatctgactccaaatacaatacttttcccactgtcacgtgcagcttgtcaaaaataagtagaaatagcgttagttcccactcagcttctataagacagtaggcattgtggtggacattaaacaccataatcctcacaccactcttca

SEQ ID NO: 430217 - DNA, 466 bp, Homo Sapiens
atctgaaacacaggtcaaagccatgacttagaggttttaacgtaaagaaaatggttccgctaattgtatagaacctctcagcagtctacaacagtagctccaggtcttgtcgtttttctagagaaaagggcctagttttcttctgtggtgatctattaaataaaaacactatattaagataaattggccaaatataggagtagaaatgtgactaagatgtttgaacaaataacatatggaatgctaaacatatggaatgctaaacgtatgccatttttctcctggaaccaacaaaaaatagacaaattcctggcttgggaaaattatctgggcactgtgttttggtttaagtatcaaaaaatttgtagttttcaatctgtgttccactgtgccctttaccataagcagtgaagataaatttaattccttttcactaatagtttcattgctcattttttaaattgtc

SEQ ID NO: 430218 - DNA, 738 bp, Homo Sapiens
  misc_feature (633)..(633): n is a, c, g, or t
  misc_feature (635)..(635): n is a, c, g, or t
taattggatagtaatagaaaagaaggaagagaaagagaatatgcatgtttacaaaagcaaaagcctaggctttggatgtggtgaggacagacatctctgagatgtccttaattttatccacttccattgaatgttatttgcgttcacctcttgtgcaaaataagaaccaaaagggagtcttccttattatctccctttcctctacatccatacataatgtctattgtgcccccaagagctcttctaagtgtctagaacaccacaataatcaaagagacatgatttttccatcacagagctacattcagatggtaaacacactgaggttttaaagagataatattagtggcttgtttaatgtggcttaatctgaagggacacagtaaaaccagaggaggttaatatcccagcacctaacctatataggcagaaacatccaaatatagatggaaggaaaattgacatgaactaggccatgctagcaggaaaagatgagaaggatcagattttaagatagaagcacagtagcagtatgaacctacaggatttggcaggagtttggatgtatttgagcatatgtatataagggtacattctgaccaaataaaggggactcgtgacgaattcggaacnanggcggggcagcaccagaaatgacaaaggcaaagacgttccgcagaggaactctttcatgaggcaggtggccgaagacgctccctgctcgcgtctggccgccgc

SEQ ID NO: 430219 - DNA, 521 bp, Homo Sapiens
  misc_feature (195)..(203): n is a, c, g, or t
attgttcgccgaatccatctcggcttctttgatttcacaccacactggttttgtgcgattgccatttcacatgaacatctggattttttttctcctgtgcttgtgcacatttggagaaagatagtaattttcatccaaatttattctactttactcagccatcagaggaatgttaactgtacatgttcataatgnnnnnnnnnaattctaaaaaagatctatgtctgccaggaagagaaatatcctttagtttgtcaactggatccttctagaggagtcaatagtatttttgtttttgatatgatcttccatcaccattcacagacttctagaatcacagcttcatatgctggttaattctaccatatagatacatatatagtaagatggaggcatttctctcgagttcctttaacactctctgtttctttgatattcttcttagtcattgctgcacttctgacaagtctgaatagagagttgtctttttgttaattgttgaatagatgaagagtatagtt

SEQ ID NO: 430220 - DNA, 489 bp, Homo Sapiens
gggtacatggaagacctgggcgggcaggcgtccttactacgcggatcatgttgcggctgaagtcgcgaaccgagacgtagctgggtgtcccgaccctgcatacagcagtagaagacctgggtgaccgtcagtaccctgtgaattgaggcactcctgaagccatgcgctgagacctggctgggtgtcgctaccctgctgacggctgcggaggaccttggtgggcatcagtaccctgcggattgtagggatgctgaagctgcgcactgagacctagctgcgtatctcccctgcggaaggctgcggaggacttgggtgggcgtcaataccctgaggattgtggcactctttccgcagttccctgctctaggctgcggaggacccgggtgggcgtcaataccctgaagattgcggcactccttccgcagtcccttgctcttggctgcggaggacccgggtgggcgtcaataccctgaagattgcggcactcgt

SEQ ID NO: 430221 - DNA, 557 bp, Homo Sapiens
ggtgtggccctgtggagagcacatgatggaggaaagcaggtgtgaggaagaagaggacagaagggtggccttcaccgtgagagtcttaggcccccaaggtttcaccgtatacatattaaatgctgggaaggttatgagatacatctactaaattcaccttgtgcatatcaaatgctgggcaggttacgagatacgtctactaaattctctttgtgggtccacaccagtcctgttgggtaactcaggaagtatgagcttacccatttaatggatgaggaagctagagggttgttttgtgaaacagccaagggaaatccagagcagggttgccttgcccaggcacagtccactggtgacaaggatgagaggaaggacaggctggagattccacgcccagttctacctctgcctgagagtttcctcatcagtgtccacacacaagaaggttctgtgagagttggttgctgagggtctgacacctggggaaacactggggagcattctcactcacagattccaccacctttactgggttcaggggcacttcagtgagaatc

SEQ ID NO: 430222 - DNA, 534 bp, Homo Sapiens
  misc_feature (309)..(329): n is a, c, g, or t
  misc_feature (466)..(466): n is a, c, g, or t
gaatcaaaacaataacattaaattcaccaaatcccatacttacaactagccttatctcctctatagctgctagctgagtacaagataaatgatgggtgctcaataaattctggatgaatgaattaacttgcaaattaccagtctccagtgtggggtgaccaaatttgagagtagcaaagagagtatgacgaaaggtcaaaaaaaggaggctggatgcctatgttagatccaactttaattttcacataaatcaaaggaattcactaatatttgagttttgagttaaatgtaaaagtacaaacatagggnnnnnnnnnnnnnnnnnnnnnctgcaaaataaataataaatagaagaggatcaggtatatgccatcctggtagcaggttataattgaagatgaagattcatactagtatctgaagaaatagagtcagagatcattggggtacagccagatctgactanagcatccagaacaccgtctcaatttataattgatctctatgagaactggtttgcagtcagtgtgctga

SEQ ID NO: 430223 - DNA, 236 bp, Homo Sapiens
catcttgaggggaacagcatgggcacatggagtgttgagatcgcaggttgatagtcactgaaatgtaggtatccagtttttgcttaattttttcttggtttctaaaatgtctaattctgatacaaataaatgtatcaaaatttgttacctaaaatgtatgtaaattaaaaattcactgtgtaaattcaacatgaaatttgacaagtttaccgttgagatgtgttacctggtcccca

SEQ ID NO: 430224 - DNA, 761 bp, Homo Sapiens
gggcgagccattcccctctggctgtcacctgcacagggccccttggctccctccctcccgctgctcagagctcactcagggcggaaaccagagcggcagatgcagcctaatgcagtctcacagtatctacttgtcagccagaacccagaggaaagtgagctctttccaccatcatttcaaaaagaatgaaagcaacaaccatggctgctggggattaaaattcacaggaaggcaaaactcccagaaacatgactgtggtggagttttaatgaaaccagcagtcacaaacagtgactgattccctacctgcccccggaacgctgtgtgatctcggcttcgctacttgtagggaggcattccaccttattagatttataacagattatctgtagagcaaagcctgcaaagtgtaagccatcaggacacactggatttcaacactccctgttcatagcacaagctgagacgtcaggcctgtgtcttgatcttcaaagaagacacagggaccctctgcactcgcatgctcggaaaatgctggaaccacagggaagatggccatttactctccttcatccttgcccacaatctagcatcgtgaataaggtacttatcctcatgggaaccctcagattgctttctgagggcaggtgcgttaattgaataacaaatttaaggctccaaaaaacggacttggagattccgttattttttagtttagcaaaattgtctgcactaggtcctccctaactttacactcagac

SEQ ID NO: 430225 - DNA, 290 bp, Homo Sapiens
cggaaagcctgaatgagatcattgaaaataaatggaatatgcatgctttttcccctccagattccatagttctcctatatcaaggcagataacagggaagctatatactttattatttggctctttgtagaaataccttcaccaacctaaagtttaacattatgcttttgactttttcttgaaaatggctgtatgtgaaacattcctatacttttttgtgtttagaaagtgtaccaaagataccattcattgtgttgtccggtgcctcttatatcaagacctgtaagata

SEQ ID NO: 430226 - DNA, 445 bp, Homo Sapiens
aaaggggggacggggggaggcttgggtggcattttaaattgcaagctgattgtgcagcctaattttggttctgagcaaagattccagttggaccagaaaacaggacttcaaaggcactgcctactgctggccaggcaaagggagtgaaaagggcagcgtggggcctcgggcacaatgtggccgggaactctgggcaaaggctgggggtcgcggggggctgcagccttgggagcctgctgtgcctctgaggagatcagtggagccgctcctgggaggagagctaattgaggtagcgacttctccttggagagtgagctttggtccaccccagcccatcttgggggcagtcactggacagaactctggcctggtggtcacaggcatgcccccacccaagtctcccccaggagttacagaaacaggcctggttcttatgcagagcgcc

SEQ ID NO: 430227 - DNA, 479 bp, Homo Sapiens
ggcggtggggtgggaagactgcccttgtgagtgacaggggtggggactgtccagagtcataagtgagtggaaggcaactacatttattaaccacttaaaggattgtgattttgattgtgaagaaaattgctctaagggcactccaacattacagactttgttgaaacaaatcaaaacatttggaactgaatagcactgaagggctcagataagaatgcagggtgttgccctccccagccttcatccactgttagggttatcaacagatgggcagagatctcatcaagatgacccattttaaaaggtccctgtgtcagtgcttttaaagtttggaaagtttacccatctgaccatagtaattcaattaaggtgtctttaaagaaataacaaattatatgaatacctgttggcaagttcccccacaccccacttcaaaagacctttgaaagtcctcctcgacaggaaggaacagcccctgc

SEQ ID NO: 430228 - DNA, 301 bp, Homo Sapiens
  misc_feature (140)..(158): n is a, c, g, or t
atatgatttatacatcaaaaagtataaaagatacacaggatagtctctctcctggtcttgtctcctaattacttcacagtcatgtaccctgtttccaaattcttatgcttccagagaacttttatgcatataaatgccannnnnnnnnnnnnnnnnnntgcccctgtacattttaacttcagtgccatccatcggtccttggcatataatgactactccaaaacctttgttagatgaaaggtagagttttcatattttctgtattttctaaaatatgctaagaaacacattttgttctatg

SEQ ID NO: 430229 - DNA, 472 bp, Homo Sapiens
  misc_feature (404)..(404): n is a, c, g, or t
ttaccctgactaggccgtcccatctgggacagctttctccatggctccttcacagactcctgccacactttagaagccagaagtgctggccaaagctgtcagtgattcctttgcactggacagccgccctcacaggagcctctccaaggcctatctgaccagccccagatgggcccagccacgccaatgtatttctgattaggcagaatggaaatgcttcccaaaaaggaggcacctgaagtcctggccacaaggagggacagagctctggtgcatatttctctagaaatccttaaaccctggagacatttctctgggctcttcacagcctatccccttttaccctagaagcagtgggcttcctgagatgacccccaggtgggctaggctagccctgaggcgangaggcaagaccctccttgctagatgtagcagtgcaatagttgttcacatctcaccctggtgaccatgc

SEQ ID NO: 430230 - DNA, 197 bp, Homo Sapiens
ccaaatagaggtattatatacatttatctgtaactctgtttatcttgtatctatattagctttcatcattctcttatctgatccttgttagaaatcaaccatgttgctctggtagacgtcatgttctgctagcattctacagcattcttgcacaagagaaaatgacgatgccccattgcgatattgaattcttaaat

SEQ ID NO: 430231 - DNA, 103 bp, Homo Sapiens
ggagaccaccaggttacctaaggaaaggtgaaacagcccaggtcagaaatggagcaggtcaaaactcccgtgctgattagtactgggagtgcacctgtgagta

SEQ ID NO: 430232 - DNA, 353 bp, Homo Sapiens
gagagaagcagagaacctcgatcttggccagtcgctggctgagcactccaggcaggtttctgtgcagaacactaagcagagatatttccagagacacccagggaaggcaccaggtgaaagactggccttggtaatgcaggaggtggccctggaccattattcttcagctgtcaccaggaattgtgatccctgaagctgcaaaagcctcaggcatccagtttgcatgagcactttaacctccactgaacctgacgccagccagggcaagatagcagatcttattcccatttttaagaggaagaaattgaggctcgaagaaataaaggttttggaagtgagtgctgtggcttatg

SEQ ID NO: 430233 - DNA, 376 bp, Homo Sapiens
gattttgtgttggctggcctccagcaaaagggtagcactttcaaaagtgcatcagctgcagtagtatagggaggatacaagcttgcccaagtatcaggtggtgggcagggctatagagctcccaagagattatgtcctttgtctccagctaccagggtgggtggagaaagatcatcacgttgaggcggggttaggctgtctgagttcagactctccttgggtggagcttgctgcagctgctgtgggggatggagttgtggtttcccaggccagtggagttatggtcccagagggattatggctgccactgctgcatcacacaggttgccaggaaagtgggggaaacccggcaaccacaggcctcacccgtctccca

SEQ ID NO: 430234 - DNA, 367 bp, Homo Sapiens
  misc_feature (182)..(305): n is a, c, g, or t
gtattttatattagcctgtcattttatcattgttatgtaatctatcatcatccactttttatttccataaaacaagcactgttgatgcattttgtctttcctaaatattagcagcataggttctatggttaaaatatgagctgtgggctcaatacttgcctccatcagtagttagctggacnnnnnnnnnnnnnnnnnnnnnnnnnnnnnnnnnnnnnnnnnnnnnnnnnnnnnnnnnnnnnnnnnnnnnnnnnnnnnnnnnnnnnnnnnnnnnnnnnnnnnnnnnnnnnnnnnnnnnnnnnnnntccattatgtaaaaatgcattctcaattttaaattgtatcccaaaacattcattttgaccat

SEQ ID NO: 430235 - DNA, 398 bp, Homo Sapiens
gcagagcaaagtgtacacaacctggaatcacgcgcccctcagaggagggcgtcctgagagccacagggacgtggggatggctccgtccctcctctggagccggaagtcttgggcagctgtggaaagtctaggcctccctcatccagcatggccatagcgacccccctgcaccatgcacagctgcccggctggtagctgccctggccccctggcctctcctcacttttgaggatcccaggcccagcacagacccgggctgcaaccatggaggatactgtgtgtcttggcccctggagagtccccaagccatgtacccaggtgtcaggcttcagggccgtggcgaggagccacagacaccatgctctgatggccaacggtagagcaatttctgcccacca

SEQ ID NO: 430236 - DNA, 324 bp, Homo Sapiens
gataatgtctaaaggaaatgcaagatgagaaagccaagggactgccctaccagagactggatgggctgtctaggtagatactgaagtcacctggagacccacagcaggaggtgaactggagaaggtggccatgagctgaatcttcagcgaatgacagtgagtgccagaaggctactgaatgtcaggagagaggaggaagcatggtaaagccaggcatggaagtctcaaaggagccagggacgtgtaaaggcaggcaacaaccggggggcaaggagaatgctgaccccacctacttagcttgagaacacagagggcaggagaata

SEQ ID NO: 430237 - DNA, 362 bp, Homo Sapiens
ctattactaatccccacttcatcatcagcatattcatgtgcttcactcttgggaaggactcagagattcctgtgtgaccaataaccacattttaagaatcacttttatctaaatcacatcatttagactcataaaatcccactttacttgcactcccttagatcccacctgtaatttggtctcaagggggctgcaatgttattctctttccatgctacatctactattcttattttttattcgtgctattaatccacttctatcttgtatttttaaaaactcactaaaatgcaaagaattatctgccatatctccctgatactaattcccttagcactttactgaataaaaagaagagtgat

SEQ ID NO: 430238 - DNA, 280 bp, Homo Sapiens
gctttgctaaagattttacataaccatgtttatttgtctctaagtttttattggtagtcattttgctaaaaataatgtggctagtcttgaagagatgttgcatagaaagatcattgtacaaactcagcttaacttggcttcaaagcgtatttttccttctaatatttgatggtaatgctgagagattttactcctctctctttccttccttgcatccatcctatcctaacgacaatagtgacatctgaggatgggctatcagctttcagcatttgcaaac

SEQ ID NO: 430239 - DNA, 403 bp, Homo Sapiens
gagagaaaaaaagaagaggagaagtaatggcaaagaaaggaccagaggcagaaggcgagggaagcagggaggaggagcagtggttgtggtcagcacggggaatatttttataggaggcgtggaggagaatgctgcgatagatgtttatttctcccaccctgctgtctggcttcattttcttgatagtgtcctctgacgcacagaagtctttatatttgatgaagcccaatttatctactttgttctttagtttcttgtgcttttggtgtcatatttaagaattcattgcctattccaaagtcacaaagatttctccctgtgttttctgctaagagtgttatgaatttagctcttatatataggtctttgatccactttaagttgatttttgtgtaaggtgtga

SEQ ID NO: 430240 - DNA, 342 bp, Homo Sapiens
gaaagacctcagtctaataagaaatagagatgcatatgaagtactgttgattccagcgtgcattctccttgcagtatgatttcatccactatctatcactcaatcaagatttgagtctgtggggaattgcggtgaaggtgtgcatgttcagaaaggattcgatttactgcttcggagaaagcaaccgaagccatggagggggttgccggggggactggagagcaggtggaagcaagttttagttcctggagcaatctttcaccatcccaacctagaggagaggagtggccagttaccctcatgggcagagtatggcaagcggcattaccatttcacgttgct

SEQ ID NO: 430241 - DNA, 157 bp, Homo Sapiens
gtttgcatgagtgttaggataaggtgatcctgcaacagacttactcaaattgggtcttggtatacagactccctgatggatgcttaatatgctgggtcttgtttctcctcaggggctaaagttatgggaccagaacatgagataaacttaaccctaa

SEQ ID NO: 430242 - DNA, 321 bp, Homo Sapiens
  misc_feature (75)..(84): n is a, c, g, or t
caatttagttaacagcttttcaaatcaacatggtgtttcatagcaattaactgtaattacaaatccaagaaacannnnnnnnnnctgggtaattactttcctgattcttgttccatcattttcatttaattctgaaaaaaatttaactgccattttgacaagtgtttagtgtttttaaactgattgtgtataccctattacataagtactttatgcatacatttctacacacttttccccaatccaaaaatgtctataaatgtttgcagcgactccctatctggaggctggttgcacacttactctcatgcctatgattgc

SEQ ID NO: 430243 - DNA, 285 bp, Homo Sapiens
ggagctctgtgccaatggaggaacaaaaagggggacatccaggtcaaccaactcaaggcaggcaggcagcgtcatcagaaaggctgagcacatgcacaggtgtccaacctgcaaaaagaaggtgtcaagcaaagcagtgcctcaaccctgtctagatctagagagaataaataagcagatgctgttcagtttttaccatctcatgttgaattggtcctaggaactgagaaagaagcttaagagtacagagcgagttctgtggggagaatggggcttaccaccttt

SEQ ID NO: 430244 - DNA, 335 bp, Homo Sapiens
ggcatgatgattagtgcagtaagtcgtaattttcagcatttaggcattctttcaaaataatatatattataggctcctataatccataggaatatttttgcttattattcaccattctttctgcacaacatatcccttatctttgaggggaataatatatctccactgataggtaagagtaccctcaggtcctagaactgataagaagtggagtggagcctttgcaaaatctgttgataaattatttagaactgactgagctggaaaaccaccaggagagaaaaaatttggtaaatgatgtagaaatcctagaaatcatcaatactggaatattt

SEQ ID NO: 430245 - DNA, 351 bp, Homo Sapiens
ggaaatgtgctactcaagactaatagccaaggttaagaacgtgcatactcctgaatcggatgtaaatgcattagtctatttgttctgtttagaaataaagatggaacatattttatagctactgttagtgcccatgtgccttctaaatatcttttgaatagttttacttctctccatcttgacagctaccatgccaatccaagcttccatcaccttgctcctggcttactgcagtatcctcctgtctacccttcatccacttttatctctttccaatcacttgttcatacaacagccatattgggtttttttcaaaacacacatataatcagggcacttctcaacttaaaa

SEQ ID NO: 430246 - DNA, 228 bp, Homo Sapiens
tctcgccaatgactgaaaaggtgacatgtttccaattatatgaatgattgtcttgtggaagaacattttgggattaaattagaactgatatatagaagttgctgaagatattaactcaatataaattaaaccataatgcttttcaaaagtgggttgggctgcctctcaaacaagctacccatctctggaggtatttaggcaaaaattaggtgacatcttctagggaat

SEQ ID NO: 430247 - DNA, 140 bp, Homo Sapiens
tacaatccatcgctgacgccataagactcaacaccgaatagcccctaaaacccgccacatctaccatcgccctcgacatcaccgcagcggaccatagctctcaccatcgatcattcgactatgaaaccccctctcacata

SEQ ID NO: 430248 - DNA, 364 bp, Homo Sapiens
  misc_feature (173)..(321): n is a, c, g, or t
ggtcacccagaacagctcagagcagaaataaaatcttcagaagagacctgtttgatttgattttcccccattttgtcattggaaaaaaagtgttgaaatttcaaattgtaggattcctttctctgtaaaggcctctgagatagccaaatgataagaaaaactcgggagacagnnnnnnnnnnnnnnnnnnnnnnnnnnnnnnnnnnnnnnnnnnnnnnnnnnnnnnnnnnnnnnnnnnnnnnnnnnnnnnnnnnnnnnnnnnnnnnnnnnnnnnnnnnnnnnnnnnnnnnnnnnnnnnnnnnnnnnnnnnnnnnnnnnnnncacacatacaatgagtatatatgaggcttaggtcattgaagaa

SEQ ID NO: 430249 - DNA, 184 bp, Homo Sapiens
caggtccccacatcttatcattctcactagaggcttggatgtcctctttattttcatggatccgcgtcgcaagtcggagcagcaccggcgcgttggcggcaataaaggcaagataccgggtcgatgtggggcgctgtgcgagcatgcgtgcatctcgtcatcgatgagtaaggtggctgatgtc

SEQ ID NO: 430250 - DNA, 360 bp, Homo Sapiens
  misc_feature (215)..(252): n is a, c, g, or t
ggctctatgtcccaagatgaaatcccaagatgatgaaagagtgccttttcacgacgtgacgcaactgcttggctggaactgaattcgtgataaattcaaggggcaatgtggacaggatttctactgtctcttagtgggttggcttctggaaaatgaaacactgggagatgtctcttttttggtgtggtgtcctcctcttatttctagaagagtgnnnnnnnnnnnnnnnnnnnnnnnnnnnnnnnnnnnnnngctgagggaggtgatttggacatcattgggtctaaacctgcctccaaattcattgctgattcatgatccacagaagaatagaaaacacggagcctttcagcccaagca

SEQ ID NO: 430251 - DNA, 180 bp, Homo Sapiens
tgagattttgatctcacagagactgtggagtttaacctgttggtacagtagtggctgaagagtcaaataatgaaatctaaaacacaaagctaaggaaatggaagctggtggaagtgggggaaaaaaatgaacataatgtgctcctggtcaaaaacagcatttagaaataattgacccaat

SEQ ID NO: 430252 - DNA, 280 bp, Homo Sapiens
ggtggaatggctaaatcaagctacttaacatgtgcattgcctcacatacttatttttttgtggtatgaacacataaaatctactctgtcagtaatattcaagtatacaatacattgttattaaccgtagtcaccatgttgtacaatagatctcttgaagttattactccttatctaactgaaattcttttcatcttaaccaaggccacatgaaataagaaactgaatgtgatatttatttctacaatatttctccttcaagagtttaaagttttcaactg

SEQ ID NO: 430253 - DNA, 153 bp, Homo Sapiens
gaacactttagtcattgcccctagaggcttccttttttgcccactaggacaaaaatagtgggctctaccagcatgactgaattcactgaacccagcccccagtgttgactggaagcctctcgggttccttatcggagaaggcactgaaaaaca

SEQ ID NO: 430254 - DNA, 167 bp, Homo Sapiens
gcccagatgaggacttagaaaaacaaacagttggcaaaccagtgcagcaggtgacttccgtgaagccagagcgacaccctggggactgcggtgttgctggagctgacactgctgtgctgcacatgtggctgccaccagtttcctccctctctgggaagtagaatttg

SEQ ID NO: 430255 - DNA, 404 bp, Homo Sapiens
  misc_feature (229)..(295): n is a, c, g, or t
acttaacataatatcctccagattcatccatgttctcacaaatgacagaattaccttctaaggctgaataatactccactgtgtacaagtaagtccttacttaacatcactgataggttcttggaaactgtgactttaagtgaaatgacaaatatcaaaatcagttttttctcatgaacgttttaacaaaatgacattgaatcaaatgacattatttaaaagactgacnnnnnnnnnnnnnnnnnnnnnnnnnnnnnnnnnnnnnnnnnnnnnnnnnnnnnnnnnnnnnnnnnnntaatacataccacattttctctatccatttctctgtttataatcacttaggttgattccatatcttggctattgtgcataatgctgcagtgaatatgggagttcagata

SEQ ID NO: 430256 - DNA, 430 bp, Homo Sapiens
agtaatcattcagccactcacactttttatagacaatgtgaatatatttggctttcacaaatccctcattctaaatgagatacaattcaattcaaatttttaagtaacacagactaattctcagcacctactgttcatcataagttaaaacttgtcttctgttaataaactcttaggaaccaaattacgttacatttttaggctcaaataatcatatcaaaaaactgtaatggaatgaaaaccaaaatgagtagtaacttattggaataactaccaatggaggaaactgctccattaggtagttcttggaggctgaataatctctattcctgagttgatggccatttagagtataggacagtgaatcagaaaacacaggggagaatcatctgagattttaactttaaaaacaaggcttagatgagtgaca

SEQ ID NO: 430257 - DNA, 379 bp, Homo Sapiens
  misc_feature (346)..(346): n is a, c, g, or t
gcttctccccaccctgggcaatcacccctactttccacctctatgtatttgcctcttatggatattttcagacattcttcctaactgtaattatatattctttgaccaatatctccccgtccctcatctcccctgaccactcaagcctctggtaaccatgatgctactcactacttctatgagatcaactcttacaaattccacatataagtgagatcatgcagtactttgataaatttttaatggtgtgagaaaatgtttccaataaaatatacatcaaagatgtcaaatgtataactaataccacagtcttgtgcaaaaaaatagctaaataaataaaataganaataaagaccagtaagtgactataaccaaatgc

SEQ ID NO: 430258 - DNA, 370 bp, Homo Sapiens
tctcttcggcaagctggcagccctttactgtctttatcaggaaatatgaggaatcttccaataggaagtcagcagtttctggtacaattaaccggaagtgtgttggcagtgacatagcttatgagaggcacaagtggcaccaatagagtagaccagttaaaaatgataacggataacggtagtacctaatgtttgcataatgctttgccatttaccaaggccttttgaatgtgttatatgattccattcattcggtaaaaatgtgttccttctgtgttccaagccctaaacatttagctgtgaaaaagtttcctctctcgtgaagctgcacaacaacttggtgaaataagtaggtcaagtactattctcc

SEQ ID NO: 430259 - DNA, 103 bp, Homo Sapiens
gcgagacgtgccgcattaattctgtccgtccgtatatgaagtgtagccgggtaaccacctggaagtccaggcaccggtctgggcttaattctccaatgcgctg

SEQ ID NO: 430260 - DNA, 264 bp, Homo Sapiens
agctcactctctgaattaggtgggtattcctggacccagtgcttaggagggcctaatattatctccagcttttggcttccaatttatagatttctctttctatcaatcaaagactttatagcaaattttaaagaaaacttgtcaaaattaaaataacaggtgttgacatttgcctattattgtaactaattacagggaaaacacctatcaatataactacataatctatataaatgcaatctggaaactgagaagtgaattatc

SEQ ID NO: 430261 - DNA, 481 bp, Homo Sapiens
gactgtgtaaaatggagatgttgaggtaaagtagtttgagttgtcactgaccagcaggcaataattgcttttataggtgccaaaattccatactgtttataataaatagcaaaaaacataaaagccttctttgaagccaaagtaatgcagataagcattcagtttaagcatcagtataagatgcccatttggagtctgtttcaacattcagtaagaataacagcatagtgaagtcaactgtgatgatgggtatccaatacaaaatgcagagaaaggaatggacccaatctggtgtgataccaagcataggtatactgcacctggagtctactctttgaacacatcatcagccagattattcagagctttgtgatactgatcataaggagaatttattggtagtataggatgctctcagctgagtgctctttggggcacttacagaagtagcgattctatcttggaagagtagagatgaagg

SEQ ID NO: 430262 - DNA, 455 bp, Homo Sapiens
  misc_feature (386)..(410): n is a, c, g, or t
ccctacgtatctcatctagccttgcaatataagtgatgatgacttaaaaatttatatcttctgctctgacctgtgtactgaactccccccaaaatactcaactttcaactcatacctccacttacatgattgacaggcatctcagacttagcatatccaaaattgaactcttaatttttcttcaaacttatttttctcagtcttccttatttcaaaaaaattgtccttaaaatgtcaacacagactaaattaaactttatttaataaaactgatagtttcaatagctttcctaaacagaccactgaatttgctaaagtttatcatttgagatttactgaataaatatatctgactccagggttgaggtattgatatctatattgtnnnnnnnnnnnnnnnnnnnnnnnnntttctaagaaataatttgtgtacttgtgatagtatgtaaataaat

SEQ ID NO: 430263 - DNA, 277 bp, Homo Sapiens
aaatatggataacagctttctatcttagaaggctgttgtaagaactaaatggcataatgaattaaatgtccacaataaattagagctattaggatattaaatctatcttgtactttcaaagctgagcatagtgactggtaaatagttgacatttaatagacattaatcgaattaaactgcatttatgctttcaacatttagctctggctactgcacctactgatatgagataatgaatcttccaacttagttgcactctttaaaatcaagaataaag

SEQ ID NO: 430264 - DNA, 232 bp, Homo Sapiens
ttcaaagtacttaataaagcttggtggcgccatcagccatgtttaagtactgtaggttttgaaggaggacatctttcaagattaactatgtaatttgatgagatataaattcattcttaaagataagttgggtttaatctacatagtctgactccattgcacgatgacaaactctttcacttggatctgactgtatggaaataagacaactgccaaaggaaaaataatccat

SEQ ID NO: 430265 - DNA, 490 bp, Homo Sapiens
gaagaaacccttcaaatgtaaagaatgtggcaaatcattttgcatgttttcacacctaacatgacataaaagcattcatactagagataattcctacaaatgtgaggtgtgtgctaaagtttttaactggttatcacagcttattaaacgtaaaagaattcatacagaagagaaaccctacaaatgagaagaatgtggcaaagcatttaaccaatcttcaacccttattagacataagaaaattcatactaaagagaaatcctacaaatgttattatgtggcaaaggttttagtgtattctcaatccttagtaaacttaagataattcatactggagacaaacccttcaaaggtgatgaatgtcacaaagcctttaaccagttctcaacccttaccaactgtaagagaattcatactggagagaaaccctacaaatgtaaagaatgtgggaaaggttttaaccagttttcacaccttactaaacataaga

SEQ ID NO: 430266 - DNA, 298 bp, Homo Sapiens
ggaaacacaactggctccccttccccaggccaactgagaacaaaacattgaacacccactacactactgcattaatcctttcacattttcttaatctgcttcaagcatctttgaaattacgtacattaatttttagatacactcattgtttttgtctagaaagagggattccattaaggttaagaaaatcaaattttaaatggcttttagactttaattaatgaagaaatatcaatgttaatcctaaatatcattttaagaattccaaaggttccacaggattgtctactaatagaga

SEQ ID NO: 430267 - DNA, 245 bp, Homo Sapiens
  misc_feature (95)..(193): n is a, c, g, or t
gcagagatgttcccggtgggcctgaaaaaaaccaattggcaatgaagtgaactgcaaagggggccacgtggaaaggactgtgggtagttcccagnnnnnnnnnnnnnnnnnnnnnnnnnnnnnnnnnnnnnnnnnnnnnnnnnnnnnnnnnnnnnnnnnnnnnnnnnnnnnnnnnnnnnnnnnnnnnnnnnnnaggtccccaagctaagaaagggaagccgcctggcaaatatctcaattgcatc

SEQ ID NO: 430268 - DNA, 160 bp, Homo Sapiens
tggatttgggaagcattgcaaagatgccctatcatcaggaaatgaaatgggaactttttctccaggtaagcaatgaatgctgataattacggccatataagtggggtgccttctccttcctcttgaaaacgattgaggcctagagatctgaacaacccac

SEQ ID NO: 430269 - DNA, 334 bp, Homo Sapiens
ggatacttggaagcagtgtccttgaattcagtaaaacttgactttcgggttataataacattgtgacttacaaagaaaaatctctccttctgtaattgtgattttggagggcatcattgtatgggattgagaaatgaaacaaatgcagtcttttctccttgtagcttatagagctcaacctctgactcatttatatgtagcaaatgtcatccttcttctgtattcattactgatttttgtttcactccacttctggccccctttgcacaaggccacattagtaggtatcttagtagtttgattgatctcagtttatattgtacttactcatttt

SEQ ID NO: 430270 - DNA, 332 bp, Homo Sapiens
attcatcttgagttaatttttgcacatggtgagagggagaggtccagtttcattcttctgcatgtgggttagccaattttcctaacaccatttattgattagggtgtcctttcctcattgtttatttttgttgcctttttcagaaatcagttagttgtaaatgtgtggcattatttctggattctcaattctgttccattgatctatgtgtctatttttgtaccagtaccaggctattttggttactatagctttgtagtataatttgagtttgggtaatatggtatctccagctctgttctttttgctgaaaattactttgcctatttggg

SEQ ID NO: 430271 - DNA, 126 bp, Homo Sapiens
ccgatggtagatctaccccgagatgctgatcaatgagctgtctcggcagggtgtcgcctgctagtgggtctgcgttgacgagctggggcatgtagaggagtttcaggtgctcggagttagcgcctg

SEQ ID NO: 430272 - DNA, 426 bp, Homo Sapiens
atatgcattgagttctgatgcatgtctgaggtcataactgagtaaagaaaagaaagaactttccattaagcaaacactaaagttcagaagtttatttttgaactgcgaatggtttgataattcatgtattcgtctgtcatttctctgattttgtggtcgagatcatttgaaatgcacatgtataaaattccttcatttacattttacttcttatgttagttccatgtgacaatattccacgttctagttcttcattttcttagtatctttcactgctaacatctatggatttagaggaagagagaggaagtgtgtgtattctttctaggactagaacattggacatataattctttttcagtttgatctcgtctgtgttagtacatttcctcaacagttatgtatggaaagcaacattactccagt

SEQ ID NO: 430273 - DNA, 234 bp, Homo Sapiens
cagccttggcttctttcacttagtataatgtttttaaggttcatccccctttgtagcaagtaactactgcattcctttttatggctgaatcatattccattgcatgaatgtgctacattttgtttatccactcatccattgatggacatttgagttgtttccacttttttgggtttttatgaataatacttctaagaacatttatatgcatgtttttgtgtgaacatatgtttt

SEQ ID NO: 430274 - DNA, 259 bp, Homo Sapiens
aatgcctaagaaaccctttcaattcttcattccctgggaaagataatttacatgaaaaagtacagcaacagctgacacgctttgaaaaatgagttgttggccacctctttcatttctacttggcaagttttaggatgaaaatgagatctttccagacaacaccctagttaattttccagttggtctaacactgtatttaagaaacttgcctcctaagagattagttgggccccatgcgttacgtggcaatgtaacccaa

SEQ ID NO: 430275 - DNA, 334 bp, Homo Sapiens
tgagcaattagagtaaaccataatcatacctcctaaatgagtttctgagtgttaatattagtgctgtactcaaaggaatgtccatgttccacatggaaagtgttaaattactgagattagtgatttgtgtgtatatccatctgttgactgaccatctgtatgtgtgtcactgactgttgcgaggcttctgtgttccttagcagtgcctccaggtcaccataggacatttaattattgcatgacttaaaagattcaatacggcaaccacagcaaagagaaaattctagttctgccactaacacttcctttaacacaactctgctcaaacatgtgc

SEQ ID NO: 430276 - DNA, 360 bp, Homo Sapiens
gaggacatccaagcactgtaatgtaaggtgtcactttcaaaggtaacattttatttgatcactttgagagcctgtctccaaagcatggagaaagaatattaatcttccttatatttgtctctctgatcactagaaatttattaacatttaattgtcttgaatttgaatttggttttcaggaagcttcaaagaattagcatactctgagtaaacccttgtaagatattaatttttgatctcaaagggtagttaatttaggttgtttacatgacagattgggacagagttaaaggttaaattctacctttgaagtctaaagataactgaaagttgatgttaataattttataattactgaaa

SEQ ID NO: 430277 - DNA, 383 bp, Homo Sapiens
gcctctttatataatttattaatcacaataccacttgaaactaggtattatttccctgttttactgataaagaaactgataatttttccccaggtcaaagaagctcgtagaaggaaagctgttactttagcatagctctgcttgcacaaaacctacatgctgaacaactgctcactatgctacatggcaagtggacccacttaggacttccagaatgcctggaagagaaaagccaaatgtccctaaatgaattgattctagtgagagtgattgtgagggttacatgctagcgttcaaaattatatagactctataggcatctgttaatctgtgctctaaaatccacagccagattgaaactcaagtgcatgattgtgttatga

SEQ ID NO: 430278 - DNA, 406 bp, Homo Sapiens
  misc_feature (158)..(324): n is a, c, g, or t
ggcgagtcctcagtggagcaatgctaagtctcatcctgggagaggctgcttgcagggctgactctgcctcccaccctgagccatcctgctgtggaagtgaggttattaatttaatgagatcagtgaccagcacaaactacatgtcagaactggatggnnnnnnnnnnnnnnnnnnnnnnnnnnnnnnnnnnnnnnnnnnnnnnnnnnnnnnnnnnnnnnnnnnnnnnnnnnnnnnnnnnnnnnnnnnnnnnnnnnnnnnnnnnnnnnnnnnnnnnnnnnnnnnnnnnnnnnnnnnnnnnnnnnnnnnnnnnnnnnnnnnnnnnntgacataattaatactcattaaatggtcactttaaaaggatgacaaaacacactttgccccatggttgatgatatggtttgg

SEQ ID NO: 430279 - DNA, 327 bp, Homo Sapiens
  misc_feature (93)..(131): n is a, c, g, or t
  misc_feature (135)..(143): n is a, c, g, or t
gatctggacaagaaattcaaaggctccttaagaagaaagtaaataccatggtcactaatgtaaccagactaaatataaaagctacatatgtannnnnnnnnnnnnnnnnnnnnnnnnnnnnnnnnnnnnnntttnnnnnnnnntgtgttttaacgaaacgtggtgacattaatatcaaggatactagattgaagtaacatttcagtgaagttccaggtagtcttatcaaaattgattttaccttaatcaaatgctactgcattgtaggtgctatgctagatgcgtgcctaggcacaggagaacatgattagggttcacttaggaaga

SEQ ID NO: 430280 - DNA, 413 bp, Homo Sapiens
ggaagcatccacactccagcctttcacttactaggggtgtgaccaatgtaaatgatcagacccctcttagccttcatttcctgaactgcaaaaatggtccaacaataaccatctccttgggttgttatcagaatgaaatgggaacttgcacatgaagggttgagcgtgggtctgggcaggcaggcatcccaccaatggcattctgcccctacgcagttcactgttccacgtttcattctcccacacgattttctttttccagaggatgcatcttacactcttctctaccttccctcctccccaagaacttggctcaaggctgagcaaactgcatgctccagaaatgcggtaatatggcaactaacaaagaggactccttccagtgacagtctccgcgggccactccaccaagg

SEQ ID NO: 430281 - DNA, 313 bp, Homo Sapiens
gcctcagccaccctatccttgctacattcatcctgctgtcatcggttcctccttcccctcctgggagcaaggaatccagggtctatatgagtgaccagcatccagcactggtctttttccaggtaaggagttgggagctgtactgcataacctaaaacttccattaggaatttcccacttcacggggaactcgttcccatgggtggatcgagtggcggttgttcagtgccacagataacaaagagtacatcactcccacatgaccccattgcctcccgttttgccccatccaatcattcatcatttctttatt

SEQ ID NO: 430282 - DNA, 356 bp, Homo Sapiens
aaggatacatgtgcaggtttgttatataagtaaatttgtgccctgggggtttgctgtacagattatttcatcacacaggcattaaacctagtacccattaggtatttttcctgatactctccctcctcccaccttcctgtctccaatagacccatgtgtgtttttcttctgtatgtgttcatcatttagctcccacttataataagaatatgtggtatttgattttctgttcctgcattagttttctaaggataatggcttccagctccatctgaattcctgcaaagaacataatctcattcttttttatggctgcatagtattccatggtgtatatataccacattttctttatc

SEQ ID NO: 430283 - DNA, 406 bp, Homo Sapiens
caggattttacactaccacgatggcaccactactcactgtgtcatctgtattttgacctgtttgctggatcttaggaacttgcaaaatcattgaaggttcatctttttaaaaattgtcaatcaggcaaagaatagctagagaattaggttttgctctcctagtcaagaagggcatggatcctttgctacttattgatgtgtctgtgtcttagtgaaccgaagaggcaggtgatctgacaggaatgtcttttcagtgtttgactaactctctttctattgtgaatatatccaaagttctttttgtctttctaaaccctaacccagataaacgcaatgtatttttacacattttcttttcttctatgtgatttcctggaaagaatgaaaaaaactactagttgttgag

SEQ ID NO: 430284 - DNA, 256 bp, Homo Sapiens
caggatagctggatagctttggttattctgggtcttttgtggttctgtcaaaattttaggattgctttttctatctctgtgaagaatggcactggtattttgaaagagactgcattgaatctgtagactgctttgggtagtattgacattttaagaatatttattctcccaatccatcaacatggaatatctttccatttgtttgtgtcctcttcaatttattccttccttccttttttatttttattattattat

SEQ ID NO: 430285 - DNA, 265 bp, Homo Sapiens
agcacctgtgcttgttgatgaacatcataacccgtgtttagtgagcacctgtcttgttgatgaaaatcataacccgtgtttagtgagcacctgtgcttgttgatgaaaatcataacccgtgtttagtgagcacctgtgcttgttgatgaaaatcataacccgtgtttagtgagcacctgtgcttgttgatgaaaatcataacccgtgtttagtgagcacctgtgcttgttgatgaaaatcataacccgtgtttagtgagcacctg

SEQ ID NO: 430286 - DNA, 325 bp, Homo Sapiens
gaaaggatgtgtcaaggaatctctgggaagaaccagtgaggactcagtttcccatgcccaagcctgcaggaatcccagctggagttctgctgacttgtgcatcctgggcccaagcatggcaccacagggcctaatcctgctgagctggttgggggagaaggctactactgccccagtgacagatgggggaggatctgaaaatgcagatgggaaaatcaaagcccaaggcttagctaaacccctcagatcagccaaattgagagcgtgcatatcataagaacaggcttattggctacacatcagcatttctgggatggaaacagga

SEQ ID NO: 430287 - DNA, 201 bp, Homo Sapiens
gctgggcgagtttctggtccctcttggagctttagtgctttcttagtttgggaactgaaagccttgtctgtttccccagactgtgaagaaagttatgagtagtgtcagggagctctgcacagaaactttggccaagatcatttccctcttgtaagctgggtctctctttgagtctctcctcagtgaaagagtggctggttt

SEQ ID NO: 430288 - DNA, 323 bp, Homo Sapiens
gcctggctccaaatcctaaccattatgctattccacctccttaaggcagaactgtaatgtgactagattctagggtaagaatggaaacatgtattttgaatgctgtcattgtgtcactgggcacggatagtattggcaaactttggcaataaatattaacataccttcccactcaaccattgtttgcttaacacagcatacaacaaaaccactcccaataaatcagaactgtctggaggtggaaattatgttatatgctgctagacactattatctctcagtatagaataaatggaaggattagagctgcagagtgaagaata

SEQ ID NO: 430289 - DNA, 299 bp, Homo Sapiens
ccatgccaagcttgctgcatgtatcaaatcagctccttattatttataataatatccataatcataataaagccaagtttggtgttctaatagatggaattctgcagtgggaaaactcaacctctagccataggataatcccttctcccagtgcagggctcctgcatttgctcagtggcctttcggagtcactaagtggctgcatttcgggggatacagggtcacccttcctgattccagtgccagctgatgctctcggggtgtgtagggcctgaccagtgaaccaagacttgttctgg

SEQ ID NO: 430290 - DNA, 414 bp, Homo Sapiens
gagatgataagagggataacctgcgctatgccattttgcttccttatctcactgtgttctttcagagtgtagatatctacccaggtcaaaattcagccaaaagcactattatgtaaagataataatccaaatctttctcccaaatacatgtgtacagaatcatcccccaaggtttagagtcaccaataccctattctgagcttctgctgtatgttttatgtttataattacagttcacaaaaaggaagttagtcttgtttttaagatcagaagtgggtgagaggacctgtgatgaggttcctgagggtttggtgtttactaagtaatatatcttactctaggtgcagggctgatggcaagccaaagagcaactgccttactttgatgtaaacaaaatttgctaaactgagctgc

SEQ ID NO: 430291 - DNA, 417 bp, Homo Sapiens
actctattgccaatttaaatgccgctgtatactctgtgtatcatggctactttcccagtattttgaaaatttgcgcagggtaaggggattttacaagttctcaaaaacatgaaatattcctctacagtagccataccacatgatggctaagtgaaatgataggtatccatataaagaggtgcacctgtgtatgacctctgttcctgctgctggcattaaggtaatagttggattccatttgaaggctgagctcttcctgggaatggttagggaaggctcaggcttattagcattaaatatcagcctagactgagacaacaatttctggcaactttgtgagaatatatgtatttgttgttgcagcccacttttttttggttaacgttttcaacaactgaagaagaacataactgctac

SEQ ID NO: 430292 - DNA, 249 bp, Homo Sapiens
gctagacttggctacttctgaggatgttgcgcagtctcttttttaaaaattggtaacatttgcttggacaagggaccaagctagaaaacattcttccagtgtcacagggaaccaaaataatggcagtaacaatagttaaccaaattgttaactgattggtttagacagcatttccactctgaagatgtagaaaagcaaaacagcccccaggataaagctataaataaaatttttcccggagttttctgc

SEQ ID NO: 430293 - DNA, 349 bp, Homo Sapiens
caagatgcccaaagtggttaaagatgtgcacattggtatggagtggggccacatgggtcacagttttgataaggctcacactcatattcactaagtgatgtcactagtaaatgctaactttcagcagctttcaggacagacaagccttgccagcagatgcagcagcaagtagggatggaggcttgggagtagggagatgtagtagggagactaggaaagcctcgtcgccatcgcgatacgacgcttaaaattcccccatttgggattcactgttgagaaggttaaccattgcgcattttcgtcgtaagtcatattaatactttctgaggaattatgttatcagattgct

SEQ ID NO: 430294 - DNA, 154 bp, Homo Sapiens
atgagcatcacgcctggccaactgaagtgttcttgatgttataatcctattatttttgtaagagacaagaaagtagatttgaattctttgtcatgtgctaagtcaagttttcctttggcaataacggtttctttcatcataaggagctcatgat

SEQ ID NO: 430295 - DNA, 453 bp, Homo Sapiens
gactaactagtaagacgagctgcagcctcatattctgttagcctgaaagtctctttggaaaagtgggatggttcgtggtcttggacaggctcttaaactggggttcgtagaaggttttcaagagatgcagggactccctgaaagtgtacccaaaatcgtagtatttgtccactgccctgggggtgggaggaggggagagcacagctttcttgttctccattcataaggcctcagaaatggttagaaacccaggggtgggaccctctttgctgccccatcaccttcatctctggactggggttcctggtccacaacatagggggctggccgaacccagtgcccagtctcctagtctgtggaaatgaggggtaaggagcaggcagaggaccaaagtgctctgggcttcttggcaagatgcatgaggggttctttggagggacagggactgttctc

SEQ ID NO: 430296 - DNA, 265 bp, Homo Sapiens
atctgcgtacggcaagagctgctgtcagggtccacgtgaaaatggagaagaaggataaggcgatagcagcactaactcagtccatccattagttcagaagtgtgtccttgggcgtgggaaattgccactagtttgccaggaatgagagaccacggaactagaagaatggccagaatgcaaggacacctattgcaggaagaagagcttcttggggtccttgaaacttattggtctgtgggaaatagagatagagtcgcaggtagag

SEQ ID NO: 430297 - DNA, 246 bp, Homo Sapiens
gctttagtcttggtttctgcatcagtaatagggataactattactacttaattgtactgatagcaacctaaggcattatcagcatgaaccacctagcgtggtgcagatccatgatagacactacagaaggtataactcccgaggaagccagaggttcatctttacccacccctgctcaaagggtcgatgttggttgagaaaacgcaattattaatagctgcctattctttttcattctcagttgta

SEQ ID NO: 430298 - DNA, 140 bp, Homo Sapiens
gtttgagtggaggcaaagcgtaacgttttttcacaacatcagagtttttacagtcagaacacatcccagaggctttggatgcctgggaaaagaggcaaaaggtcaaacaagttcaaaaaatggaggttgaaggtcatctc

SEQ ID NO: 430299 - DNA, 406 bp, Homo Sapiens
atatcctaatgagttcaactatgactggcatccataggtagtagcttcaggatggggttggtcagcagagaccaaagtaggacgacagggtcgcaaccctacttccaacctctcgggaagggagaggggctgaaggttagtttgatcatcagtgccaatgatttaatcaatcacgcctatgtaatgaggcttccataaaaacccaaatggactggctttggagagtttcaggatagctaatacctatcctgaagggtgttgttcctggagagggtatggaagctctaagccctttccctcataccttgccctatgcatcgcttcatctataacctttgtaacagcctttacaattaaccagtaagtgtcttgcccagagttctctgagctgcttagctaattaata

SEQ ID NO: 430300 - DNA, 186 bp, Homo Sapiens
ccacaggtaaggtccctcaaggctgagggtggtgccagtagtggaggcaaggcttcagagattagctggaatgatgttgccctgtggcaatgtcacagcatgtcctcttggtctttggagaacatgtagcttgccacagtctgaactctcaaagtgtctgtcaaactcttagttttatatgtattt

SEQ ID NO: 430301 - DNA, 170 bp, Homo Sapiens
cagacagggtctcgcaatgtcgcccaggctggagtgccgtgattttgaatcagtgcaacctctgcctcctgggctcaaatgatcctcctgccttggctcttaagtagttggaaatgcaggcacacaccaccaggccgggctaatgtttgtattttttatagagccatgtt

SEQ ID NO: 430302 - DNA, 241 bp, Homo Sapiens
  misc_feature (142)..(151): n is a, c, g, or t
gtttacatctggtagaattcagctgtcaatctctctggtcccgggcttttgttggttggtaggctatttattactgactcaatttcagagctcgttgttggtctattgagggattcaattccttcccagttcagtcttgggnnnnnnnnnncattttcttaacatattttttctctaatgattcatgctttttgtgtcctacctaataaataaatcctggcctaatacaaagtcccacaga

SEQ ID NO: 430303 - DNA, 330 bp, Homo Sapiens
  misc_feature (164)..(182): n is a, c, g, or t
gattcagtttttgctgaatataatgagcgggtaagatctgtcacacctcccttgccccactctctgtcacctttaccaatccacatctaccccaaactggttcccattgaagaatcctttcaaggaaactcacttaactttttttctgagtgtaaaccccagcnnnnnnnnnnnnnnnnnnncttgtagctgttaattggtgtgctcccctgtgtagaggtgaggagtagatgggttatggattccatgatttggagaagtaaatagacctttttgagcttctgttttcttctccaggaaatgcagatgataactcctgcctccagaccc

SEQ ID NO: 430304 - DNA, 247 bp, Homo Sapiens
ccattgtctgtccagttttcagaatttaataatatggtgggggtggggaggggacacaatagctcccaagtatctaggaaactacaaattttcctcactaaaactccctaaaataactaggttaacacaaactaggaaacaagctcatcaaggaaagaccataaaaagtcattcactgaaaaattgtaaagggctgcctgtataaactattatctgaaaaatgatttgataatgagacccataggaa

SEQ ID NO: 430305 - DNA, 271 bp, Homo Sapiens
tgacgtaccgcgcccggcctctgagggaacatgtggaagccaggtttgcttgagatggaaccttagtgctagcccttcttcctgtaggctacatcagatatttaccatctaattcttataaagtgaaaatgcacatcatgagtgcagtttgcccgtaagaccaaactgatttgtatcttgcttctgaaccctcttctttaattaagaatatgaaaataaaacttttcttacaaggaaaaagtaaagtattttatagcagcttagggaattg

SEQ ID NO: 430306 - DNA, 113 bp, Homo Sapiens
tccacccttgatgtggagcccagtgacgccgtcgcgcacgttcacgccagcatccagtacaaggaagtcattccggcccaccaccagatgctcatctctgcaggcaagcagct

SEQ ID NO: 430307 - DNA, 163 bp, Homo Sapiens
tggaagaaatggagcaggggaatattcctctaactgtccaccttttgtctcttatgtgaggaatgtgtttgttttaatgattaatgtaaagggtctgaaatatctgcatatttaaaaattattagaagcaataattacaagaaaaagtcaaatatttttctgg

SEQ ID NO: 430308 - DNA, 341 bp, Homo Sapiens
  misc_feature (83)..(117): n is a, c, g, or t
ccacaggagcccccctactgatgctgggagccaaatgctggtgctttgagagtcccggagccccggggttcccgccccgctgnnnnnnnnnnnnnnnnnnnnnnnnnnnnnnnnnnnagtacagatgtgagaaggtggtcacacacagatgggtaagcccactgatctacttgtagtcactcagtgtaatcattaggctatcttcaaggaatcattgtgcagtcaaaaagaggattcaattatttatgaatagggtgtgtaaatacagagttccaaacagggtctgggtgcaggatgaggacagaagaaaacagagaacccaaaaggggcaagaggttggt

SEQ ID NO: 430309 - DNA, 339 bp, Homo Sapiens
gaaacaacatggataatatttattaatagctcatgtacatattccataactacataagccatttggcttcatacctgtcagcaatgaagtcagctggccctagcacgtggctgcgactcttctctatttatttagaactacaaactacaatttacacttttccaaaagctgtaggactatttgggaagggcactttattcttctaaaaggttactaaattctcttgtatacttatactgatcacaatactgaaaaataatagaaaatccattgtcattgatttaccacctaatttgttagatgccagaaaatcaaatttcacacatttcaataaaaagg

SEQ ID NO: 430310 - DNA, 263 bp, Homo Sapiens
ggctgaatcaaggtatgccacgggtgtatttggaatcagatgagccacagcatgctgaaattatgagggaccgcaaactaaagttagcaaagatgggtggcagggagcaaacaaaacaaatgggcttaaagaagcagaggtgcaactggagaacaaacatttggcccatgaaacccttgagagaaaacctgaagagccaagccttcaaactacctctgttttcagcagtaatccagtcatgtgtatccctaaaatatgcatcc

SEQ ID NO: 430311 - DNA, 173 bp, Homo Sapiens
gaaaaagactaacattaataatctaagcttctgacttcataaactagaaaaaacaacaatttgaatttaataataagtaaaagaaggaactaataaatgtagaagctaaaatcagtaaaatttttaaattgaaataatataattctgtagactccttcagaaaatataagttg

SEQ ID NO: 430312 - DNA, 277 bp, Homo Sapiens
gggaatggcaggtatgtatgcagtggccattttttgatgggttgttcagcagctctcctcttgagcccctgttttcttgtagagccatttccatgggcaccaactgggcctgactgacctcctagccccaggcctagaggtgggcatgatatgcagctccagcaaatcatcctatctttggaccgtagcaactgacctagtgcttttcttctggaatcatcaaggggacacttcctttttttgccactgtggcatgtaaggacaatgtgaagtatgt

SEQ ID NO: 430313 - DNA, 397 bp, Homo Sapiens
cattgtggggcaactgggtgaaggcacctttggcaacgtggtgcagtgcttgcaccacgccacaggcaactctcaggttgccctgaacaccacccgcaacgtgcgcaactacaggcagcctgcccggccacaaaccaacgctctcaccaaaatcaagcacaaccacacagaaaacaagttcctctgtgtcttgatgtctgactggcccaacttccacggtcacacgtgcatcagctttgaccccctgggcaacaacacccttgagctcctcaagcacaatcactcccagccccacgccctaccacatgtccggcacacggcctaccacctctgccaccgcctcacactcctgcatgagaaccagccgcaccatacagacctccaaccacagcacatc

SEQ ID NO: 430314 - DNA, 159 bp, Homo Sapiens
gactgagttccagatctgggctgtcatggaacataacagggacccttcatggggacagcaagaaggttcaccgacccaattcagaggaaggaagagcctggccttcaaaattactatgaccatcagaatgccctaggagatcaaagaaataacggagtg

SEQ ID NO: 430315 - DNA, 174 bp, Homo Sapiens
gcacagagccactcagaggagcatgtccccgggccctggctctacccgctgcccttggtcttcagccagcctgatgctcctgattcactgttttggggcatttctgctatggaaccaccctgaaaattatcaaattaggcaattacaaatgatctttgattcattattgaaatg

SEQ ID NO: 430316 - DNA, 182 bp, Homo Sapiens
ggaatgaagggttgagggtacataaggggggagaatggaaagaaaaggacgattcactcagacatagcccctttgctactggagtggacagataaatatcaaaggtaactccgcagcctgcagccggtgaactcagttgaagtgcaagtatctaaaggaagtgaagttgaaagtgtgattta

SEQ ID NO: 430317 - DNA, 229 bp, Homo Sapiens
gaagctatttcatactctggtgcaaggtcaaaaaggaaacagcggcacgggaaggaataagtcctgaattagtggctgcatcacagccacctggcgccacgcgcgaaatggcacaaaaggaacggttgcgacaccctgcagagcttttgggggtagaagagaggattgatgaactggggtggaaagaggtactgaaggattggtcagagaagtcccgttagggtggagt

SEQ ID NO: 430318 - DNA, 220 bp, Homo Sapiens
aggtgagattcacggaacacattgtcactactcagcaaataataagaggcaggtataagtatgacatcattgaaatacagtctcataggcggttcctctgtgtgctggttactgctctatttgtggaagcagcagccttattcaaattaaccttttcacgcagaggggtggagggaggtagtgagtaatatgcggcagtcttttccctgaaggtgatgtg

SEQ ID NO: 430319 - DNA, 285 bp, Homo Sapiens
ggtggcaggtacatgtacaagggaatatagagatatcccaataagtgattctaaagctgaactggaaatataagctgaataaggtaggagtgaaggcttaagaaggataatgaacattgaagggtaggcaagatcaatagtgagttgtagatccttttgagatcaaagaattattggagttcagggtgttgaagaggtataattcaaaataaatcaaatagcagaggtcttcgcaaattaataggtactaaatgctatgttttcaaatgaatacttaacaacttt

SEQ ID NO: 430320 - DNA, 263 bp, Homo Sapiens
aacatgccaggccaacaaattgtctcaagaagaaattgttccaggtcgattttcccaccatctcatttctattatttttgctttcattgagctgcacagttgagtgaaagatcacagtaggaaattcatgtggaaacatccttctcattgtttttagattacattattttaattttgtttatccctactcttcttctctatcttgttaactttcatatacttaaataccctttacaacaaagactatacaataaagtcatttt

SEQ ID NO: 430321 - DNA, 308 bp, Homo Sapiens
caaagttacttcaaaactaaaacttgagattgatagctcttcattttaaagtacgctaacatgaaaatatatataattatcataaaaaaagaacccaaaccctcctaaaaacaaattttactttttaaatagataaaatatataagaactttttaaagagatacaattctttaagttatgctttcttcttccacattaattttatctttaaactaatatggaataataacctataattatttaaattaaaacttcagtaagattttctctactcatattttgtttaaagcttcaagaagaattcagac

SEQ ID NO: 430322 - DNA, 159 bp, Homo Sapiens
ctgaataactgtggcatgacttatcaaaacctcaaggacacagcaaaagtgatgtttaaaggaatgttcacagcattaaatggccacatcaaaaagactgaaagagcacaaacagacaatctaaagtcacacctgaagtaaccagagaaacaggaacga

SEQ ID NO: 430323 - DNA, 178 bp, Homo Sapiens
caatgcgacgattatatgcacgctgaccgcttgctgtgcccagcactgcccggaaggcgtgatctgcgtgatggccgatccggttaattctagcatcggcgtgagaggaggaggtttcaagaagcatggagtgtagagcccggacaaagtcgtcggcgtgacgatgctggacatcgtc

SEQ ID NO: 430324 - DNA, 402 bp, Homo Sapiens
gtatctatgaccttggtccaactccaaccccaagaacaaatatgcttccattcaactaaaagtggtgccacttaaggctactactatgtctcactcaatgagattagatcctgcactacttatgtcagcctggatgcaatccatgctatctctgaaatggtgctgttttattcaacaaaaaatcagtcatattgccataacctgtccccttcatctttatgtaattccgaaataccctgtacatataaaaattataaattggttcccacaatattcatacaccaagacatcccattactttccataaatatttctcagaattgctgagatactcgatttttggatccaagctctgcctgaaatgaagaatggacacaagatactgggcggcagaactaacat

SEQ ID NO: 430325 - DNA, 357 bp, Homo Sapiens
cttaaatacaagtaaaagattgaaagcagactcccaagaaatatttcttaaattaccaagatgtgctatgttctgcattaactatcttctaatctatccttacagaagttctataaaattagtcttgatgactacattttactcataaaagaacagagctcaaagaggtaaagtggctttcccaagggtgagcaccctgggattagcaccagaaacgaaatctgggccaaaggtttccgattccatgttattgtttcactcaccatgaagtcctctgtcatcaacaccattaagccacacacacttccccacatgactcagcttcctccactctaaaaatatgttatggagctagct

SEQ ID NO: 430326 - DNA, 193 bp, Homo Sapiens
atgccaccgcctcctccttctcctcctcgaactcgcactcctcgggtgtgggtcctggttgcggctggtattcagattccaggtcatgcatgttgcgctcggaataggctgtctcatctcgtctatgcctgtccgtgtacaattgaagaaggcttgtgcggaacatggcagttaactgtcggagatggcttga

SEQ ID NO: 430327 - DNA, 318 bp, Homo Sapiens
tgagactcataaatgtaaatttttttaaaaggaatttggaaaatcatattactaaagaccaattccacaatcttcttaaaattattaagtaaacattattacatctatatattaatgtggtgtaccaatttactacattcatattatttcctaccccaaatattctgcctgaaatttagaggccttcagctaaataatatagatgattattctgtttgcatttcacttctctttgtgagtatagttaaattttctataatttcttaaattcctgtagttctacatcaaaagaaaataggaagcacatgtaatgattcc

SEQ ID NO: 430328 - DNA, 424 bp, Homo Sapiens
gaccagggccactttatttgtatagagacttcagagggaccgggggctttagcggttggcagcgatggtgcccttaacccatccctcaaagttgtataacttggagtagaccccaggccttttttttcaggtacagccatggtcccaggatacaactcctttgagctttccgttggagatcatagggccataatagtcacgctggaaggaactcctgcctctctcagtgtaggccatatagtaaatgtttttggttatttatctagggtaggaggttctacactcagcctgggtcataaccggagcattcaggcatttcagctcgtctgggtaatcttgaccataacttatagtgttgcgtcagctgtgtatgagtcactctcttcagcatctggagttgctgtgtgagtaatatgttggacac

SEQ ID NO: 430329 - DNA, 118 bp, Homo Sapiens
aagtagactttcactacagaagaatgagaaaggacagaagagttcctcagcagaagggcataccggtgctgtccttgacctttcatggcatgtgctactcagagatgtcttagcaacg

SEQ ID NO: 430330 - DNA, 301 bp, Homo Sapiens
ggcctcctcctggagcctcactcttctcagttttgtctgtgtgaactctgttattagaacccagtggttttacaagtctttttcagggacatgtatgaggaccactggaccagctctggcctcgggttcacatgcccacatcctgcagggcacagtgagtgtccttctgtccctggcatggccatcccctccaggtcagggcagttggcctcgggctccgggcctggctaccccggttcccatcaccagccttctgatgcagcgagccctggtccttgtggtgtctgaggactcagcatcc

SEQ ID NO: 430331 - DNA, 368 bp, Homo Sapiens
acccccaatatagccaagaaccagggctggaagtcatatctacccttcttttaatcagtgccaggtctcagattctgttaaccatcctaagtttactttgagtatttttctattgtttagtattgtaaatatagtttctgcttttcatcaccacctgtttaggcaagtgcttaaaaaattgtcggttttgttatttatcttgaagattgggccaatgtagtccttttacattgtaaatataaggagaagcatttcatggaaagcaagagctgtagtttgtataatatgctgcaggttgccaatcttccttttgacctgctttttgaattattattttgagtttgcgtgaaccaaccgttgtcaatttc

SEQ ID NO: 430332 - DNA, 234 bp, Homo Sapiens
agggtttacattcacagtactgttgtagctattttaaaatttttccttatataagtttaaataaacttaaaacatttcaagtgaatagtaatatagtcacttgaaatacatctattaagcttgagaatcattgtctaatgggataaatttaatgatccttggcatagtgaagatagcttttaatatttgatttttgtgtacggcccctaacaaatcgaaggaaggaggttatga

SEQ ID NO: 430333 - DNA, 173 bp, Homo Sapiens
  misc_feature (43)..(86): n is a, c, g, or t
aaaaacaagctcaacagagtcaccctttgcacctagtcacagnnnnnnnnnnnnnnnnnnnnnnnnnnnnnnnnnnnnnnnnnnnngatttgttggcagcctaaggctcaggaatcaaaacgtgtgtaaatctgatcccgggggaccgtggcactgacagtcattcaactttc

SEQ ID NO: 430334 - DNA, 124 bp, Homo Sapiens
ggctatcgcgcgggagcacagccaagggaacgggcttggcggaatcagcgggggaggaaggccctgttgaagctggctctagtctggcacgatgaagaggcatgagaggtgtagagtgagtggg

SEQ ID NO: 430335 - DNA, 257 bp, Homo Sapiens
tggtggggccacaaggctccacagggatagcagagtgagtggttcccagcgctaaggacaaggcggttggacatgtgtaggtgtgtgtagatatgaatagttgtagatgtatatagaacgaggcaaggacgtgccacggaaggggcgcgagtattcaccaggcgatgacaccagaatgtagcgagtcaccactacgggagattacagtcgcaggtgaaagaaggctggagtttgtggagctaggggggaccagctgt

SEQ ID NO: 430336 - DNA, 504 bp, Homo Sapiens
gactcacagttgtgcatggctggggaggcctcaggaaacttacactcatggcagaaggcgaaggggaagcaaagtacggcatacatggtggcaggagagagagagcacacagggaaaacccctgcttttaaaaccatcagatctcatgagaactccctcactatcacgagaacagcatgagggaaactgctgccttgatccaatcacctcccatcaggtcctccctcaacacatggggattacaattctagatgaaatttgggtgggaacacagagccaaaccatatgaggtggttatgacatttttaaaagccaaatccctctagcaggagcttcagcacctgggtagattcagggtgttccttgaacacctttgggtatagacaacatgttccttgtgcagaaagacaactctcttttcttctttgaggttctccttgcagggtgagtgtgctttggagatatactggagcctgctgaagactaaaatttatgaattagatt

SEQ ID NO: 430337 - DNA, 312 bp, Homo Sapiens
aaaaccaccacctggcagtttacaaagcttcatcacatccattatctcaccccatattcacagtaaatgtctgggattgtaatagatgaacaaaatatggtgcagagtgattgagatttgctcagggtcacacggccagcaactggccacagattctttttactcaaaagtccggggccctgtggcttgtcccagggctcttgggttaaatgctgccttccagctacagcaccaccttgggcatgaggggacgggagctgagggaagctgccctgtggcatggtgagcccgggctgccctgggtggcagggg

SEQ ID NO: 430338 - DNA, 365 bp, Homo Sapiens
cttgtcgaacaaggctggagactgtatcaggcacgggcagcagagtctgtcttgaactgagctgtgtgactggacatccagagtgcttcctcttctgagcttaagtcttttacagcacagtgtttgtgacggtgcccttccccagaagtagtgcctcctcccactcccctgagtagttaagtcacatctgctgtttgttaccctagctgtgttgtctctcggatgtgtcatctttggggtgagcttagtctactgggaaaccggacactgggcagggggcagagcttgggaccatgtgttcattgagtgatgcctcctctgacagctgtcatcctgagccagtcagggcgcgtctgagaatgaat

SEQ ID NO: 430339 - DNA, 310 bp, Homo Sapiens
ggaaatcttggaatactagcattgtttggggccacttccttgggtcatgtttaagtaagatttgcagcagcccatagatgactcactgaaatttaatcattaatggaatattttataaaggggcagtttataaatgcatagttgaagtacagggaaaccacaagggatggcaccacccccaggggctagtgatggcagggacagttatctgccctggtctgaagggttaagaggagaggagggagccctctctgaagtggagacagtgaggtgtgtgtgcagaaggccacctgacgtgtctgagaccttc

SEQ ID NO: 430340 - DNA, 232 bp, Homo Sapiens
tgcagtatcggtcggctttcaaattggccccccttgccaaaagcgtctcaggcaaaaacccatctttccgggcctttttaagaattttacgggcttcgtgacttaatggaagtttgtggccctggaagccccgaaatttctttacaaaatggactccacatggttttacatttcccttgtcgccttcgggaatgtcacctattgccagggttcccctgtgaagacagcctcg

SEQ ID NO: 430341 - DNA, 160 bp, Homo Sapiens
cacagctatgagcaggtgagattcagtgatcaaaactgtgactattccagtaaaacaggcgcatttgttcaccaactactgataagaacaacaagactagcattcagtttagacaagcagataacactatattgttacaaagaagaggactgattttaac

SEQ ID NO: 430342 - DNA, 298 bp, Homo Sapiens
gggaaatcccagttctaacgaggggagcaaatgtgggtacaaatgactttaggtaagtgtggttcatgcagtaatagagatattacaaaatgctttagaagcaccaataccataatgagtgggaaaaggaatccaagaaggccttctgcaggaggtggcttaccctgacttctctttaaggaagaatgggaattgatggggcagagaagaagagggagagaattccaggctgaggaggaatggtgatagtggctactactcatcgaaggcatctgttttggaatctttacatactaca

SEQ ID NO: 430343 - DNA, 370 bp, Homo Sapiens
cttcacgtttgacatttttggtattgtcatcctcccggtctttactgagtaacaaaaccagcaaggcctaagagggaagatggagacgtggccaggacagggtcgccttgtgtcgggcaccaggaccgcagtgatggaggcaaactgggttcgcctgtgtgctgagcacccagggcagatgcagcctcgcgaggaacgcagcctggagaggctcacagtcgcagtggcatggctgggcaacggaggacgcgccaggagcaggctcttcttctgcccctgctgcaggcgctcagtcctgccataatctgggaggtgacctctgcttttccccacctgtggaccctacggggcgcctgccctgtggcagtct

SEQ ID NO: 430344 - DNA, 118 bp, Homo Sapiens
aggcctacgactgacttataatgatgaactcagtattatacctccttaacacaaagaaatcactctattgatggcaatttcaggtatcacagcaggtgtatgggggaatgctgtattt

SEQ ID NO: 430345 - DNA, 405 bp, Homo Sapiens
gattccccacacccaagcccatgaaaaggcaaagctgctctgcaacttacttcagccagagaggcagggtgcacagccagccctcactcacacacccacgcacacatacggacaggctttccctagcatcctgcactgaaaatgaggagactgttcccttgactccctgcacagtgccacattaacattttcagaagctactggatacacagaaggcttttcctgacaaacaaggacatccagagatctaatccctgctgacaactgctttgtggaactttctgtccttttcagacatgcctacttaaatctattctttaacctctcctgcaaccaaatgtagccaattaaaaattgtacttaccttcaacaaaatgggaaaattactcacagctacaaggtggc

SEQ ID NO: 430346 - DNA, 410 bp, Homo Sapiens
  misc_feature (222)..(329): n is a, c, g, or t
gtgcctgtactggtcccgagccagcacacccagccccaaaggcgcgatcatgaagggaaacacacttggttctcaagtgtgcattccagcttcccgggctgaaccggctccacagcagcaaacacaacagggcagatctgcggccacactgcctgcccccacctacccccacctactgccacttgggcagttgctaagcctttctcagcccctagcctcaannnnnnnnnnnnnnnnnnnnnnnnnnnnnnnnnnnnnnnnnnnnnnnnnnnnnnnnnnnnnnnnnnnnnnnnnnnnnnnnnnnnnnnnnnnnnnnnnnnnnnnnnnnnactattcaggatgtttctattattacctctatttatcacattcacacacatgcttgactgcacccttcgttaatcctagag

SEQ ID NO: 430347 - DNA, 424 bp, Homo Sapiens
ttaatgccaatatgtgcatcttactagctgatcgcccatcatacaacaacacattctgcccctttcctttctaatcactcccctcaaggcctcacttacaatccaggttagtggatgttggagttcaaaaaataaggaaatataaagattatcactctagaacaaagaagtatcagggactttgtgccaggacaacgttaagatagttgtgcattgagctctctaaagaatgggttcagggacaccttgcaacgagtttaggaggaccacttatccctcacttcttcgtttccatggagaagacaccatagggtaatactattcctccacctgatacctccctcatctcatggctggagaagggacctacctgattcacaagtttggaagaagagacccaatcgcgtagatcagtcccttctag

SEQ ID NO: 430348 - DNA, 132 bp, Homo Sapiens
gcacgagataagaaactttccaaattaattaaacttgtttaaggttgatactggccagagactttcctgtcttccaatttaagagattttgatgaacatatgagaattacattacaaaatatggcaagacgg

SEQ ID NO: 430349 - DNA, 414 bp, Homo Sapiens
  misc_feature (135)..(336): n is a, c, g, or t
gcacgagacacaaataagcataaatgatttttgagaaatgtgcaatcctttctcaatggagagagtatatggtcttttcaacaattagtgctggaccaatgggacatccataggcaaaaaaattgaatcttgatnnnnnnnnnnnnnnnnnnnnnnnnnnnnnnnnnnnnnnnnnnnnnnnnnnnnnnnnnnnnnnnnnnnnnnnnnnnnnnnnnnnnnnnnnnnnnnnnnnnnnnnnnnnnnnnnnnnnnnnnnnnnnnnnnnnnnnnnnnnnnnnnnnnnnnnnnnnnnnnnnnnnnnnnnnnnnnnnnnnnnnnnnnnnnnnnnnnnnnnnnntttgctttgaaaaactgtcaagaggatgaagaaagaagctaaagactaggaaaaaaatatttgcaaaccgtatgcctg

SEQ ID NO: 430350 - DNA, 252 bp, Homo Sapiens
cacgagcacattcccagcagcttctgggtcttcttgctgattcttcccaagcagccgcaaggcggttttcttttgttcttgggtgtttagagcctctgtttacaagtggagcagcccatgtcccaggaagtaggatgtgccactgctgcactccctgtggatgaggactcctgcgctcagcacaggttccctaggcaaccacttctcactggcccagacgtggctttcagagtcctcgcccaggaccctggc

SEQ ID NO: 430351 - DNA, 277 bp, Homo Sapiens
  misc_feature (195)..(195): n is a, c, g, or t
gtgtgccagtggctattaaataaaatcacaaataattgtaagccaccactaaatgcagagtgagactatgaagtgcgaaaacaccactttcaaaatacaacaaagacagctgtctcttttcaaagctgacccgaggaggctacacgctttccccaagcagggtatcaatcttgaaacattctggccttctcttgngaaatgcttcagaaaacaagagtgacaatattgcaggctcacagcatccccacctagcctgggaaaccgagaccagcaactc

SEQ ID NO: 430352 - DNA, 107 bp, Homo Sapiens
agctatgccctggattgcaacagaacttgaacagaacaatgcttgactgacaccagggcgtcccagacattacagaggatctgggagaatacaccatactcctcttg

SEQ ID NO: 430353 - DNA, 365 bp, Homo Sapiens
gattctcaggaagggattccacacacaccagaaaacccacgatgcacaagaatagttcccgatgtgcaaagtgtttaaaatacagcgataaaagaagaaacggcagcacagaacaactggtgtggggaacccagctgggccccagggacagtgcagggagatttgcagggtggggtagcatgcccgccactccgatcgggcttccccggggccactctgttacctcctatcctttaaagcatttaatcctagagatgcacgatgccaaggattgcaccccttgatttgcctggctcagaagagaatctgacaggctaggaacgaacaagcaaatgaatgaacaaatgagaaagtgaacggacagt

SEQ ID NO: 430354 - DNA, 349 bp, Homo Sapiens
cagaagaaaaaaataacacaatatataatcgacaaagtgcaatacagattgtaatttttggaagccttcagggaaatatagtagctttagattaatactaaatgacagaaaatgtgtatagatgagtacaaaggaatgtggggaaaatagaaatattaaagcaagcaagaatctaagtcaaaatatgaggttgagcagaaggtttacactggactgtagtgagaatagataaagtaataaggatccagtgtgaagtttttgggttgttatatttttccttcttaatgaggattttgcatggctattttctgtaagttttgcgattgaccagtctgattctcattgacat

SEQ ID NO: 430355 - DNA, 391 bp, Homo Sapiens
agattgtaaaggctgtgtaattgtccagctcagtggatgaacaaagacccacaccaaatactgttattgtcatatttcagcattggagttaaaaagaagatcataaaacttccagaagtacagatttcagacacatgatcaggagtaaatttggcattctatcaatattggaataagaagccagtagagcaaaaccaccctctaaattttggaaatgacttttaatttgaaattctaaaccaagtcaaggtattacagatattttcaaacacatatcatttttaatgtaattatcctccatgtacttttctgagaaagctattggtagatatactctaccaaaacaagggaatacatcaagaaaggtgaaggtgtagtattcaggaatagt

SEQ ID NO: 430356 - DNA, 400 bp, Homo Sapiens
cggctcgagataggcggagcaatggagttaccaagaccacaagagaaaattagaatgaccccagagtgctgaattgggaatgaggacgtcctgtgcacagctggcctgctgcctcccacgtgtcagggctggctcgggagtcaggagaggctgaggaaccttccagcccaaggagctggacaaggtgtggcagctgcaggcagccgggatagggacgcagactttcctacagggagaggcactgctgagaccggggcccacgtgggaggggctgtcggtcatggccagtctcaatgacaccctggttctggaggggacaccattttctctaggaaacacacatggactgttctgggtgcagggaagtccagtcggcgactgactcttaagtgattcacga

SEQ ID NO: 430357 - DNA, 193 bp, Homo Sapiens
ctgttattccaatgacattacatagagtcattttcctatagttctagacaggctgattgtgagcatcatgcagaaaaaatacacaggtaagaatacccaggaaacatatgaaaaagaatactaagaatcaactacccttatcaggtattaaacacattacttaaaagccccaataatgaaaatggtatggtac

SEQ ID NO: 430358 - DNA, 252 bp, Homo Sapiens
agccatggttaaattcaaaaccccaaattcacaattgatgatgtctcaatatatgcacacaacatgctgacctgttcctgtttaaatcccttgtcccaacctcaagtggattgcctagtaattctttccctaactgaatcattcttccactgtcggagataactatttcacatcttcttctttatgttcaacctttaatcctcactctcgatttatgacccagattcttatttcaatgagaaaattcaagca

SEQ ID NO: 430359 - DNA, 173 bp, Homo Sapiens
gaaataacagcagcaaccatgctgtctaaagaccattaatgtaagcagatcctgaagtaactgtgataattatggtaagaaatgcaaacagttgcttatggtagttaattgacgcaaatttctgtagttcaaggcaaatttagagacgagatggcctgcctgttaggtaaaga

SEQ ID NO: 430360 - DNA, 295 bp, Homo Sapiens
agcccacatccaggctgggcatagaaacgcttaagcatggagttcctgggtgtcctcatttctgtccagagttgagagcttgccctgtggccttctccctggggagctgtgtgtactcagggtcacatgattcctgcaacagtgggttccttggtcttcagtttgggtgggaacgtttactctttcaggagtacccagaaggagaatcgagacttgtagttgggtggaaacatgctggaattatttaggcgttaactagacaatgggaaactggtaggtagaaccttaatccctg

SEQ ID NO: 430361 - DNA, 100 bp, Homo Sapiens
tataaatgttttctaagtgtattttcattgttgataaacatagtatcaagcacactccttctcaccatctgtataaagatagtccttagtgctggccagg

SEQ ID NO: 430362 - DNA, 282 bp, Homo Sapiens
acaagccaccatgcccagccttatctctctccttttgtcaggtatattagtccattttcacattgctgttaaagacacaccagagactgggtaatttataaagaaaaaggtttaatggactcacagttccacatggctgaggaggcctcacaatcatggtggaaggtgaaagtcataccttacatggcagcaggcaaaaagaaaaatgagagccaagagaaaggagcaaccccttattaaaccatcacatctcatgagacttattcactaccacgagaacag

SEQ ID NO: 430363 - DNA, 326 bp, Homo Sapiens
gcctgaaactactttgactagcattttggctgcaaccttcttttcttaactgttcagtatccctctgtgtatttttatttggttcccttaattggaaataatttaaaaaacataatgtgtgactttcttgcttactcttgaataacatttaaacttcagcctcacttgtctaatttcagttctgaggtatgttctacttgttgcctcctcaaattgctttgccttcctgaaaagtttttcttttgattctacatattttcaggggagggataaagatctaagcataaatatcacctccttagatgggtcttttttgaccatcctat

SEQ ID NO: 430364 - DNA, 215 bp, Homo Sapiens
tgactgacaaagctgacacgctattaccgaacgcattacatgctgcagctcactcatcagctcgtgtgataccaagcacagcagctgagtgctgtcacctatcagctcgactcgcacagcacgacactgatgagcgctaactggaacacgacagtagacagtctctataaggagatgcggtaccgatacctaaaagaccagatggcggaaatcat

SEQ ID NO: 430365 - DNA, 389 bp, Homo Sapiens
gcacgagaaaatgtatgctgaagtttcctgtttaaaaactggtaatacctttaagaagattttttaaagactagaaaaagttcggctgatttcagaaaatttagaaaattcaggaagtacaagaagataataagggttcttctatcacgaaaggggaagaggcctaaaaattccttcgcattgtaaattcaggaacctggtagcctctgagacatacataaatgtttaatgaaaactcagctagaaccacgggcattaaaaatactctgtgaaatacaaagtctagaaatagccccaactgtacctagaaatctactgtatgataacagtggtatctctaaatactgaggcatatatggactttaaaataatggtgttgggacaagcag

SEQ ID NO: 430366 - DNA, 411 bp, Homo Sapiens
  misc_feature (296)..(310): n is a, c, g, or t
ggttaagacgaagaactgcaggcataaagttagggcacgaccttggaaaaagctaaagtagaactgaagtagactccaagtcctctaggactaagagacgacaacttgttaattgtttcaaagttgatcctgattctggaatgaggcagagatcatctgggggctgcagtgtatcttttactcatctgttagatgaacaaagaaggtgacctttggtcctcccttcgggaggtagggcccaaagactcaaagctgctgagatgtgtttgacttgattgtaacagcccatgttcatnnnnnnnnnnnnnnnggaagcaacagacagacccaagggtggttgccagtctgtaatctctcttgaaaccatctcatctgttgagccaccattgctgaagcacataaaagtacttc

SEQ ID NO: 430367 - DNA, 444 bp, Homo Sapiens
  misc_feature (406)..(406): n is a, c, g, or t
cacgagggaaagtgctctcgaaaataggaaaagtgaagtgctgcgtggaattgtgaagagtcatggcaaatcatcatcatcgttatccattcagagagaaagtgatattgacaaacctacgctaaaagaggattaagaaaccttgcattgtgagctgtgtcaaagcaatgaaacaaaggataatgctttctcgtacacctgtacacctcagtgcagcaccgtgcaagctctagtaggaatagtgctactgagttagctggtgacattcgttgcagcctgtgcctttcccttctccaacctcttccttgacttttcctttgccttccctttttcttgctctcttccagagagagctcaaaggcatttgtccatttctcacccattccaacagctctaggggaaactntaggaaaagtaaaaacagccatgctcaccagttctctc

SEQ ID NO: 430368 - DNA, 220 bp, Homo Sapiens
  misc_feature (102)..(113): n is a, c, g, or t
cctttgggtatataccttatagtgagaaagtaaaagctacaccagctactccattatggtcaagccaaaagatctttgccatgaatttcaataaatctagcnnnnnnnnnnnnaatttctgaagttctatgacaaaacaatacagatattgtgtatacatttttatgttcccctttagcttatagcttattagcttatatagtacttatacatttgactc

SEQ ID NO: 430369 - DNA, 331 bp, Homo Sapiens
tgctctggactggttcagcaaaccttttgggctcacgtgcatctgtggccagtagggcttgtggctgagccacagatctggcttttggctggccattggtcagggtgacttaattctcttccatgtggtctcttatccttcagctgactagcttcggctcattcacaaggtagacagacacagggttcctaagagcaacaacagagtcccagttcctaagcctcttttcaagcctctgcttgcattatgtttgctaatggcccattgtccaaagcaagtcacatggtcagctcagattcaatgagtgaagacatagattctacatcatgat

SEQ ID NO: 430370 - DNA, 122 bp, Homo Sapiens
cacgagtacacaggacaccttttctttgatgaggtgggatttttccctttttatgtggcatactagtaatttgtgacctaagaataattttggaataacttctattaatatcaactctgaag

SEQ ID NO: 430371 - DNA, 355 bp, Homo Sapiens
  misc_feature (192)..(192): n is a, c, g, or t
  misc_feature (265)..(265): n is a, c, g, or t
  misc_feature (328)..(328): n is a, c, g, or t
gggcgagtgacttgcctaagggcacagaaggaattagtggtttgtacagactgaaatgctgtgtccctgagaaggatgttgcactgcctggtcaataaagtctccttctttactgaaaaatacatcagcttgcctcatgtggatgtcctgagacataaatgacagatgggaaatgaggggctttgtaagatntaaaatgctgtgtccctgagaaggatgttgcactgctttggagccaggatctgataaacagaagaacagtganacactgggataaaaaaatactttgtacttatatgaaaaaataaacgtatgttattaatatacnaagagctctaaccaatcaaatagaaaa

SEQ ID NO: 430372 - DNA, 370 bp, Homo Sapiens
atgatttattggctgtctttctttgtatttattttttgccattgggtgaacagagtaggctatcaggatgtactatttgtattcatgtgattgaggcagaagcagtacatgaatactaaaaacaattgtaactgatgctgggagtatataaaggaaagagtggcttgcaattctcttcaattgtaaaagcataattcttacacacttgtagccctctatacttttccatgtatttctcattggaaaccctcagccatcctgggaggtacgcgacctggcactcctaacactatcccctagatgggctcagagcctatggaggctcagagaatcctcccaggcctgaggccagttagtgagcgcggagatg

SEQ ID NO: 430373 - DNA, 455 bp, Homo Sapiens
cttgatataaagaaataatgcaaggtaagaaggactaggagtactagggaaaggattacaattttaaatgggatggttaggactggctgtaatgagaatatgacatgtgaacagaaacgacttgttgtttttcttgtatagaaatatttgttctttgtggtgatattgttagtgtgggcctgatattttgtttttttaataacacagatttaattctgtgctctgtgggtgatctcctttttaggatagctaaaatgaatcaccttggtccagagccctgctgtacactgttgaaggggtctgtaagttcgatcttcctgtctgcatgcatgggcgggaactctgcctttaatcaggctccaccagctgtagcaccagagcactgagtttgtggcctttgtatgtcagaatgtgcatagctgtaagagaagttttgtcagtgtgaatctgagggt

SEQ ID NO: 430374 - DNA, 373 bp, Homo Sapiens
aatatatggtgatggtattagaagtgatggggagagcatttggatatgaaaatgccttagcttctgatcataatttgaatgagcagaaaaacatacgaaagaaaaaagggagaaacagattgtaaattggacccaatggagaatgatcatcttatagaccattctaaatatgattattccactgggtagagcatgctgaacaatggatgatatatatatctagggcccagtggtaaaaatatgagatggcgaaggtagagtaataataaagacattggaaaatctgtcccatgaaaatgactaaagccacttggctacaataaggcctagaagggaggaaagccataattttattattcataaaggcatacca

SEQ ID NO: 430375 - DNA, 322 bp, Homo Sapiens
cacgagaaatcattaagagttagctctgcaagtcccctgattagtaaaaacttcaatgctttgagggcctttatcccaaggcttacctaaaaggcacccaaaacaagtatacttaggataaaatgcatgggggctattgtgccttaggggccactgtggatttttggctgggcctgtggttacctagtgaggccagggtgatgtcagtagctgctatcccctgacctagagggccaaagcagtgcagttatgctggtgccactgctcagatagctcatggaagccccctgcaccacgtcttccatggattactatgcagcag

SEQ ID NO: 430376 - DNA, 410 bp, Homo Sapiens
ccgccaggtactggcaacaaattgttgtcttttttttaatagtttgggacaattaagctgagatttctctgtgcccagatttggagcctctccaacctttaaacttcattgcccagtagagtaaccaactgtgtttgtgggagggatacagactattaaaaatcatttggtagggagcctctggaggcatacgcaggctttcatcctcccgacttctccatcacatggaatccaacagactccaattgcttgcgtagtcagtgaacaaatgaatgataataatgtgttgtcatctgtgcctgctgtccctcacctggtctcctctgtgaccaaaatcacatctttcttagtgagggagcttagccacgtcagggacttcacgtgtcatcaacaacaagagcagaacggca

SEQ ID NO: 430377 - DNA, 245 bp, Homo Sapiens
ggtgttcatcttcagttcttaaatctgtttctgaattatgctccctatgaaagagaaagggggcacagttcagaccagggtcctacctatattttgaatctgcaagagtctgccttctgaaaattccaaataagtgcctttcttccatcttggaatcctgtgtgtgttcccctgcctcaatgtatccatgtgtgtgagagagtatcagtccaagaggaagcacagattgggaagaagcaggccag

SEQ ID NO: 430378 - DNA, 482 bp, Homo Sapiens
  misc_feature (386)..(386): n is a, c, g, or t
ctcttcattggagggcttagtacggaaacaaatgacaatgctcttggagcagttattggccttattggacgaatagtgataggactcttgctgcttgaccgggtaaccaacaaatcaatatgatttgctttagacacctttgaacgctcagcgtacgctctagatgcatccagagacatgaatggaaagtcattagatggaatatgcatcaatgaggaacaagctaccttaccatcataaggaagtgtcagacgtggaccgccttcactctgcaagatgtagacgccctccttgaggcattagaggtgtaggatgatgatgtgcagaaccagcctacctccctaactgggaggacacatggatgactggtgatactacatgaatcntaacatcagttctaccatgggaccactctcagtatatagaggacaccaccattaagtggagagctactcctagacattgttcgtcatgaccagttc

SEQ ID NO: 430379 - DNA, 349 bp, Homo Sapiens
tgcacaaagacacactaccctaaacatacagacctccacctcctacaatcctgaacacacagacacatgcatttgtcttacaccctcagactacaaatgaagaaatggattcaagctgaacagaggcagactgtggttgatgcaggcatcagccacctagatccctccttgatgaatgacttgcttcaccatttgctgggaatactgttggaagatagacttggctctcaggccctcccagggttgcttcagctatggagagcacccttgctgagttctctccactttctggggaagcttcatatccagtggctaatccaagcaggtgtaaagcggctgactaaggaca

SEQ ID NO: 430380 - DNA, 174 bp, Homo Sapiens
ccctctccagccctttgttacaaatgttccattctggtccaacttcaggattcaagatcaacttttctatagcttccactgagaggatctaatagcatttatctcctttactcatgtgcagcttcttaaaaatgattacttctacgaggtcccctaaggattcataatactcta

SEQ ID NO: 430381 - DNA, 127 bp, Homo Sapiens
atatcattagtatcaggcatccagctgctacttcaagcttgcattttccaatagtgccttgcataggaggcgtgctcagtaaacatattgcatttgggtggtccgattggcgtcatggcttctaaac

SEQ ID NO: 430382 - DNA, 346 bp, Homo Sapiens
cctcagtcaatgacaccatcacccacacagctgtctaagttagagcctgagagtcattttagatttcgctttccctcactattcgcatctaatttattaactaatctgatcaattctaactcatatacatctccctagtctttctccttttctccacgtcaacaatcactgccctaagactgttatcatctctctagtggcagtttgtaccgcgtccgtttggtatagctaaaactactttcccagaattatttcctcgtcgaaattcaggttagagttggacaaaagaatttgagtgatatttgtgaggtagaagagaagccacagccattaccctctgacagct

SEQ ID NO: 430383 - DNA, 381 bp, Homo Sapiens
gatggaaagaaagttctacctatgccaagggtcaatgcacagtactggtaatgatttgattcggcagttttattagcagccatttctttgacagactaataaaaatgacttacagattcttttccaagttatcttatataaatggattatgatgaaaaatgtgtgaaccacatttcatcttctttcttgccttctgttaaatatgtgttcagcttagaaattaaatagcacaggatagaacttgaaatcataaattctgtgcatgatatgtagttcaaagggattacatgataattcacatgtagagaattgtacaggatagttgggaaatgtttctcaaccctcagagaatgctcactaggcacatgcataacatgtaga

SEQ ID NO: 430384 - DNA, 334 bp, Homo Sapiens
gtgcaaatccatgtcaaaagaagttcttcatgtacttgttttaaatttgaatgggctcttctctgctctatgtagaatatggtcttaggatcacagattcattcctttgataatttcagagcttatgaaacatgttaaccttattaaaatcatgttaatcttaaccattatcaaggccaaaacagacttggcgtgcagaccaggagatctcataggaaggatatcacaaggagtgatcatatctgattttgatgctgggaaacttgtgcctgcctccactatcctactctgtgcataggcacttaaacagttctctccccaaaaataatccagt

SEQ ID NO: 430385 - DNA, 318 bp, Homo Sapiens
tggtaaccctgactctcgccaaaacaggatcacactcatcccttgtagacccactttttcatgatctcgacataatatcctatatttgctttaaaaataacaataatcacaagaatagtggggagcgggagaagagaagagtgtgaaattcaaacacccattatctattttgaacaattcaaattgaataggcctgaaattgaaatgggtattgtggcagtagtcttaatgcaaacttaatgttaagtccttctcaaactgtttttaaaaaatctccagcattatttcatctctgacagctgaagcattcagaaagac

SEQ ID NO: 430386 - DNA, 402 bp, Homo Sapiens
gctgttataagcaggctccacatcaccactgcccccctctttttactgaggacatataattggcctttacaatgagtggtctaattgtaacccctttgtatgtacagcaggattggggagtacccttgaagattcatagattgtaggaatctgtcatttgtgaccactgtaggactgtctaattttagcagacacatctgccatcgaatgtgagtaaatgtttgcaaaaatttaaataattaaattggcccaggaacagaaatctctgcctcttaagagggcttcgcctggcctgcttgagcccgtctgagtgaaccacatgtgtgctggtagggaatgcacgtggaataggaatgacttctggctcgtccagagctctttgcactcctattaatactactg

SEQ ID NO: 430387 - DNA, 336 bp, Homo Sapiens
  misc_feature (247)..(285): n is a, c, g, or t
gaaacatttaaatggcaaatgaatttctttaacttttcccttaggctgtatgagagatggtaggaatttgactaagcaagtaccagacacatatctgtgtatgatataaggcttttgttaggaatactaaggagttgagaagtaaacttctgcattaatatcttttccttttgtagtctgtggttgtttttcatatttagaattacttacactttaggagaaacatacttcgtcagtgtgtaaaacnnnnnnnnnnnnnnnnnnnnnnnnnnnnnnnnnnnnnnntttttaaaatccaaagggagggcagattgagttatttagaaaagatcaatg

SEQ ID NO: 430388 - DNA, 100 bp, Homo Sapiens
cccatccccagtaaagtagcttaatagcttaaattaacaaaaagcgttcaaataagactttcttggtggtgtggagaaagtcactacaataatgtagttt

SEQ ID NO: 430389 - DNA, 107 bp, Homo Sapiens
gcacgaggtgcctggcacattttgttactgaaaactgaggtgattatatattcccacagaataatgaaaaaataaactatcttgtatattgaaaaggtcacttaatt

SEQ ID NO: 430390 - DNA, 118 bp, Homo Sapiens
gaaaacacaggtcctctgcctcctctgtgcctttctccatcatgcctgaaccatgacctgtgggtattttttaagaaggcaggtacaaaagtttatcaattttcagtatttagcaacc

SEQ ID NO: 430391 - DNA, 106 bp, Homo Sapiens
accaccgggtcccctggtctccatacgcactgaggataattactataacatgaagagcacgatgggtggtggacggcatgtgccacaaaagcttcccagaagcagc

SEQ ID NO: 430392 - DNA, 354 bp, Homo Sapiens
caaatgagtggtaaggacagttttgaagtactatctcagcacagctttcacttaactttcgtcaggtgggaatgagcaagttaatatttgcaacagatattccctgctacattcctagtcaaaatttaagggaaaacaaccatttctctctgttagaaaagctgctgatacctttttgtctctttgtaagatcagcaaggactaaaacctgtgttatcttcctgagtggacttatgatatgtttgtggtcaaaattaaagttgaatataagttatggtttgttttttatatctagcacatcaacattttatcagagaaccatgaatactgtcttattagtttaaaaatatttgc

SEQ ID NO: 430393 - DNA, 224 bp, Homo Sapiens
gcatgagcactgcacctagcctacttgttatatttaaatatttgtttcgtctacaatttattttggtatttggtttccaactttactaagtttttaaccattgtcaatatcacgtagttgaataaatcatcttttccctgatgatttgaaatgacttgtttattacgtatcagtagcttcccaaaacttaggcagtggatcttaaccaggaatgtgcatcagag

SEQ ID NO: 430394 - DNA, 383 bp, Homo Sapiens
tttctgacaatccttaggagctctgccatcctttcagttaccaagactcaaatcttagaggaaccaaaagctcctcttttccctgatctccaaacaatcaaagctcggtaagctctccacattcttctttccccacactggttctaacacccgttctttttccttttgtcaaggccatcatcccatttcacgtcatctgaatgtcagatctgatttttagccatgatttcctaaagggcatcacttcttatgaccaaagtaattggttacatttcacttcattagaaggaaaagtttgtaagggaagtgatttccgcatatcttttcactaatgtgttatcctaatacctaaaactgcctagagcatacacagaagacactca

SEQ ID NO: 430395 - DNA, 219 bp, Homo Sapiens
aagaatagaaaattgagaaatcattatgctagagtagtaatcaggaaggaagccattgcctctgatctcagcgtcttggcttattgctgttcccactactggaatgttctctcccatttccacctattaaaagcctgtccagtcaaaaggtagcatggtcaagcagtccaaggtgcaggatgtagttggctttagtctctgtggagccatgggtttgag

SEQ ID NO: 430396 - DNA, 353 bp, Homo Sapiens
  misc_feature (137)..(145): n is a, c, g, or t
ggcagcactgagttcaattcctcccaattgctctgttctccctcccccagtactcagagatgctctccacaccctgaagctgctgctgggctgggggtgagctggcgggggaggagtgttgtcagcaattcaggacnnnnnnnnnctatgtcttcagtgcctctttcagggatataaagttaaaaccaagtactatgagtgctcacctgacttttgttcttatgaaggtgtttttgtttgtttttcggtatagattgttgttaacttggtgtccttgcaggggggactatcagtggagctttgaattctgcctccagatccagctttacatctggtgtcatttcccttctgct

SEQ ID NO: 430397 - DNA, 434 bp, Homo Sapiens
gtgtgtaagcactacataattctattttagattattaggatttgtcctactggcattactgatatgaagggagctaaaaagccttgggacaactagacttttgtttcttgagcacatttaaatttgagccttctttgtaggaaaaattatacttgattgctctactctaatttcagaagcattttgaatgcattattgaataaattttgagttttatggcaggcagcagggagttgggcaaagatttgaaagaatggcagatgactttggccttctcttctaaccttcttatttggggtatggacaaagataggaggtatgaaattgggctgaccaaatacgatgttatttttcagaataatattcagtgagcatgtacatagtgttatgcatgaactgcgattttgagcatgaggctcaggagacccgtatgt

SEQ ID NO: 430398 - DNA, 259 bp, Homo Sapiens
ggacggttaagattgggactggttagatggagaggggcgttttatattgtgttatggcatgtggttttgtattgataattgttgtgatgaaatttatggtccgagagatagaggagacagctgtgaggtataagtataagagtagcaggtctatggagttaggatggtggaaccaggtgcgtgcaaaagtaaggcagagaatataaggtggacctgggtggatctctagaagagcaaatgttagtaggattgttatgga

SEQ ID NO: 430399 - DNA, 374 bp, Homo Sapiens
  misc_feature (321)..(331): n is a, c, g, or t
gacatttaacaaaacaactttacgtgatactgagatggcattttttcaactggtgtctaattcttgaaattgaagcatcaagaaaaaatcatttaaaaatgttttaatctctctcgttcagtagtagcttcaaattagtttgtgatgtaggagaggtataaatgacaaattaatgaattctcaaactgatatcgaataatatgcacaattttatgcatactaaaaataatctcttaaaatctgtacgtctgtgccatgaaatcactgttcaccaaaagcaagacatttggaattttatattaggtttatattatccatggnnnnnnnnnnnggtatatgaggaatgaaaaagtgaaataaatgttttgataaag

SEQ ID NO: 430400 - DNA, 479 bp, Homo Sapiens
  misc_feature (349)..(349): n is a, c, g, or t
  misc_feature (450)..(450): n is a, c, g, or t
aaagagattttcaaaatttacaaatttcccaattaatgttctacaaagactctcatggtcagtaggcctagatcagcttccgagttttggtgaaatgcatttcttttcacaacggctcacagaaggctcatgtcaaagcagaggagtacttgctggagaagcagctcaaagaattcctgatcaaaggagacagcacttagaaccagagcagctcccgcctcggcaggcgtatgcttcagctctcccagagcgagttctacacaaactgtcttctcaatccacttttagaccagaactgttggtctgataggcactggaggtacaagtgcaacaacactgccgcaggaancacagttgcctggggaacagtctgagctatgttagttttcagaggacagctcacatcgcactgataaaaggctgagaaaataaatctactacactgacganattagttacaaagaaggaagcacccacct

SEQ ID NO: 430401 - DNA, 420 bp, Homo Sapiens
gcaaagccaacaaagtagctctccacgggggtgtccgtttccagaaagagcacatgtgttggcagctgtgggtgctacagaggcctcagacacaacagcaatgcttcagcaggagagggacgcagttacaaagaaacaagatggaagaccatgtgtggctcttaaaaattaaaattcctgattctcagctgtatttcctttctctctgacaggcttggctttgccctaatttggcacacttgggtcagagagcagctttccttgccctcagcaatttgtcattcctcttttggtttctgagcacagctgctttgcatgtacggaggctgggctgtctgagctctcaggggtacccggctccctgggtagaacgctctcctgcccagtgcctgccaggacctcctggatgcgttcttgctc

SEQ ID NO: 430402 - DNA, 380 bp, Homo Sapiens
  misc_feature (145)..(170): n is a, c, g, or t
  misc_feature (234)..(234): n is a, c, g, or t
  misc_feature (309)..(309): n is a, c, g, or t
cacaatataaaaaacagtaagactgttagtgctggtagaagagtcgtagaaattatatctcatggtgctcttaggcaagattttatgagaccttctgaaatgtaatggttatctaagttggagactatatattaatactgcatcnnnnnnnnnnnnnnnnnnnnnnnnnngcgacagactctcacctcactctgtcgcccaggctggagtgcagtgcgcgacgttggcacaganaccatctgcttcctgggttcaagcttttctcatgcctcagcctcctgagtgtgctaggattacaggcgtgcgcanccatgcccagctaatctttgtgtatttagtagaggcggggtttcgcatattggccaggctggtgttgaact

SEQ ID NO: 430403 - DNA, 139 bp, Homo Sapiens
agaagtgggagcgtgagactggaggtcaagtgtgtcaatcaagtgcaactttaaaccctcatcgctggctcagaagatcggggtgaggatctcaaccccagtgtagacatgcggggtgcatgtgataggcatggagggg

SEQ ID NO: 430404 - DNA, 451 bp, Homo Sapiens
cagatgtgtggtggccaagttgtcccaaattggcccttgattcctgtatatcctcagccttcagttcttaatgtgatatcagtgtgtgggattaaactaagcacactcatgactaaaagagtcactgtttttggcaagtatttaaagtcagttttgttattgggaaaattttaatatagccacgttcttttggaggttacaaagaccaatctctcttttcttacttgctatttaaaactcctcaaactggaagtttatccgcatgcccaaatgcatccctctttgtatttgtttaatcttgatcttgtttgaaaggagctttatccagaatacaatttctttattcagaatgaaatttctttcagatattaggacagcttagatacaattatataattaaaaatctttcaactggattttactaaatccatgactgtattagcctgtaaaa

SEQ ID NO: 430405 - DNA, 455 bp, Homo Sapiens
tgcgtatgtcatagcctaggagctacacttgatgttttggaatttatcttgatcgttagaaagccacagaaaattgtagtacatattatgcttcacagcataatcaactaaaccaaacaaattttcagtggtaataaaccaagaagacttagccaagaattggtatgagttttgtaggacacttccctaagatgatcttgcatgatatttgtctccctctcatactggctcggagtgccccagttgtatttctgacagtagtgctacctacatggctgtgttccttacatgaaacatgcaggttatagaccccatcatactcagcgatgtgggatttaactacactgcagctatagaacttggagacaggaacactttgcgaattgtctccattttactccatagcctcaggctggtggtccacctgacaggaggtgcaaatgactaagaatgtc

SEQ ID NO: 430406 - DNA, 457 bp, Homo Sapiens
ggggtcagtggtgatatccgtgttatcatttctgattgtgtttatttgaatcttctcttttttcttctttactgtctagcaagcagtctatctattttattaattttttcaaaaaatcagctcctggatttttttaaagggattgtcttgtctttatctccttcagttcagctctgatcttgatgtttcttgtcttctgctagctttggggttcgtttgctcttggatctctagttccttcagtgtgatgttaggttgttaacttgatatctttctagctttttgatctgaacagttagtgctattaattttcctcttaacactgctttagcagcatcccagagattccggtatattgtgtctttgttctcattagtttcaaacaactttttgatttctgccttaatttcattatttactcaaaagtcattcaggaacacattgttcaatttccatg

SEQ ID NO: 430407 - DNA, 420 bp, Homo Sapiens
gccctcaagggtgagcaggatctcacgcttgcatgctccctaagcacacgccccaactctgtacctgtcatcgggaaatgcgtgcgtcagggtggcggagtttaaggtcccgtcctcgccgaaacacccgcagctgtgggcagtgacgaggatcattttgggtccagaaggagggcacctctctgccctgggggtgactggaaagaaacaggaggtcagcaaagagctcaagtcccagtggatgtttggcaacttcggcaaattcgggagccagtgtcttggttcaaaacaacagaagcccagcaatgcggctggggctggagtggagttggacggggccgctgatggcgttggacgaggccgttgatggagttggatgaggccgctgatggcattgggtgaggtgactgatgtagttgg

SEQ ID NO: 430408 - DNA, 411 bp, Homo Sapiens
acctacttttagcagatgcctaaaaacatcgaatgtactaaatacatacttgtcaacttcctgctgtaaccaacctaggcgcttgaactggaagtggtgtatgcagtgaatccccagagcctttagaccttatacctcaaggctgagaaacccacacatacattcattctctgccactgcccctatactctgcaatgaaggggagggttttgccctccatcccaccttagccaacctaagcccttccactggctttctacaggctcatttgggaagctcccttgcccagattatcctgaagtggaccctgggtccaagtcttccgccagtccatgactgatgctatgcatgttctggaagatgggattgctgtttgtcctaagagctgggtgctaagtatctacctcccag

SEQ ID NO: 430409 - DNA, 414 bp, Homo Sapiens
cggcatagtgtatgatggatggcaggctccgttctcaggagatggctggtcatgtggaaccagtgctctgcttcctatggcctgccgggattttcgcaatggaaacatttgcttcagaatcactgcctatgccttagttcaccctcatagctcaaggcctgtgtcattgctcaagacattttatgctggctaaagagcacggctgatcttatgtaacagttttttccactttttctcttctccctgtattgtcactgtgtttacatgtttccacaacaacatatactacaacaccaaagggaggaaggtactgtgaaaatgggataaatcagagtcatgtgaagaaatgagagatggaaacagctgtgaacttagtctctccagttggaaaaacaggaagaagaaactaaggtt

SEQ ID NO: 430410 - DNA, 440 bp, Homo Sapiens
  misc_feature (397)..(397): n is a, c, g, or t
gggcgtgtgcaccggattgagttctgccttgttggatgttgcggggacttgggtttcactggcagaggacttactggttccaagcagaggggtgcttgatctaatctaggttctaaatgtctgacagcagactgtgatgggtaggatggggtgggcccgtgtggaaatagaaagtcttggtcggaagccagggatgatggtggcctgagccaggatggccacagcagacaggtgaggcgttgtcagactctagggcctctggtccgtgttcctgacattttcttagatgggcaagactgtgggactagcagctttatgggggaagatctgcagttctttgtaaacgtgagctgcccaccagacattggactgcagatgttgagtaagcccttggtancgctagtcaaaggtttctgtatcatcagggggatggtgatttc

SEQ ID NO: 430411 - DNA, 334 bp, Homo Sapiens
ttttgagcccttacccacataaatatatggcaaataacaatgcagtctcttatttcaaggagttgataagttacaagaagataaaaatggagacagtgattgcatgagagaacctgtagtagaggtgctgttgagagttttagaaggggtggacggagaaggtcttttgagcttagtgtgagaatcagttcaaaaagaaaaatttgaacatactgaaacacagcagatcctgggcaaatgtatcaatggagcagacaacccagaaagctaaagagcttgtgcagaggatggaagtgtggagagtggagccctcggaagagctagtggaatatgc

SEQ ID NO: 430412 - DNA, 109 bp, Homo Sapiens
aaattctctacgttacatgataatgaagaacccggaaatagaattttgtggataaactagcacccatacttcaaagagcaatattaattaacgcattcagaattcgagt

SEQ ID NO: 430413 - DNA, 255 bp, Homo Sapiens
tctaacttgggtgagataatatctcattgtggtttttatttgtatttccctcatgattagtgatgttgggcattttttcgtatacctgttggccatttgtatgtcttcttttgataaatggctgttcaggtcctttgcccattttttagttggattatttgttttcttgctactgatttgtttggatattaaccccttataagatgtatggtttgcaagtattttctcccattctgtgtattgtttgtcttctct

SEQ ID NO: 430414 - DNA, 427 bp, Homo Sapiens
aaaaatacataaaattgagagaaaaaagataaagaaaatgaggtaaacttaatggatatagaaagctggagaaagagaaaaataaaattttaaggggttataaaaggtttacagaaatcttgtatggtcaaagctgattgagattgaatacatctgtttataatgctttcctaaggttagctttaatattaataatataaaaataaaatttgattttctacttttatgaagaagatttactccaaatttgttggaaggaaccatattagattttcttggccagtacctgtgccactaaattgaagggtaatgtcttttaaaatatctggtcactgctctctctacatagctctgaaaaaacccagtactggagaaattctctctaacttttccgaggcatggcaccaatctgttttagattaagatt

SEQ ID NO: 430415 - DNA, 251 bp, Homo Sapiens
ttctccttccctcttacaaatcatttccacagtttttgctaaaagtagaggggtgtaacatgtatgggagttaggggaagggcagaggtggggtgagggagatggatctgggctatggtgtgcagcagacctagtgcccttcactctcctgcccgtcactctgcagtggtagcatgggatgcaaaaaaccagccgactcgacaggatagtctctgacttttggacattgagtatctttttggtgttggatg

SEQ ID NO: 430416 - DNA, 383 bp, Homo Sapiens
ccagaactataggctaaatgactcaaaatggtataaataacaccacaaaaaaagtctcagaggaatgtttactatagacaacgttttgtaaaccacgggaatgtcctcctttaatgtgtaagttgcagaaaaatgtaaagaaacattgtctatataatagagatttaatgcattcaaatacccttgcccatttgtttccttacattttgcttgttctaaaaaaacaattatagtctcaaaaagaaagcacagacacttaattagtatcattctgcagctgctccttaataaatcaagatgataaatatgcatctaatatgcattctgggctgtttctaatctaaatgtgtctagacttgtgcacctgatgcattacataggaa

SEQ ID NO: 430417 - DNA, 174 bp, Homo Sapiens
aaaatacatttatccaacagcaggaatacgtggagtgaatgtggcttctgtggtaattatcgtctcctgtttggggagcgtctaagagtgtgttgtaggctcaaatggtttttccaaaagccaagcctaaaaacaggcttcaggggtgccttgcaaattagcattccttttgcc

SEQ ID NO: 430418 - DNA, 247 bp, Homo Sapiens
gtaaggacagctgggaacacatcctgcctctagtgaacctcgtggttctgtcatctgcctgcccctcacccagcctaacccctctgaaccaggagcctgagctgcacttactgctccccgctgccccccggacggcctggaccaagcagcagctcccagagcggtggcccagcaaacacgacttgactcgaggccaaggctcttgagggctgagcagtgtccccatgcacactcctgaaacactttg

SEQ ID NO: 430419 - DNA, 211 bp, Homo Sapiens
aagtgttatttccgctgtgtttaatgtttttctgtttctttctgccttttggcagtttgtcgagggctttgatgatgagagcagaggcagaaggtaccccctcaatctgggcctgtctgttctggtcagtttcactgtaatcctcatacgcttccagtcactgattgccttggcaatgtcatcatcaacttttagagacagacctaggggg

SEQ ID NO: 430420 - DNA, 137 bp, Homo Sapiens
gaagcagagaactgctaagtcatggaggcaacggcggctctacggccacacatttcagggaggatctgtggcactcagaagggagggaaactcccaagagaagggtctggtgacctcctcccacgctatgccggcaa

SEQ ID NO: 430421 - DNA, 448 bp, Homo Sapiens
ggttggtgctagcatactacacataaatacatttataggaaaataattaaaatgctgaagtctatctatttgaacttcttcctcatcggtaaagctgggaaagctcactactgtgtagctggtgccaaggagcagcctgagaccccgcctgcagctgtccctaagactttcctctccccatacagaaaccagttctacttcttcactgttcttctttcttccctctggaattcaggggttaaatcccttccagggtatttggatgcctgcaggaaggaaactggagagagggcccagccatgtgcagcacaaggctccctgctcagtgtggcaccagttgggcagccgtcaacatctgtgccagtgttgccacctgggcaagtctctgttcctggggcatgtccaggtgcaacatgaagaacatcgtcatcctttctcgcctggttca

SEQ ID NO: 430422 - DNA, 437 bp, Homo Sapiens
gaggtgaaaacaaaggatttagtgttctttcccctacttactacccatttgttgtttgggatgtagagtcaggactggagaagagggtgggaaattctatatcctctgccaatacagaggcatggaggcactttctataactttgtgtcatgaaacaagacttaaccccatatcagtagactaatgtttctgtcatatttctgtctaggtggattacagttttaattgcccatcatcccttaattctgtaatacagcttgagttcctagatttcaggttgactgggtgagggaggaagtcacttgaggtaattttaagaaatgaatccatatccagagtcttgcagaaaagacctgcttctactccaccttctttcttgttctacttcttgcctctggtttgggggcataaaagaggggcagagttgtgaggaaagg

SEQ ID NO: 430423 - DNA, 140 bp, Homo Sapiens
ggggtcgggaggatggtgggctcctgcataggggctgcagagccatatttgccttgtgggcgggcctagtagaggttttcgaagaggctctgctcgtgtctcaggcgtctgcatggatacagtgaggggtggatatgggg

SEQ ID NO: 430424 - DNA, 328 bp, Homo Sapiens
gtccagaggagttgtgtctctttatttgcttgtaggttgctagaggtgattaaatgtctaacattgacatatgtagtatgttactattactgatatgccctatgatggtaacataatgctataagaaaattataaatatctaaataaaatcaaagtctcatcactgctttcaaaacagcaagaaaagaggcaatcgagaagagagggtagagatctggcttaagactgaaaaatctgaactctgcttccaacgcaccttcaaggaaattacttattcatagtcacacaattcaacttctatgaacctccattttcccacctctaaatt

SEQ ID NO: 430425 - DNA, 400 bp, Homo Sapiens
gatagagattgcattgaatttgtaagttcctttgggtagtatggacattttaacaacattatttcttctaattaatgaacatgagatatctttcacgttttttgtgtctacttcaaattcatcaattcatttttcaaatagttttcaattataggtcttttacttccttggttaaatattttcttagtttattcttttgatactattgtaaataggatggttttcttaatttctttttcagagagtttgttagtgtatagaaacaactaattttttaatgttgattttgtatacttaagttttaccaaatttgcttattacttctaacagtttttttctggagggaatctttagggttttctgtatgtaaaatcatgccatctgcaaagagacagtttta

SEQ ID NO: 430426 - DNA, 440 bp, Homo Sapiens
gtcatgactgacttcagcttcccaactgtgagctctttcagaaatgggcgtatctggtacagcatgtggaatcatcttccagagggttttataagaaatagtggcttcattcatcaaaattgaattagtttgagtcatggcccagagagggcacagtatgaccctagaggcctaacaaccaagaatgctgtgttgcctactcagtcacacccagtgtgtcctctagggtggcaggagacagaaggctactttgaatctggaaatggaactggtggggactagaaatggtggccagatgttcctgcttctgaaccagtcaatgctttgatttgcaagaatcctttcctgggcagagtgatcatcctagggtgaactttgctggtgttgactgacacaggtgaagtttgatggcaggggcatgtaaacacatgaatgacaag

SEQ ID NO: 430427 - DNA, 387 bp, Homo Sapiens
gaaacaatgtctacgtgccattactaagaaagtatgcacacagtaaagatgagaagagaacatgcaagcgtgaacatacttgttagggatataggactatgggtaatttaaacattttaatggtattactctcatgtaattgctctgaaattctagtcagttgtttgaaatggctcttagaacagaatactttgacatttttatgatgtcaaaaactaagaacttagccctaaatattccaaagaataggtgcagaagaacccgtttccttaaacggcatttgagtattcttcacaactcaaactttctctcccatcctgtgatggccgagagtttttcctctgacgacggcactgaccttaccctatccaaaatatgaacatctgc

SEQ ID NO: 430428 - DNA, 358 bp, Homo Sapiens
gaatccacaccctcggaccataatccaagttaccttctgctatagccatacatacccattaaaaccacacttccacagagtcagcttgtctgggctcaatgggctctcaaaataatacagggttccattacctctgacccagaggttctctccaagagaaagagctgttgatgttacaattctgcctgtcactgtccctgttatagcagggagtgcgtactggattagtactccccagaaggatgtatggtcagttggattggtggtggatggcagtttgtaccaaaacgtcacttgaacttcacctttgacagctgcagacttccgcgtgctgataaggaattaaagaaagtggaaa

SEQ ID NO: 430429 - DNA, 365 bp, Homo Sapiens
tgttgaagagcttggcagaaatccaagcacatagggcctattcagagcataagggagagtcactgaatgctctcaccctagaaagtggcatggtaacttatgtcaggttaaagggcctctattagccctaacatctccacccatctacgattgtgagaacaaatttccatttagaaaaggcaggtgatgcatacagtggtacaatatacaaactgccttcataccccctaactcatcaaatccccataatgatcctacaaagttggtattgctggcagggaaaacgaggctcaaaacagtcacagagcaagtagacatctgtacctcagtgccatgactctgcatcctgccccctttctgacact

SEQ ID NO: 430430 - DNA, 422 bp, Homo Sapiens
  misc_feature (105)..(114): n is a, c, g, or t
gaaattttccatcacaactcagtatacacatatgtatataaccaaaggttcaccatactttacccttacaatgtgcaatgcctccgatattttctattgtgtcannnnnnnnnnaattctggttacaattcaacccagaaatagggcacacaacctacagaataacactagcctagagtaacaaatattattcttactatacttttaagtaataaattattgcctttatgagctctatgttttccaccatatgggtgatccctcctccaatattgtcttttgtgtgtctttcgaaataaattatacctgtaagcattttaataaaatgttatgcttcttagcatatttctgatatatactagtgaagaggaaacatgtttgctcctgtcttgagagctctattcattatatgtttgtgctca

SEQ ID NO: 430431 - DNA, 431 bp, Homo Sapiens
  misc_feature (55)..(88): n is a, c, g, or t
  misc_feature (90)..(102): n is a, c, g, or t
atctgaacgattattctcctgtaaaaataatttgggaggggcgggtgttgttcgnnnnnnnnnnnnnnnnnnnnnnnnnnnnnnnnnnannnnnnnnnnnnnacagtggcgcctgtctaaagtatttttcacaacatgtttgataatcagtgctttaaaaagcagcagtgtcctatgaagtggaaatgtcagttctagagcattggatgtgaagttctggtcatgtcaccttgcgtgtctcaccctggaggagtgaaggtgggcgcccggcgggggggtgtggctgcaccccagcaccgggagggggcacgcacgacaccagaggaagggacagccccacccatgtcaacagcaggcaacctgtgttttcatttcaagtgggatacagtatttttttaataaggagccatacttttttttaagagtttgag

SEQ ID NO: 430432 - DNA, 313 bp, Homo Sapiens
gcacgaggcctatctgacattgctcatgtcaacttcgttacgaatatccaagttgatttccaggtttcagattcaatctctgtgcttggaggtggattacagaaaagcatacatggggacccagtgaacatgtcaattagcctgaaaggaagcacaatttttattccctcctatcaagttcaggcaggcaaatatcctgacagagatttaagagttccaggaggtcgcttctaacactggtctcccaggcaaggaaagatgctagttttcacagctaactaaaatgctctgaaagctgaccttgggctgtttc

SEQ ID NO: 430433 - DNA, 257 bp, Homo Sapiens
  misc_feature (23)..(23): n is a, c, g, or t
gggaagatgaaggtgataaaganaagtaatagatccaaagcccacagctagcagtgctggtgtaagtagaagctaaacccagccttctggttcgccctgcccaagatcacgtctgcctccaaacaccagactgtactttccaatctcggtttatctgtagacttgtacagaagcacaaactctccagatcttttagtttccaagcaatatactgatctaataaatgatttagaatgccttaaatcaatacctcccat

SEQ ID NO: 430434 - DNA, 372 bp, Homo Sapiens
  misc_feature (23)..(23): n is a, c, g, or t
gcttcaattcatcttgagtaaanttttgtatatcgtgtaaggaaggtgtccagtttcaatcttctgcatatggctagccagttatcccagcaccatttattgaataggtaatcttttcctcattgcatggttttatccagtttgctgaagataagatagttgtaggtgtgcagtcttatttctgggttttctattctattcacttggtctatgtgttcttatactagtaacatgcccttttggttattgtagctctgtattacactttgaagttgggtaccatgatggctctagctttcttctttttgcttaggattgctttgccaatttgggatctactttattcccacatgtattttaaaatagtttttg

SEQ ID NO: 430435 - DNA, 456 bp, Homo Sapiens
tggagtgggggcagaagaggcgggagagacgggtcgtggacggggtgatgatgtggtggagaggtgctgaccaagcgatgtgagctgtgttcagaactttccctttggagaagtctgtggctgccttctggggaaggcaaacaaatgtgagctcaagaagtttacaatttagctagggaaacaggatgtgcaaacaggaagaaccaactatgtgaaggtaggtaagataactgttgactccatgctttaaggagaggagagctctttgtggcttgggtggtcagcaagaattttttaagcagagatactcttgattgggttggataaataaaagagcaaggaggacttgtagaggggaattgctccgcgagcctagaagcaagaattttccaggttcccggagaagagattgaataagtgcagtgggccatgtggtgacacatcttgagtgtccag

SEQ ID NO: 430436 - DNA, 483 bp, Homo Sapiens
gggctgccctgattcggggccgtgggatgtctgatttggggctgcgtaagaggcgtttcgctgagggagctggctgtgttccctgactcgtacaaggacatttggagtcaccttgtgtggtcctggcccatgcttctcatttcagctcatcctgtacatcctacctggcctaactggctgtgaactctcctgaattaaaaagatatttaatagaggcaattttgccatttgcactttctaatatctaagacattctttggctgctcatcatcttatttgaaatggaaaaaaatgtactagcaactgtgaatgtcaattttagaatgttcaattaaaatagaagtgaagacaacacttaaaatatactaggaaatttactcatactttttgaataattcaaataatcaatgattctttaccttaaaaccatggaaaaccctgttgttaggcacttagacagcaaattggtgttagaccattttc

SEQ ID NO: 430437 - DNA, 484 bp, Homo Sapiens
gcatctttaagaaaaggaagaagagaaaaggaggatttgcatgacgagctgaaattaaatagttgtcgcccaaggtgatgtgtagcgtggcttttgtgactgagggatggatcgcttgacaagtctttatgaagtaacaccacaggagggaagattatatgcaggcatcaagctttgcatttattttgcaagccctctttatcgggtttgtatgatcttgttgtgtacagctagcaaaaggttacttctttgtcatgaaagccgtcctcagttttcagagacagtggggcaccacagagactttcttgctctgcatccacatttctattaatgtcattactgcatttgattcctttatgaagcccttttggtcacatcaacagtgcattctaagctctctatcttaacttctagctttgtctgcaaaatttgtgtggttagcctgaggcatatgcagataaattgcccaggttcagtgttctca

SEQ ID NO: 430438 - DNA, 460 bp, Homo Sapiens
  misc_feature (271)..(303): n is a, c, g, or t
gggaaaatcaaaatcagagagacaagttcagaggcaaatgagggagtccaggagagtagtagaccaagggtcgtgacaatgaagaagaagatagcacagagacaggacacatttagcaaacatactatgtaaggattactgatcacatacacaccaggacagaaagactcccagaaatgtaatgtgagttgagttgatagtgaggtaatttaccaccaagatggggaaggaagagaaacaaacaacatagaaactaaagccagactatgtnnnnnnnnnnnnnnnnnnnnnnnnnnnnnnnnnctgcaacacaaggatctgtgcgcagtaggatttctcttgtattcaggttacaattctcgtatcaccttctccaagagatctttgccatactatctttctaaagaagccactgcacttccctcccctcaaagcactttgcttcatttttttcagagcg

SEQ ID NO: 430439 - DNA, 421 bp, Homo Sapiens
ggttactatagctctgtagtagagtttgaagtgaggtgatgtggtgcttccagtgttgtgctgttgggttaggatagcttatggaattctgggtcttttggttttaaaataagttttaggatagttttgttctgtttctatagagaatacgcttggtattatgatagggattgctttggataatatggacattttaatgtatcgattcttctaattcatgaacatggaatatctttatttttgtgtgtggcctcttaaatttcttgcatcagtgttttatagttttcattgtagggatctttcactaatttggttaggttaattcctaggtattttatttttatctattgtaaatgggattctttttcagattgttcactgttagcatatagaaatgctactgattttttgtgtttttgta

SEQ ID NO: 430440 - DNA, 452 bp, Homo Sapiens
gcgcagcgggctctggggttcgagatagagttgaaaggcagtcgtagccataagggctgcaattcgtaggcgagccctggtgctgtgccgggcgcagagccagtgggcttgaggggcatgcgacccagggagacatgagccaggccagccaagtaagttcttgtgccacttctcccccagccccaggcagtgcagctcccagctttgatagagactccttccttgcactcgaggaaaggagaaagaagagtaaagaggactggttttgcaacttggataacaaatagggcaccaggcagaatcctggggcacacattccaggctctaagtcccagacaatatttccagacacaccctgggccaaaagggaacccactctcttgaagagaaggacccagtcttggcaggatttattatctactgaataacgaacccttggtccctgaatagtc

SEQ ID NO: 430441 - DNA, 358 bp, Homo Sapiens
ggtagtgaacatatccctctttagagacggtgaatgctctggtcgctcttaataggaaccagctacagggcatgcaccgtggtggtggcagtgatatgttgaatccctgttcccaggggatgtccgctttctatctgcagctttaatgtttcacttaatatcctctttggctactgagcgcactcctctcccgcagccggcagcgcttggctgctcgacaacttccttcatttctggccatgccgggctgagcaagtgctgcctgtgagcatctgctggggggctttctctgtggcgtttgtctgtgtatgttaaattgagaagttgaaggaataccagcctcctttttcctagaacc

SEQ ID NO: 430442 - DNA, 344 bp, Homo Sapiens
tgcatttgagcctcttgaggtgcagggtgatccctcatcagagggagttctgttgtcccctcggcaccctggtcctactgctgaagaaactccagctcaggtatgggagtagccaggatgggatcacatggctcggtgagggcagaagccagatttgagctcaggcctacccctcggcactctgcatgttacccaggctgccccccaccagggtgtcaccatcacgcccgtggggccgcctcccctgggaggtcagatcattatttccatgccagctgcggggatgaaggcacagagagccacaggctgaggtttcagaggaggaacctggtctctgaaaaccc

SEQ ID NO: 430443 - DNA, 378 bp, Homo Sapiens
  misc_feature (65)..(127): n is a, c, g, or t
gggaaaataccatttctatacttttaatggactgtctataggcctaccacaacatgaaaatgatnnnnnnnnnnnnnnnnnnnnnnnnnnnnnnnnnnnnnnnnnnnnnnnnnnnnnnnnnnnnnnnacatagaaagtatctttctatatccaatggttcttctacttggtctgttcctttggaccacagtattattaaattcaatgtactccactgccctattcaaccataagggccactgtatgtattctcttgtggctaaaggtcaatttggtttccatttcaaattcattttattggttataaagattataatcaaagacagctgattagaagaggtttacctccggaaagtgggattagggtggggcaggagg

SEQ ID NO: 430444 - DNA, 299 bp, Homo Sapiens
ggcagttatacacctggcacatgtgtatcttggtcgtcgggatgagaatcccattaaaacctcccacgtgatcagaacaagttcagaaaaatgaggattatctaagcagctctggacaaagatgggtttaaaggattctttctataatcctatgattgtctacccttctctccatctcttccattttacccaattctcagacacatttcctagcttactggaaagccaggtgggatgagttgaggtgcttaggaactagcctattctttaatggagtcactagaaaaaatgagactatc

SEQ ID NO: 430445 - DNA, 291 bp, Homo Sapiens
ctaaagattctagcattcagaccttatacaaccactggcgggatgcaccatctccagctctcagcatcagcagaggggatgcagaggcacggacacccgtctaggaatcagtgaagacaccttcacctgtctgaagacttcctcctcccctaacagggagggagggctgggcaagcctgctcacttcccgggtcttccattttctcaccttttaattagtgttcctcacattgcactctgtgaggaatcctaggaaagacggattacagggtcaatgaatttgggaaacag

SEQ ID NO: 430446 - DNA, 266 bp, Homo Sapiens
  misc_feature (220)..(220): n is a, c, g, or t
  misc_feature (238)..(238): n is a, c, g, or t
  misc_feature (243)..(243): n is a, c, g, or t
gtgacagttagaccggaagctgaagcttgataaataaaatcagcggtctggcacctctgaaaaggacagagctccacagaagagcaagcctgaggaaaaagccctttgcaccctcaccttctataagttagtgatctatggatctgagaacgctgagagcacgagatgggcaaaacccctggcatcggcggtagcccccattagtgactggcacctggtncctgcaggacccggtganactgnccctgcaaagcggggcttccagt

SEQ ID NO: 430447 - DNA, 269 bp, Homo Sapiens
ataagaaaataagaaaatggaggttttggagtgtcatactgtttcattcactggaaaggtataatgaatccggctccatgttttttaccttatgggtatattctgggcttgttcctattatatatctgaatcaccactaaattcaattggatctaaccttttgatggaacatggacccttttgggaatattttaaaagttatggaacttcttccagggaaaaaagcatataaacataatttttttctattgtttcatggtatttattta

SEQ ID NO: 430448 - DNA, 421 bp, Homo Sapiens
  misc_feature (150)..(160): n is a, c, g, or t
  misc_feature (320)..(320): n is a, c, g, or t
  misc_feature (348)..(348): n is a, c, g, or t
aaatcgtccctaccaggtgttatgctgcgagcttcagactaaagccatctgccaaaaatctttgtgtttgctaaaattaaccagatatcattagatgtttaaagttaaacattactcattcactgctctgtgcatgtcatctttctttcnnnnnnnnnnngtatgtcatctttctttccttcattggaaacatttctgtgcgtaaaacattatgctaatcttggtagatgcattattttctttaatcctggcaacaacttagtgaagaaatggaaatttagagaactttaataactgcctgtaagtggaagattctggtntcaaactgcatttgtccgatacttaagntccttggtctcagcactgccacactatactggctgccgggaagttgtttggctttttgttcgttgttatcctg

SEQ ID NO: 430449 - DNA, 251 bp, Homo Sapiens
taaattaaaggaaaaatgaaatgtctccttaagtggaagagaacgacttcaaattgggactttgggagttgagtagaaaacatcaaactggccattgcagacaaatcgtttccagttggtgaataagaataggctgtggacctcagagcttaaacataaaaggcagcaggaaaacttgtgtttctttcagtactgaagtaaaaaggaaacatttaatctgctgcatccatccttacagtaatgaaagttga

SEQ ID NO: 430450 - DNA, 432 bp, Homo Sapiens
attttcttgctctttgcgacactagttgagatctggaataacatacaggtatccttccaattatacgttgtacctggatctatgagtcgatgtaccttggtatcagtctatctgtgtatctttatatctgtgtatatgtctatttgtgaatgtgtgtatctccttttgtatctttatgggacatgttggcatgaataagcccagattactaactccagtctggaactcatggataacaagaggaaactcgaaaagggccttaatagtttggagcctgaggtctctagctttccagaaattctacaacttttcttccacctccccgaactcattgcttccatgacgtctcttgcacctgtgtgctcctagtgctgccatgttaacttggttactcattaatgagcggtttcgtaaccaggctcccttctcctc

SEQ ID NO: 430451 - DNA, 354 bp, Homo Sapiens
gcaagaatgggagactgggaagcatacacatttaattaaggtttggtaaggtgaaaggtgtcagcagagaatgtaaaggtgaaataatgagagaaaaaggaggacatcaaggagaaagtcgtgttttgaaaaaaacagaaaggacacattttcaagaaagacattgtcaatagtttaaatgtcacaaaatagtagagtataatgcaattaaaaaaacaagatctgttgcttttgttaattaaataactagtaacctcggctgcagcagtttcagtagagtgaggagagttgacaccaaactgcaccagtggagtgaaaataagtgggaagaaagagtgaggaagtggaggacag

SEQ ID NO: 430452 - DNA, 355 bp, Homo Sapiens
cacgaggttaagtcaagcaaataactatggtaagctttaaatgtttatcaaaacgtctctgaaagactaaggtgcctccctcattggacatgacctggagagcacacttggaattaacagtgtctatacagttttcaattaaatctagatttggcttagttgagtacaggaataaataacagaaccaaaaaggacttggtaaacatacgctttagtaataaatggtttggagctcagtctccagtgcccctgctaagtacagaacaccatctgagcactagtacagagggcagaatcacaccacaaagcaaagtactaaacagggacatgggttctagcctcaactaatcaactg

SEQ ID NO: 430453 - DNA, 418 bp, Homo Sapiens
  misc_feature (166)..(221): n is a, c, g, or t
gatgtggtagccggaaaatgtaaactattttaaataatctatacaataagaaaccatagaaaaaggaacacagaacatgttctgtgttctgtgtttatgtttatggagaaacataaatcaacttggaaggtagtagatttaagtccagttacataagtagctttannnnnnnnnnnnnnnnnnnnnnnnnnnnnnnnnnnnnnnnnnnnnnnnnnnnnnnntaaaaaacgacaacagtagacacaacagatacaccttaaacataaggatgaaaatagattgaaagtacaaggaagggaaaagtttacgatgcgaatcctaaataaaaggaaattattgtaaacatacaaatacagtgtttgtggacagacacatcactgaagatgaaggaacatatcaattcaccaggaatataagt

SEQ ID NO: 430454 - DNA, 371 bp, Homo Sapiens
gggagactgaaaatagaagaaaagagttgacaacttgaagcaaagtaaatgcataacattcacaaaagaatgaatagaagataccagagaataaagaagatctgagacacagtttaaagttacaacatatgtatgtgttgtctcaggtggagaaacaagagaaaataatacaaaaacaattttagaaggtttataatagcttaacttgttaaaaactagtaaaagactttagtccacctatacaagaatttagtaaacctcaagtcagatagtgtacatacacacacaaggtaagagaaaataaatcaaagtactaacaacaagccaatggctgactgttgagacctacagaatccagaagaaagttgcct

SEQ ID NO: 430455 - DNA, 388 bp, Homo Sapiens
  misc_feature (119)..(167): n is a, c, g, or t
gtctagattcaatattggaagacattatgtatcaagtaattaaaagtgtgattttgaggatcaaacttgggttcatgtattgctctcttactaacagtgtaacacagagcaagcattgnnnnnnnnnnnnnnnnnnnnnnnnnnnnnnnnnnnnnnnnnnnnnnnnntatatacatctcatatggttgctatagagagtaaacaagataatgtacatgaagtagcctagtgaggctactcatgaccactgttttactattatttctgaggatagttctagagaccaacaagagacacctttctgaattcattctatgtggactggaccatgcccagggattttcaagggtggcaataagaccatactgggtgaattacttggtatgcc

SEQ ID NO: 430456 - DNA, 442 bp, Homo Sapiens
gaaaaatccactgagataattggttgaaaaagataaaattgctcttttttacaagttctttttgtttgttttattctttataaaagtgcttcctgttacaattctttagctatgtactgaagaacaactaggatgtgatagcttccactcctgtcctcctcctcctccactgtaaccttgggcactagtggagcattattgttttgttagcctgcctttacaataattttcctcccctttctgaaaagcttcaatgctaaacaacaatgtagagcattctttcttgcaatagacactaattgtgttcctagttgggatcttgctgtcatagccacaataactgtgtcaattgtgcagggaggctgggtcacagtggttattgtgcagagtgatgaatgctgctgacttgtgatgtgctgccgcccgcatctgtgggtgagaa

SEQ ID NO: 430457 - DNA, 186 bp, Homo Sapiens
tgttagtaaattgcgtatgttagtaaatacgttagtaaataagggagaaacttgatatctatagttccatgatgatactgacaacctcagagttcttgtctgtggtggttatttggattctggaaaactactgtgtgtttctgttgtcttgatctgaatgcctctcaagaatgacacttcctttta

SEQ ID NO: 430458 - DNA, 447 bp, Homo Sapiens
gtgaagagggtgcaggtatgtcacacagcgagagagggaacaagaaagagagatggagcaagacagaaagagggagaaatatagacaagaggacgaggtgccaggcccctttagagaaccagctctcacatcaactaccggagcaagaactcactcattgccatgggaggacaccaagtcattcacgagggatctgtccccataacccaaacacctcccactaggcccgccttcaacactggcggatgtatttcaacatgagatttggaggggacacacatccaaactttatcaccgttgtatgaatttaaccaacctatatgtctttctggtaaacatataggtggattgttgattggaaattacaaataatgccttatcaattagctttcaccgtgtaataaacaacctcacaatttctcgacttacaagaacaacatttctttt

SEQ ID NO: 430459 - DNA, 390 bp, Homo Sapiens
aaagaaaagaggtttaattgactcacggttccagatggctggagaggcctcaagaaacagacaatcatggcggaaggcacctcttcacggggcagtaggagagagaatgagtacaagcaggggaaatgccagacacttacaaaaccatcagatctcatgagactcactcattatcacgagaacagcatgggagaaactgcccccaagattcaattacctccacctggtcctgcccttaacacgtggggattatagggattacaattaaaggtgagatttggatggggacacagagccaaactatatcagcatccaagatggagtcactcttgtctccacaccccacgattctcacatcggagggtcggaagcatgcatgtccaaccaaag

SEQ ID NO: 430460 - DNA, 437 bp, Homo Sapiens
gaaatgagtggcatgtaaagttttctctaaagtctgccactttctctgcatccatgctgtcaaccttaatttataatagtatcttcggtaacatgaactacttcaaatagtcttttaaccattttctctacctcaaggttgaattcttatcaaataattttctatccttctattagatggctttaaaaatacttaaataatagtggttagagtttattctgcatttacttggtaccaggtaagttatcttaaaaaactctaagatggagtactattgtcattttctttttcagacacagcctgacacgtggagaagttaaacatttggccaaattcaccctaaaactagggaagctggggagcaagcctaggttgcctgactcaggggcctttactttaactgatctctacagtgcttcaaatttaattttaagttc

SEQ ID NO: 430461 - DNA, 201 bp, Homo Sapiens
aggcctccccctttcttaagatacaaggaagtgtatcttttcagtgtgtgctctttatggatgtatacaatgcagatgaatttaggaaggcaatttcagattttgaaaactgttgaaattaaacttgaacattgaaaaatcaaatttgcagttgtcttaagtgtttgcattagttagatgcttcacaattaataaatacta

SEQ ID NO: 430462 - DNA, 213 bp, Homo Sapiens
gcgccccgcccctgcgcccgtggaccgcgggctccaagcccagttccctaagcccaggcgccggcgatccagatctgcctggacgggaggggaggacggtggatcggggcccccgcaccctcgcaccagcccatcacccgccttcctgtccctctacttgcaagctagtcgggcgtccttgcggtcgcgggcgagctccctccgcggcgctcg

SEQ ID NO: 430463 - DNA, 397 bp, Homo Sapiens
  misc_feature (120)..(146): n is a, c, g, or t
  misc_feature (197)..(255): n is a, c, g, or t
gattgaagtgagttatgaaaaagatattttgaaatcatcttttctaatgatttttaaaacaggccctcagacttcttttgtaggcatatttttatgaatagattttcaaaaatggtttgnnnnnnnnnnnnnnnnnnnnnnnnnnnaagagtctggcacaggaaatgaagacatccgagttcaggagggcattgtannnnnnnnnnnnnnnnnnnnnnnnnnnnnnnnnnnnnnnnnnnnnnnnnnnnnnnnnnncagcttgcattatcttcagggttgcaccaaggaaacgcttcagcatgacttttttgagtgacgccgagtgagaatgcaatttgtcatttcttgtgggagtgactaagccgttgtctgtgtgttataacagtgaattaaaatt

SEQ ID NO: 430464 - DNA, 341 bp, Homo Sapiens
gagagcttctgaccactggaatggacaattcacctctggctagggcttgtataaatgctctctccgtgtgcaccgactgagttctgtcccatgttgctttctgctgtaacagcagcactgagttccaacgcaaagtcctacaatcactgcactctccctctcccaaacacaaagattctctatccatgccacatggccgctgcaggggcatgagggaggtgtggtgtaggcaattcaaaactgtctttcccaccctctttagtgcttctctccttaatatgattttgaaaccaggtattgtaattgctcacttaattttgtgttcttatgaaggtgctttt

SEQ ID NO: 430465 - DNA, 104 bp, Homo Sapiens
acaacaagcgtaaacaaaaaaccatgaatataaatattcatccatagcttacagcctatgtgtggttggttatgcttaggctggaggtgccagaattatttttt

SEQ ID NO: 430466 - DNA, 422 bp, Homo Sapiens
ttcccgccgctgaagatgtcactcagggtctgccaacacgatgccacaagtacccaagaggagcagctcaaaagcatgatcaggattcaaagcattagtttaatcttaggcattgagaaatgctaaatgtcacataccattaataaataaatcttaaacagccagacgacctgacagcttattctgaacggtgcatgcatttctttcttgctctgctggtgccagggctcctctcactgccctacacttgcagggaggtggacttccctcccctgggcttccaggtgcgtctcctgctgctttctctatgcttcctccccctccaatgctcccaagtgcccattatccccacagccagccaggtgggctggaagggtactggaggagaagctgcaggcttctcagaggacgggtcccccacc

SEQ ID NO: 430467 - DNA, 433 bp, Homo Sapiens
gctggcctggtggtccccagtttccctggctgtaagatgcagagttgggcctgttttgatgatttgggatttggtacgggaggtgggaaaagggtggaccaaactcagtggtcattttccttccattgaagaggtcttggtgtgcagaacttgtgtggcttcatttggtgttccagggctggagcctaggatgtggtggattttgtgttgaagtgcaaaggtggatggcagcttctgaaatcaggagcatgctgatttgggatttcagcaaacttccagtgagcgccccttaggtggagatcttggtcgctatagtggaaggaaggtcctctcaattcattctgggagaagctgaggctttcctgatcatctccagtatcaaattgagaaggaccacaggcttccgctgcacagaatcccccctaataatccg

SEQ ID NO: 430468 - DNA, 299 bp, Homo Sapiens
tagctgcacagtaatttccccctatattaacactgttgagcctccttacaacaaatgtgtccttcggggcagagtgtgaaagcttgtacctttcttagtttttgtgatggatgttttaaatgcagacaaatagacaaatagaaaaacttgtaatttgtgacctctacgttcgttcagcatgatttatgaaacaggataaattaaggcttatttaaatattactcacttgcttaaattcctaatggtctgtgcggtcatgcgtgtgttctccctctctcagacgagaaagctctcatttc

SEQ ID NO: 430469 - DNA, 364 bp, Homo Sapiens
tgaatgtccagtccctagccagtgctagggaaccactgccaaagtaacccatggacacagagagcagggggcctccatggctcccactggggaagtggtcccttcaccacagggaccaagacacacgtgtccaagaaccgtggagtctccttgcagactgtgggaactggcctcagctggcccatatggcatgagaagaaaaccagcaggggaatcactgagttcagggagcctgtgccagtttcctgggttttcccggcagtgctgtgtttcttgtttaaggctagagtttaaggcccaacagctgtgaagtgggaggaagttgaaaccagcttggcagaggagattctacattgccatgggg

SEQ ID NO: 430470 - DNA, 421 bp, Homo Sapiens
atagtcacatgacattccttttacagaacatacaaactttcatgctagatattgaaaagaagtctaaaaatgcagctaccagggggaatcaacaagttggtatgaatgagcttcaggcaaggcataaatggtggcagccagttatgagagggttggaaggggaaaggttcttcaggcctgggggatgaggggcagggaaggattcatacctcctaaggaggaggaagaaaggggggctagatattaaaaaagaaaatgccccaagttttataagacttctcccacacgtgcaccccactaactgtctctattcagagacatataaaaattgtggacagaagtacttcaaaatctgtttcgtcacaggtgagaaagtacacagctttgtagagactatttccaagatggtaatatttatatc

SEQ ID NO: 430471 - DNA, 338 bp, Homo Sapiens
gtcgacttacgcaatcatgagccttaaggagcggactggtcttaatacgacgttcacttagaaaaagtgaacggttttatttcactaaaaagtcaatccaagccaaagtgttcgttggctgccagggaaagcaagtgcagtttagcctgggttaataactagtatatgtatttagagatttaccatttatgaagcacgttgatatgcatgatctcacataatactggataacaactttgcagaaaattattttcccggttttttcagatgagcaactgaggaactaatctgtgaaagtaacttactcaaagtcaattccagacagtagcagaggcttc

SEQ ID NO: 430472 - DNA, 395 bp, Homo Sapiens
aaaacttccctagaaaataaattagcctcaagtgacccaccccctcccacataaattagtttaccttaaaatcagttgagacacaattatatgaaatctctaaacataacttgccacatctaaaacaaaaggccatagacttggcattttatattcatatagcagacaactgcttccaatggggcaggattcaattatagatgcagtaaagacatcacaatatagacttattcaaaagacattatatttagtattctcttcattgtaagtagcagaaaatgcaaccggaggcagattagccataaagaattatattattagcttatgcaactgagaagttaagtggtatttctggtttccagcaaaactttaatgaatattttaaaggatgttat

SEQ ID NO: 430473 - DNA, 453 bp, Homo Sapiens
ggaggaaagtaagcagcttggagccgggacaggagatgcagccggagaaagaggaaggcattaaatgtgtacatttcccaaaatcaacatcacctaatttttaattttgctaatggctagtctttagttgagatgtcatgctgaaataactcttttaataaaagagaactaatgcgctcatttttccccttccttcctctatatcagcaaagacttggtgcaatgatgtatatcacccttttattttaattaagcatatagctttgagaggcttgtaaaaatgttgccaacagagaaatgctttaacagatgtgaacttgaggttggcttctcccatatatctttactacagaaaattgccctcttcattttgtacgtgaggtgaatggatgagcctgggtatgcgccttggagtggaagcgtgagagaagtaaagtattcaggaacatagag

SEQ ID NO: 430474 - DNA, 399 bp, Homo Sapiens
gaagccatactgactggtgtgagctagcatctcattgccattttgatttgcatttctccgatgattagctatgatgagcattttttcatatctttgttgaccacttatacatcttcttttgagaagtgtttgttcatgtcctttgcccacttttttatggggttatttgttttttccttgttgatttgtttacgttccttatagattgtgaacattaggcctttgtcagatgcatagtttgtgaatattttcttctattctgtaggttgtctgtgtactctgttgatagtttcttttgctgtacagaagctcttaggtttaattagatcccattttcaacacaactcttaaaggagaaaagagaacagagagaataaacagagaacaaagccatgtgtt

SEQ ID NO: 430475 - DNA, 295 bp, Homo Sapiens
gggaagctcctggggattacaaactcgttaacctgctattccttttcaggcaatttaacagatgaattgaaagcagtcctaaaagatttaactgattactagaaacttgcatagatcctctaagaccaaggcatgtaaaactacatttttccatttatttactgtcattatgactataaaacagatactaccatgtatacatttcatctttatttcagaaattacagcattgcttgtaacatatctgtcagacagccagaacaaaccagggaaacagaaaccatttaaacctgtg

SEQ ID NO: 430476 - DNA, 120 bp, Homo Sapiens
aggggttatgaactcctctctgtcatgaatctatacatatgtttaaaatcagatctgcacatgcacaaatgtcaattttactgcagaataaaatttaaaataaaagtagataggcaaggc

SEQ ID NO: 430477 - DNA, 375 bp, Homo Sapiens
ggccgagtccagcattagggcttcgtggaacaaggggtgatgtgtgtgtcccatggcagcttgggtggtggtgtcactggacaagccctgagttgcagttaggcattgtttcaggctgtatagactcttaatctggttcttcagtctcctcaaagattctatgagctccccaatatcctttgatgaattccttttcaggtaaaaatcatcatagttggtttttgttgctcaccatcgagaacgctgatggaaatagagttcttgaaattgatagtcaaatggaaatggtaaaaaataaattacttgacaaaagatgtatggttttatcatttcacagagattgatttcatagtggtaagatcttttaagatgtta

SEQ ID NO: 430478 - DNA, 396 bp, Homo Sapiens
ttctttatcatgaaatctttgcccattcctatgtcaagaatgatattatctagttgtcttccaggattttcatagtttgggttttacaattaagtctttaatccatcttgagctgatctttgtatatggtgtatatggggtctggtttcaatcttctgcatatggctagccagttatcccagcaccatttaatgaatagggagtcctttctacattgtttgtttttgccacctttgttgaatatcagatggttgttggtgtgtggccttatttctgggctatgtattttgtcccattggtctatgtgcctgcttttgtaccagtaccatgctgttttttttactgatccctgtagtatagtttgaagtcaggtagtgtgatgcctccagctttggt

SEQ ID NO: 430479 - DNA, 447 bp, Homo Sapiens
  misc_feature (412)..(412): n is a, c, g, or t
ggttctgacactaatggaactgtgaggcagtgctattacagattccccccatacagcccagacctcgcaggaaatgacccgagactccgcacccttccacccgccaaagaattctgttgaaaccatcttcagcggccggctgcagctctgctcccgcctcttcctcagttcggtttcctcttccctccatcatcctgcaggtggctgaaaataagattttatggcctggtgcatggtgggttgattgacaacgctggagaccttctttaattcaggggggttgtggagcatggaggtgagattggaaatgggaactggggcccataaaaacaaagactttcccaacttgctcttaaaaagcaatccaaagaggaaaagaactagggaagggacggttgttttctattagatngctaacaatgtgtgtaagtggaggtgatttaagaa

SEQ ID NO: 430480 - DNA, 180 bp, Homo Sapiens
  misc_feature (65)..(80): n is a, c, g, or t
tcactatgcaatagagggtttcatgtagttaatctgacatgtcaaaattgggaagactgtaaccnnnnnnnnnnnnnnnnaagatttctcttttttgtgtccctcaatacttagcagatgttcatttggtggaaattcttattacttacatgaatgagtttgaatttagtggcaaggaag

SEQ ID NO: 430481 - DNA, 437 bp, Homo Sapiens
  misc_feature (373)..(373): n is a, c, g, or t
ggtgaaatcctcaaactaaggagtacaaagaaaggaatggtaacacgtctagcaggtcagaaagcagagagcggagaaggaccgagatagcggaatctaagtgcctatggaaggggataccaacaggaaggggccactccacccccacagagccccagaaagtctggaaactcgatgtgccaggagtcatagaaatgaggtaagagtggacaacagggaaatgggtccaaattctggttgcagagcagttagcgccccatagcccgcggcccattatgctcagttgagtgaaaacctcttgttcaggattctgggagcaggagaacaggactgcctgggaggactgaatgaggtctgcttcctgcctgcaganctttccaccctgctacctgctcatgggagatgggccaccataggacatggggggagggtcttct

SEQ ID NO: 430482 - DNA, 370 bp, Homo Sapiens
gatcacacccacctcccccctgtcttctgcacaccaccatccgtaacccctggcaaccactaatctgtcctccatttttctatgattttgtcatttcaagaatattatataaatggaatcatacagtatgtaacctttcaggattggcttttcactcagtgtaattccccggtattccttcaagttgccacatatatcaatgtttcattctttttattcattcctttttattgctgagtactttccatgatatgttttgttttacctgttgaaggacatctgggctgatccagtgtttggctattgaagagtgtgtttgagaataggtctggtacccctcccaaattttttctataagaaaagatgccta

SEQ ID NO: 430483 - DNA, 442 bp, Homo Sapiens
gatcacttgctagtcattatcaccatatcaaaaacccagatgacctccagagaggagaaaaatgacaaagaaaaccctcattggaatcaatataccataatgttgtcttctcagttacatagtgaggggccaaatccacacattgcattactaagagtttagtagtaattagtagtcttgtatttctgagccaaattcttgcctaaatttgagaggtagataagactaggcaaatagatatcttcagagtgagtgtcatgcaaagcagaagactgggaggctgtcactaatttggccaacctgtttcccttctctacaaagttcaattctaccacactcaatgtaactgaaacagatgggaagcatgaacttatcccacttcacaaaaaaaggctaaaatagaatgcctttcacaactgttttcagtttggaaaattagttc

SEQ ID NO: 430484 - DNA, 413 bp, Homo Sapiens
ctctggggtttgttttttcctatgaagctattctgcaattttactagtcactcaagcaaggctgataccaggcaggatctttaatttactttttggtaaagcacagattttctcctcgtaattctcaaagcagcagtgctcgccaggccttcatagtgccactttcccttgacctggtgtggcaatgtccaaccctgcagtgtggctaataggatgtttcactgagctcacttgccaggcaaggagaaaacagaaatgttttcaatctggagtagttcactgtaccaaaaagacagaagatgctcagaccaggtgagagtcaaaggaaaatttccaattggtctgatattttccatctctaatcatggatttctggtagtttccttcataaaacatgtactatgggagccagg

SEQ ID NO: 430485 - DNA, 437 bp, Homo Sapiens
cctgaaataaatgattttgtgaagatataaaattaggagagaccattttacataggtgtattccaaaaatatcacctttccttaagtcagatactgaagtaatgctccaaaacccaacaattacatgttactccagatgcattagctttaatggcattgggtggtggtttaatttttagcccaccctggccagggatatttccttagtgacagcagtatggtctgcagcaaatgtgaactttaggaaatgcactaacgtataagggaaaggcagctatcagcattcagtcttctctgaaggtaagtatagcaaattaagagagatgtagtagaaatgcagtagcagttaagggatcaattcaaagttatcagaaaagggtatcttgtaggaaaagttcaaagctgaagattgaattttaaatgttattgtgtgttac

SEQ ID NO: 430486 - DNA, 162 bp, Homo Sapiens
cactcaagctcctagagcccactgaggcagttagtacacttctctttcttctactaagtagaagaaagtgtacagagttcaggattctgtgactgtcagatcagctctaggctctagagaaagtgcatatgattatctacattctagtttttaaatagatgg

SEQ ID NO: 430487 - DNA, 246 bp, Homo Sapiens
gtttccagtgatagaaactcaactggaaccagcttcaaaagggaaaaggacggcaagaatcctgaaatggctcatgggaccaaaggctgcagctgtgtcccaggacagccccactggcagggtggagttgggggtagagctggcggcctgctgcctgcaaatcttgctctcaccactcttcattgctgcccctctcagggagtgacttccccccagtcactcagcctctccatgtggctcaggtca

SEQ ID NO: 430488 - DNA, 257 bp, Homo Sapiens
taaggaaatagcgttgccattgtgaaccacttataaaaagcggtcttgttactggaactaggctgtactttgtgggtgcttcaggctatgctgtttgcccttctgtcctagcatcatctctggtactaatattcccctgtatagtgcccccagacaaatgaggtgggatggaatgcactggatagtcagcactacctacactcagtccaacaagtgggatgtgaaaaatcccatcacttgcagaggaatcaatgtta

SEQ ID NO: 430489 - DNA, 297 bp, Homo Sapiens
tcctgctgttctcatggaggctgtgcttttcctacacatgggcaggcttgaaaacacagaatccaagagctcctcggtgagtaagtgtgggtgcacggtatcacactgacccttccagccccacggaatccgagagctcctcggtgagtaagtgtgggtgcacggtatcacactgacccgtccagccccacggaatccgagagctcctcggtgagtaagtgtgggtgcacggtatcacactgacccttccagccccatggaatctgagagagctcctcggtgagtaattgtgggtgc

SEQ ID NO: 430490 - DNA, 396 bp, Homo Sapiens
  misc_feature (133)..(193): n is a, c, g, or t
  misc_feature (236)..(263): n is a, c, g, or t
taactgtgcagtaattacctagaaaatcaaaagaaatcaatctgaaaattactacagatagtaattgaagttagtaaaatgcaagatagaagataaagccacaaaaataagcccctgtgtattaataaagtannnnnnnnnnnnnnnnnnnnnnnnnnnnnnnnnnnnnnnnnnnnnnnnnnnnnnnnnnnnntacataaaatgatgtagtattttctcagggtatgctgaagttnnnnnnnnnnnnnnnnnnnnnnnnnnnngtggtatagtatttgcatatagcctatgcacattctcccgtgtactttaaatcatctctcaattacttacaatatctagtaagtgtaaatgcgatgtaaatagttattagactgtattgtttggagaataatg

SEQ ID NO: 430491 - DNA, 159 bp, Homo Sapiens
caaggtaaggatatggggtaagttacgaagctccctcagtgagatcaaatactttacaggacaggcaacacaggctggatgggtcaaagtctttcctagcgtggcagcttttctttatgcagctacaaatagctcttttccatacgtagaattctaggg

SEQ ID NO: 430492 - DNA, 451 bp, Homo Sapiens
gcccagttacaataggggtacagcattgggtaaatataaccattccaaatgggagaaattgggcaaaacaaaggggctacagttgccatgcaagtctgaaatccaatagggcagtcattaaaccttaaatttccaaaaatgatctcctttgactccgtgtctcatatccaggtcatgctgatgcaagaagtgggctcccatggccttgggcagctctgcttctgaggctttgcaggagcaaagcccctctcctggctgctttcatgggctggcattgagtgtctgaggcttttccagatgcatgatataaactgtcagtgggtctaccattctgggttctggaagatggtggccttattttcatagttcctctaggcagttgcccagtgggatctctgggtgtgggctccaaccccacatttcccttccatactgccctagcagaggttct

SEQ ID NO: 430493 - DNA, 385 bp, Homo Sapiens
ggagtactcaagctatgctgatgtgggacctgcatcctaaggacctgataaccaagactaaactaaaatcagtaaaatccatgggtgtatggatcagtagaggtgagcttctcaggacaggctgaactattggggaatgaaaggacatatgccccacataagaagaacaaccccatcatacagtcagagtttgagttgcttcttgctagccatgcgaccctgacaattcagtttctgaactttctgacccccatacctctcatccataaaacgaggagtagtactactgatttggcaagactgttgcaagaataatgccggcgaaatttgatttgaaatgaggacctattaaaatgcaaggcattctagtctatgatagacattt

SEQ ID NO: 430494 - DNA, 416 bp, Homo Sapiens
taccacaatgatcctacacccctttcggtggaggacatcagggctttaatggtaggagagggaaaagaacccaggctagtgccagcaatatgcccccacctcagaagtccacctgaatctcctgattaataagtttggggtgggaagggatgtcactgtaccccacgaagtgacaaagcacggttccccaacattctgctactggatgtatagatggctctgtgactccactacaaatcgccatggttgagccccaggggagcttttatcttctgaaatgtcattacacataatttaaatttttaaatcattaatttgtgaaatatcattacacataatttaaatttttaaatcattaacagtcccagccacgtaggtgttgttattgcgttaatgtgttgagctggagggtgtgc

SEQ ID NO: 430495 - DNA, 357 bp, Homo Sapiens
ggctgatgggagttctgactccaagcctattctctggggtaaagtctaaagagattcaggcaaaggatacctcaagccttctttcattagtgcaggatcttctctcttattcagaaatgtagtctttgaagctgcttttctcttctgtccagcaccaaggttgcaattaagtagcaaggccacacatatatttttggatagggctaacagagttctgggcattttggagaatcacaatttgagagtcaacaaaggggctcagaagaccatctaatggaacccaggcttcgtagagattcaaaccataagacctcaaataacttgagaggttcaaatctaggcagaggcagaactgga

SEQ ID NO: 430496 - DNA, 158 bp, Homo Sapiens
attgttcgcagatgttatacttttatatttggaaaaacctgaggactccatcaaaacactattagaactgataaattcagaaaagttgcagtatacaaaatcgtcctacaaaaaacagtagcatttttatatgccaatagcagacaatttgaaaaagc

SEQ ID NO: 430497 - DNA, 347 bp, Homo Sapiens
gaatttccttaaatcctcatgttttgcatttaataaaatagaggcacagagtttaggtaaaaatcagaagttttttcaggaagtgagtggcagaattggaatgcaaatttgagcaattggacttcacagcaggtatttcaaacaattgtgctagaattactcaaaaatgcctgctgactaaatggatgaaaacagacaaagcctgttatttgggaaaaaatgtccttgtgaagggttccagtgctgtcaatttgctgaaagttcatcactagtgagatgcagagctgggttgatgagacttccaagactgcaagtgtatcataaatgcaatactcctctgccttgtt

SEQ ID NO: 430498 - DNA, 431 bp, Homo Sapiens
  misc_feature (400)..(400): n is a, c, g, or t
cttggtatgctctcagatatactctgggatgtttcggttctcagggatacctgctccttgggtgggccactgactcactgcctagctttcagggttcaggcagcagacatagatccttaagtaatctggtgggtgactcatcacactacactcagccatttcattttcttatagcagtgtctaatcttaggtgttgtacatggaaaacaaaggcgttacaggaactgcaaatagggatgcggaaccttttgtcaaggaatccttgaataataaacagatctgagaccttcacttgcttcagattttgaaggaaactgggatagtccatggagggggaatggtggagtctatttctacttttaagggccctacttccccaatatgtctgttgatcctgtangcaaagaaactgatggatgtgagtgagcatg

SEQ ID NO: 430499 - DNA, 372 bp, Homo Sapiens
gggtgtgggacagctggagcgcctggagggaggcaaagagaaccaatataaattaccactaatacaaataaaagtcatgactatagatctgcagacactatgaagagataagttattcttgtgaacaactttatacctatgaatttgacaacttatattaaaaagacaaattcattgagtgacataaactaccaaagcttaagaataaatagccaatctaaatagtcctatatctattataaaaattaaatttgtagttacaagccttcctgcaaacaaaaccccagatctggatgatttcacagatgaattctatcaatcactcgtgagagaattactatcaattctacacaatctttctcagaattttaa

SEQ ID NO: 430500 - DNA, 106 bp, Homo Sapiens
catcttcggcgcagaaccggatgccccagccagctttacacaggcaggagaggttgcccataagtgcctggaggcttaggttccccttcctatcgaagggttgggc

SEQ ID NO: 430501 - DNA, 447 bp, Homo Sapiens
tatcacctcaaatacttagaaaatatctgagttttcactgggcaaagctgctctttcttacaaatgaggcactttttaccactcttttccaaagtttagctccagaggcctcaaagttagtgaaaatttctgccagatttggatcataagttgttcttcttaattattggtggttggtggtgtgagtttctatcatttcctgtagtctcatagttatttttgttgttggaaaaagctgggttagaagccagcaggcccaggataaactatttatagaagtctttgtatttggttctttgttaggaaataatttagacagtaattttttactattttttagatcagcagaaactgagaaaacaaacttgatttattctgtgataagcagatatggactatgaattaaaaatgcccacattcagacatttagatctaattatcagtgtt

SEQ ID NO: 430502 - DNA, 459 bp, Homo Sapiens
atctagtgtcccatgactgagttggattaaagcagagtgagcaccagttgtattagggatgttcccaaagtcacccactagggggactcaaggatctcttagggttctatctagttcccagcagaagctactgattgtgaaatttcgattacaccattattctgccgagtcaaaaaggtaggcattaagaggggtaaatgtgtctttataatatggactcttattccagtgccttggagaagctgcccacagcatgaagctgtcggcttctagtcctgtcttgtggtctaagtgtctctggttgtggcatcagtggtttggtgaactcttggtgtggcccacgcatcaggaatgggattttgtcccttaacatttagtttcagcttatagggcttcaggaatagagtagttctctgcttttagtgattctatgggagaaagttggatgggaggaagctg

SEQ ID NO: 430503 - DNA, 163 bp, Homo Sapiens
cttcaaggaggtctctgagtagggtgggagtgcactggacgtagttggcagaaacaatgtcacaggccagaggggagcaggtcatgggggccaatgcctaactgtgtaacaggtgccggcagctgcacctcactttgtgaactcggaacatgtggtactcagc

SEQ ID NO: 430504 - DNA, 356 bp, Homo Sapiens
gccggacgagacaacctgccactgccgcgccgccaggtccccccaacagtcccctcggcccccgagccgctcacctacgactaccggcttgtgagcgcggcgcggcacgggccccgacagcacccccgcggaccccgaggccgcgcactccctgtgcggcccttcgcaacgcggcgccgcgacccagcgcacagccctggcgcccggcctgcccgcctgcctgtacttgcggcctgcgcagtccctggactacctggcgcgcgccgccgtgctcgcctcccgccggccacctcggaaggagcggcacttcaaggctgcagtgtggcgggttcctggatgtgcccgcggccctggcg

SEQ ID NO: 430505 - DNA, 428 bp, Homo Sapiens
gggtagctgtgtggaggttgagttcccatacagagctgcattgcactcatggtagctgtgtggaggttgagttcccacacagagctgcgctgctctcatggtaactgtctggaggctgagttcctatacagagctacattgctctcgtgttagctgtgtggaggttgagttcccatacagagctacagtgcactcatggtagctgtgtagaggttgagtttccacatagagctgcattgcactcatggtagctgtttggagattgagttcctacacagagctacattgcactcatggtggctgtgtggaggttgagtttccacatagagctgcattgcactcatggtagctgtttggagattgagttcctacacagagctacattgcactcatggtagctgtgtggaggttgagttcccacacagagc

SEQ ID NO: 430506 - DNA, 308 bp, Homo Sapiens
tttgcaccattttccttaaacactaatctctttctcttgcacaaagttctggattttaagcaggttaaccacaattggtgttagcatttgcaacttcattagtgagttttaaaaacggtcttgaggacatgaattgaaattgcaattcgtaaatgtagacaatattttttgcctagcctaggcatgacatgacaaatatcagataccttggggggactttttagggattaaaagaagattcaactgagatccgagaggagagttaagtatttggcaaaaatgattcagttagtcaagcgtggcggcgt

SEQ ID NO: 430507 - DNA, 447 bp, Homo Sapiens
  misc_feature (104)..(122): n is a, c, g, or t
  misc_feature (134)..(134): n is a, c, g, or t
tgaaaggctgggtatttttgaaccaatttgtaaagctgctcatatacacgaaggagggtcatgaaagcaaatgacaattcagcaaggcctagttatggctgggnnnnnnnnnnnnnnnnnnncgcgcgtgctgntagatgtatgcgtgtacaccgtgtgcgtgtgcgtgtgagtgttcaaggagggtggttcctaaggctaatgagcttctacctgtaagttattctgatttggtagaaatgtagctttgaataataatcattagcagtagctgagtgggcttgtgctttgtcaacactgctgagtttgataattagatgattacaaggatgtgatgacattttgtaaatcctttcctggagatatctatatgagtttgctaatcattatggcaggcttctagcttttctttagagcaatgatgatgctacaaagattttttttgtg

SEQ ID NO: 430508 - DNA, 109 bp, Homo Sapiens
gagcttcatacactaccatctcgtgcttgttgcgcaaagccttcgcgatgaagtcgaacagtgtgctgtcacagctggcatactcgtcttcgaactgcttactggccag

SEQ ID NO: 430509 - DNA, 188 bp, Homo Sapiens
aagagacacggtctctctatattgcccaagctggtcctgaactcctagtctcaagcgatcctgccttggccttctaaaaatgctgggattacagatgtgagccacctcacctagcctacttctgtctattcttgataccactcccaaattagtatttttaaatgatgttttgtgcatgttaatcaact

SEQ ID NO: 430510 - DNA, 307 bp, Homo Sapiens
ggttcatgactggatgtctgtctccgtcaaaattggctatatttagaatttaggctgggatgggttttccaaaggggctggtgtttctcattctaagctaaaagtaaaaccagtatctactttacacatagggcagatgagtatttgggaagcagacccttcaacaccaaagctctataacacaaacaggattgagcccttagcatacaaggactcacagaaaataaagactttcccatggtgagaggggtggccctagatctccaaatgtttatgaaaaatgtgatgacccagggccctgctgaat

SEQ ID NO: 430511 - DNA, 464 bp, Homo Sapiens
cttgaaaacatctgtatttatatcatctaggtcatctggtgatgaattcaaagagcctccaattacaaccagtgagaaaaacagtggaggatcacaaaacagtcccgggtgctcccaggaatttgggctttatcctcctaccacctcctcttagccttccttgtgggtgactcaccaaggctgagtgctcacttcatgcacaggacattttgaatgtggagatgtacatctcttagaaagtccttgatacagttgttcatcctcttcttcgtgatgcaggctttactttgtcagtattagctgataacttttcagaatttaggcatccccagagggaaattacttgctcttggtgtgtttcttactcattcttccccacagctacttctctgcaaccacagctccctcctctactaagttccctgtggaatacatattctaaaaacattttatttcaactttta

SEQ ID NO: 430512 - DNA, 175 bp, Homo Sapiens
tcctcttcgtcctaaccaaggatacaaccccagggcccaaggccacaacaagaggaagcccccatttaaccgcaatgttctggaggaattgtaattccgggagttcatacttggccttgaagattggaatggtcaagaaggcttgaaattatacgtggatggaaaggagcctcac

SEQ ID NO: 430513 - DNA, 389 bp, Homo Sapiens
gcttcaaaaaatgctgccctgagcacattgttctcagaaagctatggcccattcccacccctgttgcttgcagaattcctgcttactattcaaggccatgctcatactctgccttctgttatcactccccagagggtacagctggttggtgcttctcaaacattattcccaaaggacccttaagggcacagaaaagtgatcaagtgttcctgaaggtcctaaaggtaaagcctgaaacagatctctataagagtccttccaagaccaatggattatctaagaattatgtcaactttacctttattctatgatatttctggatgattcaatattacctaatgttatgttacttacattttcctagtaaatgtgatattctgtaaaaacat

SEQ ID NO: 430514 - DNA, 354 bp, Homo Sapiens
agatatgttcagaacgctctacttaagagagaatgaaagacagcaatacaacagtgtgaattattggccagactatgggcagttcatttgcagaagaccccagatggccaagactgagctacagtttgcactctcctgtgctgggggagctggtggtttgggcttcaggccacctgatgtccaggctccgctaccacacttctgtgcgccctaaaaaatgagttgacccaggttaccttttcagtctttttcctctttactacttcgctttaaataccgtgagagaaaccacctattacccacttctctgaaattcatgaaaatttgacaactggccaacactttcaagacgtg

SEQ ID NO: 430515 - DNA, 391 bp, Homo Sapiens
tgatttcagtttagtggtggtgcatgaggcagatttggatgtctaataaacattccaaatttgatgtcactgagatagcagtggagttggttttcaatatccattctccattcttactatagtaattgaaaccttgaattttagttggtcactggctgcacagctaaagactgcagcctcccaggtaactattagttgtgtctctgtgactaggttatggacatgggtacacatgtggaagcaacgtgtacagattccaagtcaccactttaaaggaaaggagcatgctgcttctttttctccatcttgcttcctcgtatttggttgtgttcttaagacatcttcaatgagggcagagcaaaaataaattctggttccccaggctttgaag

SEQ ID NO: 430516 - DNA, 425 bp, Homo Sapiens
gagaacatgcaaaaaatagtgatagaaatccgataatgcccagtgattattcaaaactgaccccaaagaatgttccatagaaataaaagaagcagaggcacccaagctcatctctagttcttatttcctggactcacgtaaaggaacactcccaataaatcccatattactcgccaacacttcctgtctgactgaaacatgacaacagctggagaatggctcaaggttggcaactgttattacttcgttctagaatcttggtgatgatgctaaaagggaaagaagtattttggtggcattccaacaatggttttttataacattcctcaccacagataaagtaatcgtcctagcattggacctaagaaaaagcaaatccgagatctactccgtgttgtttctgggtcaggaccagcatccaaact

SEQ ID NO: 430517 - DNA, 137 bp, Homo Sapiens
tgggatgacagggggaaatccacgcccatgagtcagtcacctcccatctggctcgatgtccaacattggggattacgaattcaacatgagattggaacggggacagggaaccaaaccatatcacatacaaaaaaggg

SEQ ID NO: 430518 - DNA, 257 bp, Homo Sapiens
aaacagttgcgacgcagccctggtcagttagtgaggctcagatttattcagtaagactaattaacaaaagttatgagtagacaccactagagggtaaagattaaaggccaggttctcaggcctaaagcagacacagtttgtgggtaataaacttctgctgacccctgagtaggaggcagtaaagtatccctagtaggacaaaggttagtcttaagcccatataagtaaacagattagtaagataaacttcccatgtt

SEQ ID NO: 430519 - DNA, 245 bp, Homo Sapiens
aggcggctccctcatggagtctcagcacttggaattatcatggaggcagcattgtatggtagaggtggctccctcatggggtctcaccacttggaagtatcatggaggcagcattgtacagtagaggcgtctccctcatggggtctcaccacttggaagtaccatggaggcagcattatacggtagaggcagctccctcatggagtctcaccacttggaagtatcatggaggcagcattgtacag

SEQ ID NO: 430520 - DNA, 422 bp, Homo Sapiens
  misc_feature (369)..(369): n is a, c, g, or t
aggcgtaaacattagcgagcaaccgagctgactgtttaaacacgggttttttcactaaatcgcgtccactgagccccatggagcccatttatcacataaccaactttgcatttttctttgtaaagatgtacgacctttgcctattagatttcattagcagggcaccatacaaggctcctttgcacatggcaggatagaaagctcaacatcctcgcctcgaggatttgtgggaacaagctcgtcttcaatctttgtccctgggaggcacttttaacacctgccaaccatagcactatcatcagaaaaacatttagagatttatcttcgggctggtaattataagagataatttgtttggagtatggatanagttggtctagcataaacaaactagaggctcaaattacatgatgaacatcatt

SEQ ID NO: 430521 - DNA, 364 bp, Homo Sapiens
aagaatccttggtattgaatttttagaaatgctcacataattgttgggactgattcattcctccacgatatgcctcctctctctgatatcctgctaactgtagccgttgtggcatttgagatgacaggacatatatatatatggccccacacttgaccttgagtgcctgaatgctctgaaatcaagcatatggcacagcgctcaagacttttgggtttgtgtccttttttctatggctgtctcttctcaattctggagaggtctggttccagtggctggtttccagggattgattcttaagctctggatcacagagagaagcaacaaggaactatactcaactcaaaactttttaggagaatca

SEQ ID NO: 430522 - DNA, 328 bp, Homo Sapiens
ctgcagggccagcaggtaaccagtcatgtgttcttccctctggcttctccttctgttgttttcagactatgtttctcagtgttcttaccactggtgcaatctatccctgtcaactaaagaaattctttttgttttacttctgtgtaaggttttatttgtacaaatggctccttgttaaggagtagttttatgagaatattctattttacaggtaaaaagtaaaaaaatgtcaggaaggattgctcttggggaagaaaatgttacttgatgactttgtagtcttaaaggtagataaggttttttttgaaaaaaatccttactgctaata

SEQ ID NO: 430523 - DNA, 155 bp, Homo Sapiens
tgacaccagtgcctggcctggccattgttaccctttttgatacagttgtgaggagtgaaaatactcacgttcaaaaaggtacctttcaaggcagagtctccctcctaagagataaggaatttcagaaacacaccaggaatcaaggtggatagaga

SEQ ID NO: 430524 - DNA, 429 bp, Homo Sapiens
  misc_feature (123)..(183): n is a, c, g, or t
  misc_feature (411)..(411): n is a, c, g, or t
ggaaccccaatctgtgaaaggacacataatgatggggaaaatatattccttatcagaacaaccaggtgttctcaaatattgactgagctgcataatcatttgggcaaagtatatcttgcaagnnnnnnnnnnnnnnnnnnnnnnnnnnnnnnnnnnnnnnnnnnnnnnnnnnnnnnnnnnnnncagaataatcattgttcatgttcttgataaaatcaagttgatgcatcaaggcagctatccttgaagatataaagcctatgacattaggtcctgtgatgttgttttacatgttgcttactggcatggatgccattcagaaattctgctattctactgggactcatttctgtttttctagaagcaactgcacatgcatagaatctttcttctggaaagaaaacctttcanataaacacactctgcagg

SEQ ID NO: 430525 - DNA, 407 bp, Homo Sapiens
ggttgggagggtattgctaagcaccattgatgcactaagtatagatgccaggatcaaatctattaaccaccaatttaaacccaagtgtgagagtcaaagggcctccatggaagcctttaaaaagtccctcatcactggcagccagaaggccaactgaactgaagcccaggtgcagcctgtacttatgagtggcagaacgccagagaaggttaattctcagcctgtgtaagtctccttcaagagaatcagggtcctgattggaaaaaagtgggaacatgagaattggaatggggaaacttattagacacacttaaggaccttggcctcccagcttctccggaatatctgggcctacagaggtggccactcccttgctggaagatggaagaccttctccttgcttgaaa

SEQ ID NO: 430526 - DNA, 416 bp, Homo Sapiens
gctctcctggtcctagctcgtggttgtgaacccgaactcactgtcaccctagtcttgtcattgacagttaatgctaattgcagatttgaagtgacaaagttacatttatttgcaaagaaatgcaatgttaatggcagaactagggcacaggatataacctcccaatccactcatctcaaatatttccctctgtgggaagccagcctacactgagccctttatgagacagtcagcctacatggagccttttcagaatcgactggtctacaccaactatttccagagtcaacctgtctacactgagcctctccttagttagccagcctacatcaacccttccccagtcagccagtctacactggtcatcctgtattgtatattaccactgtatgtactttatcatgagttttagcaaa

SEQ ID NO: 430527 - DNA, 429 bp, Homo Sapiens
gtcaccttgagaagttccaccttgtctagcaaaacctcctttcagaggcagccaccacaaagggctcttatgagagcagctgccccgcccccaccttcacttccactccctttaccattatttttctttgggggcagagctgaggggccttcctgctatgactctgaggggctgtacttattttaaaaggagattcaagtctagagacttcccataccagagattcatttttcctattttccactatacttggaggacactcaaggggtgaagtaaggctttccttttctagagggcattttgtcttttccctctttcagcctcttgagctctttggagatttaagaagggaagtgagagccagcttctagtagcactagacctcagaacagggaccaacttccttacaggggtaggagataggaggga

SEQ ID NO: 430528 - DNA, 357 bp, Homo Sapiens
  misc_feature (327)..(327): n is a, c, g, or t
taaggcaaatgaaacgtgaatacattatgagtcatttagtgttcttaaacttaccattatttgctaggtaaaatgctggaaaaatcagcctataaggttcaagagaaattatgttgacaaaattaaataaatgactggtctggttgaaaaaatataattgcagaaataaatataaattgcaagtaagctggacagttaaagttttagtttggtccatggcttggctcaatctagctttttgggcagatttactattttacattgagaaggtcttagaatgagaacttaataaatatttgatgaggtactgattggcaacattaatanagatgatgggagctacataagcaagttggt

SEQ ID NO: 430529 - DNA, 480 bp, Homo Sapiens
gctgggcctcagtttgacatctgtaaaatagacctatgaagacagagcaggcacatgaacaaaccttggcaaataacctgacccagtgccaggcacttcacaggctgtcaggattccttccctgtgtggtgatctctcggaatcacagccttggaaccctggagaggaaaagggctgtcgatctcagaaagccaggccaagacccagctctgcagcatacaagccatgtggccttgtgcaagtcacttcacttctctgggcctccattgccttatctggaaaatggcttaataagcaccccctcatgcatgaatgagagggttaactgaaagcctagcccgtgggatggggtttgccagcgtgtctggttaccactgggttagctggatatccctcctctgtgagctccctttctgcaactggagcggatcaagagcgttgttctatcagtaactcgaccaactaatattgactgtgtgc

SEQ ID NO: 430530 - DNA, 348 bp, Homo Sapiens
tgacatcacacctggccaccattgatctttctgataaaggtactttttaaaaacttacattagcagagttctttgtgtagtttattaggcactttcatgtttatgatagcatttgatcacatgtaaacttggtaacattgacaaaatcactttcattttcttttacagatatggaaattgatctcagagaggctgagatctgctcagggtcagcaagctctcaaaactgttactagtactttttcttcaaaatatgtgtgtcgagcgtttttggctgagcctggatggattgacattttgtatgtgactttttgaagtctggacagcagaagaatgtgtttggtggtt

SEQ ID NO: 430531 - DNA, 426 bp, Homo Sapiens
  misc_feature (173)..(188): n is a, c, g, or t
gcagcaaagcagaaaagagtcagggtgaaatgtcatcaatttcatgttatctagagtcaatacgaggcagtataatattcaaacgagattgggtgcgttcggggtagtatgggtgtagacaagattaacttttcagttgagcagcacaatattcaacccgcctttttacatcnnnnnnnnnnnnnnnnggcagaagcagaagtatccatcaccatatttattgtaaaaagggatcttctcacaatatatgcaaagtagacaaatttaagaaaaccataaagggactatttctaaactggtcacatttggtgtggacaggcaggtgtgtaaggaaacattatgctctaaattctataatagacagatgaacaaaaccccatgaaagacctaaagaagaaaaaattagcaccaaaagcagggattgga

SEQ ID NO: 430532 - DNA, 141 bp, Homo Sapiens
agtaaaaaatagcacatgatttggagcagtgcttcccggctccctggtgactttggagctggcccgccctgtgtgagagccagcgtgtgtggcgggcccagtgtggctggctttcagctcactggggatttcctcctcccc

SEQ ID NO: 430533 - DNA, 163 bp, Homo Sapiens
  misc_feature (149)..(149): n is a, c, g, or t
gtagttctgtataaaggtttaataaggaaccctgacctaaacttggggagttgcttagaaaacttactgagcatagtttgaactgaaatctcaacaatgagtaagtggtttatagaggaaagaggaaaaaaaggaggcttgggtatgtncagacagaaaaaaa

SEQ ID NO: 430534 - DNA, 249 bp, Homo Sapiens
gcccatgcgaggggtcaggtgtcgggatggacagagctctgaaaggccaaggtcttaggataggcccattctctatctgctctgaccatggccctgggtctcagggagattggttcggagtagagttgaggggcaggctgaacgtctagctgcctttctcagttctgacgcaagccctcaggaactcaggtgggcaggctcccattcttatgactcttggctgccccagcttcttcattgtctgaccct

SEQ ID NO: 430535 - DNA, 409 bp, Homo Sapiens
  misc_feature (55)..(308): n is a, c, g, or t
gggtcttcggcactcaacatagtacatgttatcagccaataaatattggctcagnnnnnnnnnnnnnnnnnnnnnnnnnnnnnnnnnnnnnnnnnnnnnnnnnnnnnnnnnnnnnnnnnnnnnnnnnnnnnnnnnnnnnnnnnnnnnnnnnnnnnnnnnnnnnnnnnnnnnnnnnnnnnnnnnnnnnnnnnnnnnnnnnnnnnnnnnnnnnnnnnnnnnnnnnnnnnnnnnnnnnnnnnnnnnnnnnnnnnnnnnnnnnnnnnnnnnnnnnnnnnnnnnnnnnnnnnnnnnnnnnnnnnnnnnnnnnntcaatgaactgaatgtattgtcagttactatttgtgtcttctagaataattctggtcttagagacttttagatgcattagaatatgaaactagttgaatag

SEQ ID NO: 430536 - DNA, 207 bp, Homo Sapiens
gtccatctgcctgctggtcatctgcaccaagtggctcacaggcctaccacgtcacttcttccccaaactcatctgcccataaagtgcctaaaccaagttcaaaattggctggctctgggcaacacggaatcctgtttctctgtttatatggtctaggaaatgacataaagagcctactacatcaaaacacctgtgcagtgaaggaca

SEQ ID NO: 430537 - DNA, 415 bp, Homo Sapiens
gtcttcaagatgtggttatgcattattttttctcctaaaagagttttctcataaagcattgtagtctgcagagtggccattctgacaggctaggaagctaaagtgcaaaagaattagcactcctaagagcagctctcaatcagcgactctttggagttcatgagtacattttgtaactatctggcactttcggtgggatagttctaaggtatctatttacctattttattgccagttgtccattgtaaatactggctaaataatgcatcgtaaattgcctcccttccattcctgtgtcagtttttctttctcctattggtattacttacactcttcatacttgaactattgttttacatcctacttctagaagaactcaaaatagaacacggggtctcaaatcagatatgggact

SEQ ID NO: 430538 - DNA, 419 bp, Homo Sapiens
gcatccattaatcaaacaaaagacaacctcatctgtgcataattaataactgttttctcactacatcaaatgctatcacctttccacaaaattttaatcactttccaacgtattaccatcaacttaattatttttgaacacaaacacaaaaagttagaaaactaaggcagttttaaagcttccccagttattacttattaagatttggtaacccccaaaaaattccaagaaaatgagccactcatgcaactaatatagaattcatctttggaaaatcttaagagaactgatgtaattatttagcttttgaatgattaaaagagagacttaaagcaatactacacagttatttaaccagacatcagagttaccagaggcttaccagcacatcagtcaactacatacagatggggtttagg

SEQ ID NO: 430539 - DNA, 392 bp, Homo Sapiens
  misc_feature (274)..(275): n is a, c, g, or t
tcttgagactctgggaggaatgaagttttgggtttaaatgtcaccattcaaaatctgcttccccttcctttctgttctcatctgttgttagggaaaacaatgaactggttttttgtgtcagtctctggaaaaatagaaagtcctcagaagattggacaatgtcactgctcttgtccagctcagcgcctttgagggctggtgccttccctgtggtttcccagtgctggcagcccggagagcttggtgtggtctccttccctgcagcggccgcgcnntgcattctggggaagcacattctatgcactgtgaacagaacagtgcttgaggctgtgcttgaacttgcacccggggccaggcctgagtcgcggcagtggagcagaggctttccatga

SEQ ID NO: 430540 - DNA, 379 bp, Homo Sapiens
ggtcaagctgagccccagaaattcagagagtacagctagtcagtgggagggtggcagtggcagtgacactgaggccccatgctctgtctgtgcgaggttaaggaggggtgagcagtgctttgtaaaggtatgtgaaaaagtggtctctttctatgctcattctgttttgccttctgtttggagccttgtctttttctcaggtgaggtctttgagggctgaggtagacttcatttctgcatgccttgagtgcagagatggtgattacattccaactcgtgccaactttgagcagagtggctgtgtgctatggaggtagtaagggaagagggaggtgccatgtgtgacctggacacttgccattcgtgactctaggacact

SEQ ID NO: 430541 - DNA, 139 bp, Homo Sapiens
gggcacgagggtcagtaggcggcatccccacatgcacacaccctctgcggtagaaatctatttaaatatagaaaccaagtattggaagagctaatgaaggtcatttaatcaaccagatgactaaagctgttatctcccc

SEQ ID NO: 430542 - DNA, 141 bp, Homo Sapiens
gaaaatcccaggaggtaggcattatcacccattgtaaagatgagcaaattcccaagtcctgcctgaggcaactcaaaactctcctagattatactccataaggaagtgcaaggctgggacagagactcagttctgctacag

SEQ ID NO: 430543 - DNA, 144 bp, Homo Sapiens
gatctaagtcctgcatcccactttcagccaggaggtacaggcaagatgggacaggtttcacaatggccacctcctgcctgacattccttggtgaaatccctgcagccccagcccaagtcctgctgaagtaaaagagcccagtgg

SEQ ID NO: 430544 - DNA, 115 bp, Homo Sapiens
catatcataaaaacacaatttttgaagagactttttacaatatgtatatattgaagttgggatcttctatactcaatgtggaagtaacaaattttgttattgaaatcaaagcctt

SEQ ID NO: 430545 - DNA, 115 bp, Homo Sapiens
ggcaggtgggctgagactggaccagtaagtaagaatcatcaaaagtaagttgttccagttccaaatactaaaagaggagaaaaaaatggttcaatcagtaaagaactaattactt

SEQ ID NO: 430546 - DNA, 144 bp, Homo Sapiens
ggcagtttccatcaaatgagatgtagaattcacaaaggtttgggggtcaccatgttgacctaagtctagttatggtggccttgtaccatatttaaagtataacacatggaattaagagattatggaagggttatcaatttttaa

SEQ ID NO: 430547 - DNA, 132 bp, Homo Sapiens
ccagtgtggcagcctgcgtgggagggctttaagcagagcggaagagtggtctgatggatgatttaaaaaggacccttaggtgtgggtatggaggctggaccgtaggagcagcaagattggttaggtagctgc

SEQ ID NO: 430548 - DNA, 116 bp, Homo Sapiens
gactttttataaagtaacccaggtgtagttttaagttaaaatttaagatacacataacctttgccccaataagtctactgttggggttttctccaggaaagctacgagtgccagga

SEQ ID NO: 430549 - DNA, 106 bp, Homo Sapiens
acctcctccacattccccaccccctggaaagacagtggtcacagaatagaaagaacacaggaactggggttgacaagcatgaatatgggccacagcccacccctga

SEQ ID NO: 430550 - DNA, 123 bp, Homo Sapiens
atatttccaggaatgtagtgtattgtttcacatacatatttaaatcctagacataaaactgtgttgcattactacactttatctgtcatgatcattctttttctgaactccttctcattttgt

SEQ ID NO: 430551 - DNA, 132 bp, Homo Sapiens
ctgtcatatgtttatattaaggatacaatatgaattattttcataaactttgaagaacatagagaaatccttttgaatttagaaatcagatcatgtcaagactctgctttcaacactcaattattcctatca

SEQ ID NO: 430552 - DNA, 345 bp, Homo Sapiens
ggccatctagcaccaaacggagatggagaaacacacacataggagattaggtggaattttttatgggttacacctggaagtgacatacatcagttcagtccacattccaaagaccagaagtcagttacacgatcccacttagatacaaaggtggctgagaaatttagtttagctgcgtgcccagcaaagaggagaaccagactggtgaatgccaacattcttgaccacagcaatttgagaactataaatatgcagtgttcaattactcaaaagtagctgaaagagattccataaagcaggggatggggagtagcattctactttttgagcagaagctgctgtgcg

SEQ ID NO: 430553 - DNA, 186 bp, Homo Sapiens
gtttgcctattatccttaaggaagatttacttttcttcattatatttttcaaatataacaaagactcttaccacagtattacttgttctttctagtcaattattgagtccagaaacaaccatttttataaaatctccactgattattttttctttactcctgttagtgaccagtgggaaatgatac

SEQ ID NO: 430554 - DNA, 407 bp, Homo Sapiens
gggtacttgatctgtgtcctgcagagaacccttctggcggccaacaggaagcttgtgcacccttcttcagataatgtcttttaatgcgcagacttgaacgtttaggattacaaggaaaaccggttcctttcaaacctgtttatctttgtgatgtagcattccgtttcaagttgaaagccattcaatgtcagagagaaaacgtatctatgaaaccagagaggctgctcagatgggttgcaaactagccatccttactggttttacactagaagtgttacaaagacagttgtccaattttatgaatcttgaagggttttttgttgttgttgttatttcaaatacagtgtaatacaaaaatatgtggccccgcagagacgattggacactctcaggcatggtgatggagt

SEQ ID NO: 430555 - DNA, 382 bp, Homo Sapiens
  misc_feature (352)..(352): n is a, c, g, or t
agaaaagaactgtaataagcagagatgtcaagcaatggcatcctctgagaagagaaagattgagggtatgaaaaagtactaagtattcagggagtagcaagcagcaaagacttgacggcacatagtgtctatacgtgttagggaaaagtaagagagaaagcaagagaggcagactgagaagaatcatgagctcaggagtcaatggtttataaacagagtagagaactgatcattacaggggacaaaagataaggacatgatgactaaatagaatagctaggtgtgagggaattctggtagtggctatgtatgactactcacccagattgctcctacgactaccaatttgganaccatgttgtacaaaagtgattctgggccc

SEQ ID NO: 430556 - DNA, 321 bp, Homo Sapiens
aaacaaaaaaagtgagactagcattgtttttgtatttttgctaatgtcttttacatctgatttaatagaagacactggattcttaagtcggtgtcttcattagatatgctgctttggttgaatataaagaaaaactttcacatagacttgcggttcatgaaccccctgaaagggtttcaggtacccccttgtcaggaatcctcagatgatactttgagaaccactgcaacaaactatgttgcttctcagttaaaaagtctatattattaaccattgaattagtattagaactgacaattctttccatctcccaagattttt

SEQ ID NO: 430557 - DNA, 260 bp, Homo Sapiens
gggccaggggagtttacagacaatgcaactgtgcagcacaaaaccagcagcaaaacaggcctgacagatagaagaagaggcttctgcgccctgtggaagccgtcatctcaaccactctgggaacagactctgtcagagggagtgggcgttgctgccactgtttcagaaggggctagacatcctagaataagccagaatatctgctagctcttgctttataagggaagagagattatgcattggcatctggggaaatccct

SEQ ID NO: 430558 - DNA, 348 bp, Homo Sapiens
ggctagtccacggcaggcatccagataaggcccagtagtgcttacttctctacactgttgtccggctgattaatcttgggaaggtgcagacccttcagaggttcccctgtgccctcaggttggaaaccagatgcttcagtaggggcattccaggccctccatactgtgggcctgcctactccctagccttactcctcaccccatatttcatctgtgcttctgttcccctcaagaagattaggctgctcaatgcccatcccttttccctcagctgctcacatcaacccaaatgccctggggagactgtcctcaaagctcacctgcatggcctgtgagctttggaagggc

SEQ ID NO: 430559 - DNA, 113 bp, Homo Sapiens
cactctggttagtaaagatctgccattaattggtacactacttatttcaagtctattctcctcatctctaaacactttaattccttgagctcttttcttcttcctagaccctt

SEQ ID NO: 430560 - DNA, 417 bp, Homo Sapiens
  misc_feature (105)..(105): n is a, c, g, or t
gccaattacctactccaccctaactcattccgattacctgacgcaccctgactcattccgattacctgctccaccctgattcattccaattaccggctccgcganagctcattccgattacctgatgcaccctgactcattccaattacttgctctgtcataaccatttttcccgccacaccactcaccccgtcgatctctttaaattagccaatcagaattagtttagcctgcacggtctaaccctggccaatagcagaaagacacaacaacgggggccacgtgcgtcagggataagaaccccttcccctcccttgtccaagtgtgcgctcatcgttgctccatctgtaagggtgcaccttctatagaagtaccttgccttgctgagaattaaaaacaaacatttattttcgagta

SEQ ID NO: 430561 - DNA, 415 bp, Homo Sapiens
gcaaaggaaagtccggcctatcgcccccttctctcagccctacctgtacacagtactgaggctagggctcctccatgcttgggctttgtcagtgatgggtggtggagccacatttctgggccttcactgacacatcttcctcccatagaagttcaccagaataatttgtggcaaacacatctttgtggttgacgttcctgtgtttcttttctctactgattcttgcttgttatcttgcatgttcagcatgagaggttgtccctgtgcaattattcggctgtttgcttaagaaattattgccacaatttctgagattcaaagaacaaagaagcataagaaggcagggagatactttagtttggagggaagaatcatggatgtttcacacagtgttttgaatggttttgcaagcatc

SEQ ID NO: 430562 - DNA, 339 bp, Homo Sapiens
aaagggccaagctaatgttgagcaacagcagtgggtagatcttgagattaaatgtcacctccatgctgttgccgcttctcagtctacttcttaatttgaagcgggtggtgattgaaagtgaaggaggtttgttctgtcccaatctggacgtgtttcatgtttgggaatacaggaaaacaagacaagtgggccaaactgccttgtttcaatgctccagtgaccatgaggactaattgctgtgctaacaagaatgagagtttattcagacttagcggatcaatggacacattcaattttctacaggcgccgtcagtcctgttccgcctctacatgtgcatt

SEQ ID NO: 430563 - DNA, 407 bp, Homo Sapiens
gatggtggagtgaatcagtcactttagacctactcatcccagctggagggtctagaagatacactcttaaccaatgctttgcgaaatagatttgtgagagcagcacctgcatttttgaggagacctgtaattgctcttttccttatgtcagatctaacactgggaactagtcactgaactataaaatttaaatacaatgggaataatttaatccagaggtggcaggggccaattggtggcagtcaaccttcaaaggtaaggtgggtgtagctactgtaatggacagcacaggcaaagcagcaatcggaatagtctgactcgtgtcagactacggcattggttaattaatcatggtgttcctagaagtgaaattgataggaatcctactgcatttcttttttgagatg

SEQ ID NO: 430564 - DNA, 245 bp, Homo Sapiens
gggaaaaacccttctgctcaaaggcagtccatcctcacattgtttactcagtcataatcaagatgctgtccaattattaacatcagtcttccctttcatatatttttaatcttttcaatttataaacatgatcaacattttttcctgtgaagagaaaaaccaattctacatttcagaccttgctttctatccacccactctctccctcagccatggccattacctcttcaaggccaaacttctcc

SEQ ID NO: 430565 - DNA, 188 bp, Homo Sapiens
  misc_feature (105)..(105): n is a, c, g, or t
gctgaggaagggcagagtaccttccattctctgggtgccttccctcctcctgcacttttcagtgatggtttcaggttcctgaaggctaccgtgtgccacaagganggagctgccatctctccatttggagaggaggagggtcaattcagcatcactgagatggggaagaaaagttcagactttatttt

SEQ ID NO: 430566 - DNA, 112 bp, Homo Sapiens
gctagagtcctcataaaacagagctcctctagccaatgaatcccagaatcacacaagccattttcccctcagtctcacattactaaagaccaaaagtgctatataccctgtc

SEQ ID NO: 430567 - DNA, 214 bp, Homo Sapiens
tgctgtctgtgtgctggagatatagagggaataagacatggaccccccgcccccaactcagggagttcacagtagatgcatttagtctaatagttcagtcttgagaagtcccaagatgaaaccgtagtaagttcactttgtaagtgctaagtgaggtgtgcattggacttagaagatcaggtttgtgttttggctctgctactttgcagcagta

SEQ ID NO: 430568 - DNA, 224 bp, Homo Sapiens
  misc_feature (112)..(112): n is a, c, g, or t
gcctccttcagggcccctgtctggctgctgatcctcttcggcccactaagcggggtgggacacacatccgttcagcccaggagctttccaagcaagctggctgcctgaggcnatggtagtcagagcctctaccccctcatctctgactccctgaaagtaggccctacaacctggctgcaggaggtaccttggtgggggaactgtcctgtcacctggactgagac

SEQ ID NO: 430569 - DNA, 209 bp, Homo Sapiens
gggtgacgttctcatcacagatgctgccaatgtagcagtaccgcttgcagtttgggattttcgcagaggagacgtagtgggccccacgcagagcttcccgaatggtgcctgaaatctgcagatagattataaataggcttcataagagtgtcttctctttcgtcatcagtggtgtctccttcactgtggtttccaagatgaccactgct

SEQ ID NO: 430570 - DNA, 286 bp, Homo Sapiens
ggatgcctgttaactagaaagagttcacagggggccctgcagatgtcatcaggagacaccacgaagagacagcagtggatcacgaatatcgcctggaagcaaaaaggatggaagatccggattgggcttaaagaaactgactggggccccagtgcgtgtgagggcacctggcagaacgcgacgcactggttgcctgagagatgttcgcctgcagctccgggattccatatgtgccacgctgcaccctccccacgagcagtgcctcttggtgttagatgtgcttttg

SEQ ID NO: 430571 - DNA, 181 bp, Homo Sapiens
aggtctcttttctgaaactttaatttccgctgctgctctgttgcaaccattttaatcaagtcacatctcttagacaaaattcactcagggttctgaaggaattagttattttctacaagcaactctgtcacgagtgatagagttgtagctctcttagaagtttttttcctctttcaaagag

SEQ ID NO: 430572 - DNA, 295 bp, Homo Sapiens
actcaaaatcaactggttatgaactttaattctatctgcaaaatcttgtcacctttgctataaaaagtaacataatcacgggagtacaccccatcatattctcagtcccacccacacttgagtagaggagagattatacagagtgtctataccaggccatgggaatattggggctaccttagaattctgtctgccacatcggtgttcaaataaaacaacaaatggatactgaaatgtgaatagcagataatttttcgcctgtcacaaaactattttcttgttttgattattttcc

SEQ ID NO: 430573 - DNA, 240 bp, Homo Sapiens
gcaggattagaggaaggagaactgggcaaactaggcatgaaattggaagttccatattaaacttggtttcaggtggcaaatgtcctagcgtagttggaagctctggctaacatccctcactgtgttcctttttctaggaatatgcactctgaatataaatgaaaaagaatttattggggctgttaaagaaatttacattttcttattggctaaagaaaaagtctttcatctacaaaatag

SEQ ID NO: 430574 - DNA, 106 bp, Homo Sapiens
gaataataattaacacagcgctaaatagcatacagctgaatgcacacttcatagagaattgttgcaatctggaggcaggtgtcagtgcggactggtcccttgaatg

SEQ ID NO: 430575 - DNA, 122 bp, Homo Sapiens
ccaataatgcaaaccactatagcaacatcttgtagattttcctgtctctacacaactaacttcaaatgcacatcacactggactggttactggtgagtccatggtgcacagcagatgcagtt

SEQ ID NO: 430576 - DNA, 322 bp, Homo Sapiens
agggaagaggggaagaaaaggaggtggagtaggcaatgaggccagtggtcacatttttgtgaggcttttagtaccattcagtgaatctacgttttgcgtgtgagaaggagggagtggggcagagtcgcatacgccttctccgcacagtaaatctgcattttagcctgcgataaataagcacgtaaattactttatctgggaaagaaaagaaggcagcttttcttttgcgtaacttggttgttaagcttaactttccctttagcttggtgaattcggggtcctgagattttatttttcttttgcaatgtgtatacaaagagat

SEQ ID NO: 430577 - DNA, 329 bp, Homo Sapiens
gcaggcttggaatcactaatagcactgccattgggactttctccagaagacccttaattaggaagagttaaggtaggtggattcctgctccgcattggacagcaatgctgttagatactacagtccatcgccaccaatgggagacagcaggagaagcccctcagccttccaggaaataaactatctttctgaagtgtaggaagagacaattcgggacaaccagttcttaatttagttccatgttcccccttgcatgggaggggaacagacggagcggtggaatcataaaggtaaaggccacagatagttctctttaaaggagtagcctc

SEQ ID NO: 430578 - DNA, 404 bp, Homo Sapiens
ttgaacagaaacaaagttattcagcctaaattgcctgaaggctgcaattactcagtctttagtgacacatactcataaaatgccaagttgagcattttcatatgattatgatacacttctattttaagtatgtcacatgtggatttaacagcaaacaagcaagcgaagtcagtgaattacaacataaaaacaattcctcaaactagaaagtctagtgtatcagtggcattgcatttcaaagcaattaaagattcagaaataattaattgtgaggcacaattggctaagaggtgaaattggttcttggatactcctggctgcttagaaaagtcaactgctgtgtcctaactgggtccacatttcttaggagtaagccagttctggatttttccctttcgcacatt

SEQ ID NO: 430579 - DNA, 411 bp, Homo Sapiens
  misc_feature (125)..(163): n is a, c, g, or t
gattaaatatcacatctagaggggaaaaattgctctgtaaaacagaatacagacctttatcctgtattctgtatggactatgaacattcctttctttcatttctggaccgttatagagattaagnnnnnnnnnnnnnnnnnnnnnnnnnnnnnnnnnnnnnnnctgaatattcctatccatttgaggtatagatactaaaaactttgcatacacttatattttattctatacagaaacaaacaaaaaactttcatgcaaagaagctctagaccccaatgctttcatttacatgaaattaaaaaataattccaatttgttgggaaaagatggcacagctcagacacattgttccctatacaaatacatatataaagttgtgtataaaagtttacatatagttattatatata

SEQ ID NO: 430580 - DNA, 339 bp, Homo Sapiens
ttaatttagcaagtaaagtagcagaatatcctatgttggattagtcagtggaaaaaaatatctttcaaatcgcatttgatgtttgctcaccattattatgaactaagctactccatggaactagagcatagctgtcaagtaattatgaagcgcccatgctagggaccgcatgccatttaatgagtttacatcagtaaaaagagaggacagattcaaaaatgggacatgtcacacatacatatgagaattttcccataggccaaagggctgcgttcttggttttgatatcaggcaccaactctaataggatgaagctatctgtgtagcttgatgaagtag

SEQ ID NO: 430581 - DNA, 231 bp, Homo Sapiens
gtgagactccaagtgtgggccagggcagtctgaccatctcctagattgctgcacagtgcagactcctgagccccagccatacctaaaaataggctctgaggaatgggacagcacatctgcatttttcattttgcacagcttcccaggagatcattactcccattaaagttggggatctttgctcgttgggacacatgaaatgagtcttatttagctgggcgcagtaaaatc

SEQ ID NO: 430582 - DNA, 405 bp, Homo Sapiens
ggagcaaacggaggcacagaacttaaaaaaacacacatccagaagtataagtggtatagctggagtcagcccaggcagaagccacacttttaactactctgtaattaattcaacgtagctgcaaaacagagtgaaatgatagtagtggatgggtgctgatgatggcaaggtaggcagggacaggacttcaaaggtctttctatgccataataatgctgagttcagactatatctcatggttcaaaatttcttaacttgaaaatcatgccaaccttggcatgcatatggattttttcagaagaaagattccacaggtctcaactgcaaaggtgatgaagagtcattgaaggctgtttatgcagagggatgggttggcggtttacactgcagaaaaatcacgctagc

SEQ ID NO: 430583 - DNA, 394 bp, Homo Sapiens
gcttgaagctaaatgaacagtaaaaacctgtaggtaatagtatataaaactttctcccagattctgagcccacccgagctcagaggtacttcctttcctttcagatgatccagccagagattgcagtttaggtagaacaacgggggtgcaatggtctaatatatgctagttgcattttgcaagaccttcagaatgggtgactagtgacactaaattctccaccttctgcggaatttctcaaagataagcagtgattttcctagagatgggaagtttgggtggatgggcattctcccagaactggaacccatgattttctgcatgaaaacagattctctctcatctaagactccaccaccttctaagaataagctctaaaagatcctggttcttc

SEQ ID NO: 430584 - DNA, 328 bp, Homo Sapiens
aggtgcttgttcttgccaaatgtcatggtgctgctcagagagtcaaaaagacccttggctgattttaacctattatcctttccctgtaataaaccctaatcatcagtgtaacaattttcagtgagttctgggaggcctcgtagcaaattatcaaacctaagggtagtttgggggacctccccaaactcacaattggtatcagaagtgagggcagtcttgtgtaaactgttctctttaactttgtagttgactgagttcccacgtgtcaccagcgatattattggaggatttaagatattagcaaagactttgggttctctcactatat

SEQ ID NO: 430585 - DNA, 169 bp, Homo Sapiens
gcagactaggactgcatctggttgcctccagatggctttaggggccatgcagagggcagtggtaggtatgagggagccagcgaggcttctttggaggcgatctgtttgatgtgatacggtctgtggatggaggcagtataacttcgtggcttctggcctgtgccctgga

SEQ ID NO: 430586 - DNA, 431 bp, Homo Sapiens
  misc_feature (50)..(93): n is a, c, g, or t
gctaagacaggaatggagccgggtaaaaccgtaatcccacagatggatcnnnnnnnnnnnnnnnnnnnnnnnnnnnnnnnnnnnnnnnnnnnncttggggaggtagagagacagagctccagtcaaagtgttggagggaggatcagccccagggtctgcggggtgggaggatctggctcaggccttctagtcacaaaaggcctcaaatgtagcctttttcccaaatggtgcttaatgaacattcacagggacagcttgacagaacagataaaagtcgatttccttaaatgaactttagaacttggcatcaggctgcagggcgggcagtggcacgagaatttatattttaaaatagattatataattatactatataaaccagttatgtgtctttgcatttgtttttgatgctggaagtgttgatttattga

SEQ ID NO: 430587 - DNA, 131 bp, Homo Sapiens
aatctcatggcatctgtttcatgcggttgtcccgtggttaactgagataacctttgtgagttgcctggcacatggtgggaaacacatagtgaatgttattttccttcccccttgaggaaggacacacaact

SEQ ID NO: 430588 - DNA, 204 bp, Homo Sapiens
tacaatacgataaatacatttgatgtaactctttctaaagtaaatattctatttatgttgagaatatatacgagtatgtttgtcccttagatgaaatcacattcattttagtatatgtttttttgaatttctgaaaagtaaatattaatacaaagttcacaccatgtgatttatgtacaaatggaatttgcacttaaattcata

SEQ ID NO: 430589 - DNA, 285 bp, Homo Sapiens
  misc_feature (43)..(134): n is a, c, g, or t
tccacaggtgtgcaccactgagctcaggttcaaagttgttgtnnnnnnnnnnnnnnnnnnnnnnnnnnnnnnnnnnnnnnnnnnnnnnnnnnnnnnnnnnnnnnnnnnnnnnnnnnnnnnnnnnnnnnnnnnnnctggttgttttaatctctacctaattttctccacagacagtatctcctcctgatgattaacaattttgtatagcttaccaagagcaaaccctacaccacacccactgtcccaggaagagaatctcatcagggaaataaactagcaatagac

SEQ ID NO: 430590 - DNA, 323 bp, Homo Sapiens
gaaagtaactaactggcaaggtacttcctaacttcaaggacaaagcgtcggtggaaccaatccagaagaagggttcttgttgtccaggtcttcttgttgtacaactgaaagactggcagctttatctttcaagtcttggaggttagcagttttctgtgtaagggcagcctcatcataaatctgacaccatttgcacgaaacagtagagtcagcctatccctacctgccttaagtgctcgcttctcttccttactaataaatgtcctttgaggcattttttccagaatagggcactttagtctgcattacaaacctcttcatga

SEQ ID NO: 430591 - DNA, 438 bp, Homo Sapiens
ctatgcccagattcaaagagagaaagctaagtgggcttttgaataacttccacttattttaatgcagggaaagctctagttccaaatatgtggaacagtattttcctaaggctgcaatgtgtcagaaaaagaccatattgagtcattgttttctgaagccaagacaggagattgagagacggatgctgatgggcagcctaaaataatatttcattcttgtcatccttaggcagtttaagaccaagtcattttggatagatctacagtttccctctcggtttggaagaacaaagcttttgttatttatgttcttaaacaacagcgctttgtcctatactcaggagcgtgcaaagcaaacagaagatttcctgaacggccatcccatttatggtgaggagtcagtccaagaggtaagtagacatactcagctgcaaccat

SEQ ID NO: 430592 - DNA, 463 bp, Homo Sapiens
gaaactagtgactcgttaatggccacttgctgtctgcagggtgtgaggaagatgtgactcaagaggactaaggtcttctttgaatgattcacaagatacatttcagaagccttaaccatgcctgcttccaagatattgaacaacttataaatccatgatcttaaacaatcctggggctttgaggcaaggtctcaagtctccgggagggaatggtgggaagaaccagggttgaacttctaaatgaagttctgggctactggctatggatgtgcgcatcctgagtgttgaacgatgagatgcagaagcgactgagagcggtcagtaaatgcctgagatcaacaataatttttccaactacttaaattcacttaaaagcagcctcattcataaagggatttgggtgaggtctgttcctcctgctggtccctcatactccaagcctcaatttgagttaataagatgc

SEQ ID NO: 430593 - DNA, 427 bp, Homo Sapiens
gtatttaaaacattgcatattatttagaacttgatatattcattggcacttatagccacaaaaacatattatcaagaaattttctattatcacaaaatcagatgccttcatgttttctctcttatttttaagggaaaatatcaaagcagtttggggagtttgcagtgtatgataataaatatgatatttaaacgatgaaactaaatggtgaaaatctcttgttttttattttctgccttaataagatttatatttgtgttttttactgttagtagaatttagaaattattttatttcctggccctaccaatttgatttgtgtccttcagagtattcttagattacagtataaaaattcaaagtctgagcaatattcatgagtctatttttatttgtcctttatgtgagaattcatgaattacagtac

SEQ ID NO: 430594 - DNA, 145 bp, Homo Sapiens
ggttagatccagaaaacgaagactggctgccctgaaacccccagaaaaaaagggatgtaggacattcaaaacctggtgcctcctaacaagcagcaagtagaaaaaacagactctgatgtaagtcaccatcaaaaggacttcgttt

SEQ ID NO: 430595 - DNA, 463 bp, Homo Sapiens
ctacatgtctttcctgagaatgtactacacaccccgtgctttcactttcctgggttaaccatcagggatttggtccccaagacccttgcccagctcttagaggcaccagcagaggcagacctagtgctggagtgttctaagatatgacagtcctctttggagcccttgctgaccttccaaagggtttactgcagagaaaaagccaaatcagagatcagtaaaggctcttcaaatcagacagcctggcaagacagggtcagagtaccactggctctaaacataaaaagatagtgacttttatataactggaagagctactttgaccaggagttccctcctgcttctcctgtaccccaacaggctctggagagtcctacagtgttggctgttgggtttcagctcttgacaccctccagaatgcaggagacagcttaccataattgttaggagcacagtgtttgga

SEQ ID NO: 430596 - DNA, 355 bp, Homo Sapiens
cacctagaaatccactgagttaatcacgttgtagagaagagaacatgaaatgtaaatatttcactcagtttgagaggatactcttaaataatttatatctttttgaaaaatgccatgtattctccccactctcttcttcactgcttctgaatggcccaaaaaggagctgtaaaagaggaaacttcatcacagtgcatctgtgtgaaagcaccaaaatatgttaacaattagagaagaggaaacctgaaagactgccttgttaattaaggaacttgctatcaaagaactcattaaaaggtaatgaaaccaaatggctattaaaataaatatccactgaaaaaaatttgcctggcta

SEQ ID NO: 430597 - DNA, 431 bp, Homo Sapiens
gcacagtggtgtaccctctcacactagattgcttcattgtttcagatttctttgtaaatttggttatcatcaaattgactaatggcaggtggtatggcatcaaagcaggagctcaaagtggtagctgcgtaacatggcatgtctagaatttactggatttaaaaaatctttgttgctcaaaataacttttttatggtggatggagatgctttagagagaaatctggtttatttaagtctaagctggtattgttactacttgaaattcgtagtgttggagaactatgctggaaatttttaggatcatctgggttagtctgcttttatgtaataaacctgtttttaaagtggaagatgactaaagctcttgcatgtgaacagatgctgattttaatttatttaaaggaatcatgagcacttgaaagtttttct

SEQ ID NO: 430598 - DNA, 446 bp, Homo Sapiens
gggcaattttaaaaatcactcagcttccagtttacaatggtgcctctccatggatcctaatgctgcccctatcaaagtgtccattacatttgaatgaagaaaatagaagatgatgaaaatttacaccaccaaaacttacatcacaaactgccagagcctaggattttctactgctacaaaaaatgaactgtgctgaaaaatgaaagaagtggttcacctgccacatagtcttctactagatagaaagtgcatggtttgtaacaaccagaaatcaagatgcaatctctcttataagtatcgtaactcaggaggtatttggactgctgtcttcttttccttttctccacattccccatcttgtttctgttccatatgcagtaaggaaaccagagttcccaggaaaacaataaatcagtattaggtagctatagagaaggtatggcatc

SEQ ID NO: 430599 - DNA, 231 bp, Homo Sapiens
  misc_feature (122)..(122): n is a, c, g, or t
gtcctccctgattctcaacctttgcaacctgccttccgtcactgctaggtccacgtaggcttaaccttgatcttatatgtaggaccggtcttcaccttaagcaagagaaatgtaagaagtgntttcccaactcagttgctggcccagctttggcctcgtgttccctttctgaggactgacctttggtattgctctggagtctcatatcccctttggccctaactgaccacg

SEQ ID NO: 430600 - DNA, 426 bp, Homo Sapiens
  misc_feature (354)..(354): n is a, c, g, or t
  misc_feature (390)..(390): n is a, c, g, or t
ccatttgacactgttactatctgcaacagttcttgcagtagaggatgcacttcaaagtgcactgctttactgtctcactggaattctaaaaatctaagctttatctttttaacattaagctgtgtgggaatgtagcaacctcctgggtggtggggtggggggcatcttcaattatttaggtctcactggaaagtttgagatcagagtttggtaggtggtgtaaggggacaatgagtaagggagagaaaatacaggactgacttggggcaaaaaacgcctgataataatttgtgaagcacattttcaaactcatttattccttacaaggatcctaagaggcgggtattatgtccnggttatacctggaggcttaaattgaaggaacatctncaagggcacacagtttaatgaatggctgaggtagga

SEQ ID NO: 430601 - DNA, 336 bp, Homo Sapiens
  misc_feature (114)..(114): n is a, c, g, or t
  misc_feature (262)..(262): n is a, c, g, or t
  misc_feature (295)..(295): n is a, c, g, or t
ctatctccccaaatctacgtttcaccatttgtactgttatttttttagcccaagccacctttatgtcactcctggaacataataactgctttctcactcatctcctacattttnacctcttataatacagtccaccttgtaccgagcaacaagagttatctttctgaaatgcatattagatcatgtcacatctctacttgaagctctctaaagatttctcactaaaagcgaagtctaaaatttccacccagacctataaggnccttaaatgatcttacctctctacctacctctncgatcttacctatcttcaacctcggttctattttctatatc

SEQ ID NO: 430602 - DNA, 259 bp, Homo Sapiens
gtaatacgagaaaaatcacaacagagtaataaagatataaaactttcacaattaacactcatcagtgtgataaactaagcccatgtaaaagtaaaaatctctcacagttaacaaacgtctttactttcactaagaaggaactgaaattaaagtccttagtcactttggaggtggctgcaaaagctcacaacatagttgatccttaaaataattatgaatggcaaccagtgctgcctttctgtactcaaccatgcaactg

SEQ ID NO: 430603 - DNA, 346 bp, Homo Sapiens
  misc_feature (146)..(146): n is a, c, g, or t
  misc_feature (241)..(241): n is a, c, g, or t
  misc_feature (300)..(300): n is a, c, g, or t
catcatagcaacaaagggctatgtactatactcaggaaaaccatttatttgcactggaggcaactgttcttgagagaggaaaagtaaattgtccaagatgtaacatcttataaatagcaaagcaaggatgaaaattattatatttnactaaatcagtatgagaatcctgattcttcattattatatccccaacactctatcagtttgttgaacaaatcaacaaataagcttgaataaaggntccacatctcaattctcctccaccattctatattgcccttcatccctacattaaaatgnttatttctgctttttttctttaacaatttatccctaaagtaactag

SEQ ID NO: 430604 - DNA, 272 bp, Homo Sapiens
  misc_feature (86)..(86): n is a, c, g, or t
  misc_feature (88)..(88): n is a, c, g, or t
  misc_feature (90)..(90): n is a, c, g, or t
  misc_feature (228)..(228): n is a, c, g, or t
  misc_feature (239)..(239): n is a, c, g, or t
  misc_feature (242)..(242): n is a, c, g, or t
  misc_feature (259)..(259): n is a, c, g, or t
tcactcataagttttcagtggttaattactacagtttaagaagacgtgtgatttatttttagatctgacccagcagatcatacctntncnttgaattacatggtcttcttttggcttctaagatgtcacactcctgtcttagtggccactgctcctcaagccccctttgctagctcttcctcatctgtccagccctaacctgaccgtgctatgtaagtcttctccgtnttcaccccctnccngggtgaccgttatactnccaaacctacagg

SEQ ID NO: 430605 - DNA, 360 bp, Homo Sapiens
  misc_feature (265)..(265): n is a, c, g, or t
cttttctggagaaaataatacgctcgttcctctaattagcccatcggtttcaggttcatcactctgctatcttctcctggagtttacacaagcccttcagagtgtaaacaccgatgtggattcaatcccactcattatttttttcaataaaaagagaactgtttcaacagacaggtgttgtttccgacatcatcagagaggaaggtggatggttctatacggtaagcattctacccttcagctgccagggacagatccataaaantccaaaaagggaagagagaaacagcttgagtacagctgaatcattcacaacaatattacaagcaattacttcaatggtaaagtctccagtctaga

SEQ ID NO: 430606 - DNA, 217 bp, Homo Sapiens
  misc_feature (109)..(109): n is a, c, g, or t
  misc_feature (135)..(135): n is a, c, g, or t
  misc_feature (142)..(142): n is a, c, g, or t
  misc_feature (160)..(160): n is a, c, g, or t
  misc_feature (162)..(162): n is a, c, g, or t
attggaacttaagtttcacaaggaaagtggtcactttagttcaccactttccttgtgaaacttaagttccaatgggagaatgacagtaaacagacaactattataatangtccatggaagattttggtgtatgtnagatttncaaatctgtagagaaacntnggctcattcaataaaaattttgaaaccattgattaatgtcttaataactatatgt

SEQ ID NO: 430607 - DNA, 244 bp, Homo Sapiens
atggaagatactaagagcctcagtctggaagcatttacctaggaagcgcatatagacagagaagatcaaggactgaggcctgagacagtcagcacttaaagggtgaggggagaagtgccaaggagacaaggtgagaacagcagaagagtagccaaggcccaggatgttgccacagaagccaggagaggtgagcatgaaaacagaggaggaccagctgctgggacagaagagccatatggaagag

SEQ ID NO: 430608 - DNA, 284 bp, Homo Sapiens
  misc_feature (189)..(189): n is a, c, g, or t
  misc_feature (194)..(194): n is a, c, g, or t
  misc_feature (199)..(199): n is a, c, g, or t
  misc_feature (208)..(208): n is a, c, g, or t
  misc_feature (223)..(223): n is a, c, g, or t
tcttgtcttcagacccctttgccgtattgtccctcctaactgggacctaagctaagactcaagggctgctcccatgcccttcagtatcccccataaaatctaactacacattagaaactcaaagaatagcataggcatgatccatcacctgcaacagaagcagtgaggagacttaagccagggttcctncaagngattncaccgaccnttcctgcatctctgnatgccggactcctaagcatttactcagattttaaacagcacataatgccatggcgaggatg

SEQ ID NO: 430609 - DNA, 260 bp, Homo Sapiens
  misc_feature (77)..(77): n is a, c, g, or t
  misc_feature (156)..(156): n is a, c, g, or t
ttaaaagaaagtgcatacttatttgcaaggaaaacaaatggaatagacaaaaattttagaatataaagacttttttncatttatgtatgtgtttacaattcaaaataataaagctagttaaaagtcaatacatattagatatattcaaatattttnccaaataaatttcgatcttatcagttaacacccatagcaaaagactaaggagtatttgtataacattagggtatttgacctcatattctattcatttgggttta

SEQ ID NO: 430610 - DNA, 322 bp, Homo Sapiens
  misc_feature (226)..(226): n is a, c, g, or t
gaattgacaacatattgccaaaatcttagtggattttgccaacactattctgctgataggaaaaaagaatcattcagctactttccaatttagccacaaaataggctcttttttcttcattactactttaaccagtatgttaatactgaaaataggtataaagaaatcacaaataaccttcttctgtttgaaggaaatttaaaatagcacacttaaattgaaagtnaagggaactttaattcactactgtaatttttaaatgtctgtatcatgtagtgtttgcacagttttaaccttagtttaccatctcttactccttagt

SEQ ID NO: 430611 - DNA, 403 bp, Homo Sapiens
  misc_feature (56)..(56): n is a, c, g, or t
  misc_feature (205)..(205): n is a, c, g, or t
  misc_feature (252)..(252): n is a, c, g, or t
  misc_feature (355)..(355): n is a, c, g, or t
cttgcccaagggcctgagctggtggaggcagagcaggagttggatccaggcctgtntgaggcatcctgccacctccatccagacctggagcaatccctgagaagggtggctaccaccagagatgtggcagctctggtctcaggaagcatagccggaggatgtcccaggcaaccaaacagccattcatcagtaaggagccagagtnagggctgctagttcagcccccggaaggtggtccaggggcagccagtncagaactcagcaggagctcagttccaactgagcctgatttcactccagtgtccacaagggacatcctgacctggaggtcctcggctactcaccctggggcctncttgcacagcccaggagctagcccagggctgcctctaaatggttcccg

SEQ ID NO: 430612 - DNA, 302 bp, Homo Sapiens
ggtttttataaaaatcagaatttttcaaatgcattggtcattttcagatgcattggtcacatttcattattccatatcaaaaaactgcatttgttaatgtcacacaaatctcattggaaaggtcttcaagtattgtgaagttgtccaggtcacaaagatgaatgctagtttttcaaaattctactttttacttgaatgctcaaatcttataattggtaacccggtcagtttttctttagttgataggcttactgcttttatgtgttgagaatacttgtctgtgaaacatccaaatctggaag

SEQ ID NO: 430613 - DNA, 377 bp, Homo Sapiens
  misc_feature (321)..(321): n is a, c, g, or t
agatcatcaggaattagattctcataaggaacacacaacctagacccctcagaggtgcagttcacagtagggttcatgctcctatgagaacctaatgttgcagctgatctgacaggaggcagagctcagctggtaatgctcactcacctgctgctcacctctttctgtgtagctcggctcctaatagacctgtatgtgtccatggtctgcgagttggggacccctgcaggaagtcttgtaaatgcatgtcaggaaacttactgtttacagccacatagtttgtagtagtaaggaaactaggacaattcaaatattcatcanggggaaaactgggataaattgtgggtcaatttcatatgtttcatacaggaaaaaag

SEQ ID NO: 430614 - DNA, 203 bp, Homo Sapiens
  misc_feature (98)..(98): n is a, c, g, or t
cctcccttcttgagtctggaagaatatgtgaagggagattgctaaggacttatttacagaatggttcttaaagtgcttgggcaagaactatgtatttntggaggctggtagtgtttcagtgaatctgaaaacctttgtgacatgtgagaaaggtatgctgtctctgaaagctaagtgtattatgaaggatctataaagggcca

SEQ ID NO: 430615 - DNA, 212 bp, Homo Sapiens
atttaaggctgtacttaactaatttgggctgaggatgaatatatcagccacagcacattaaagaatgagccaaggatttgtcatggttggtcactttttaaagtatttgattactgcaactggagaatgaaaagtgtatattggtgacgccaacctcagtttctgagcactcctgctctgtggtgagaatcagacaaaaattcatcggggtg

SEQ ID NO: 430616 - DNA, 381 bp, Homo Sapiens
  misc_feature (342)..(342): n is a, c, g, or t
  misc_feature (353)..(353): n is a, c, g, or t
  misc_feature (355)..(355): n is a, c, g, or t
gcttacagtctagaacaagcttttccagcccacagcccaggatggctttgaatgtggcccaacacaaattcataaactttcctaaaacattatgagatctttttgtgatttgtgttttagttcatcagctatcattagtgttagtgtattttgtgtgtggcccaagataattcttccaatgtggcccagggaagcaaaaagattggacacccctggtctagaaggaaaggcaaatattaaataacctcagaaagtgatattacaaattgtggtgagttataaacacactatcaggtgttataaaggaagtgaaggaagtggtgaggaaattcttatcagggnagtgatatttnantgaagggccttaggggatgagtaggg

SEQ ID NO: 430617 - DNA, 190 bp, Homo Sapiens
ctttcctctcctgttcacacagtattcgattatttcaatggctactttcagaggatcagctagaggctgatgtgttgtttcaatggttatattatttatgaactgagagtagaagaaaaatttgagagcaggtttttggaaaaaatgaatttagacaaatatttagtaactgtatgatatataactcccc

SEQ ID NO: 430618 - DNA, 332 bp, Homo Sapiens
  misc_feature (265)..(265): n is a, c, g, or t
cagttgtcctatattctccaccttcccttggtttcatttctcttcgcttcctgaatgagaagtgcctgagataccttcatttctcttgaaagtattgatccaagtttagacaaatatctcccctcttgttgagagaattccttatatgtgaaaataccaagacattcttgatatttagcaggcactcaaatatttgtctcctcttttttagcataattaagccagactgatgtttgcatttgagtatcatcagcatgagtaaccnttttaatctctcttcccttaactacttgttctacactagagtctagggtcagggtacgtacagtgat

SEQ ID NO: 430619 - DNA, 307 bp, Homo Sapiens
  misc_feature (100)..(100): n is a, c, g, or t
agtacacctagtatctttacagtgactattaagtatttttgaactcaaagtatatattcatcttaaactcctggaactatgaaccctcccatgtaatttnctgatgaatgaaaaggaaaactttctttcaaataagtgtcatctgttgcaaaagtatgtgatttaaaaacacatgtaaatataatcttagctctaatgttttcctttgggagtttgggaaaaagcagttacatttctctgttgtctggtttttatcatttgaaaattggaaggattcattctggattgctgagctgcatcagtaggg

SEQ ID NO: 430620 - DNA, 289 bp, Homo Sapiens
  misc_feature (63)..(63): n is a, c, g, or t
  misc_feature (81)..(81): n is a, c, g, or t
  misc_feature (150)..(150): n is a, c, g, or t
  misc_feature (243)..(243): n is a, c, g, or t
  misc_feature (275)..(275): n is a, c, g, or t
ggggctatgaaaatacaaaaaacattagcacattcatagtatgtatgtgtctacaggcatttncccagccctatgagagtnctgcaatttgagaagtactaaaatgtattgtttggtgacaagaactgcaataaaaagataaatgatttnctgaatgttgtggcaaagcagtctatttccactgcaatttctgctactattagcttaaaaattgctgagacaaaggacaaccttctgattatnctgctgagatctaatgcaaagtcctctcagangcttcactacacat

SEQ ID NO: 430621 - DNA, 286 bp, Homo Sapiens
  misc_feature (74)..(74): n is a, c, g, or t
  misc_feature (85)..(85): n is a, c, g, or t
  misc_feature (135)..(135): n is a, c, g, or t
  misc_feature (137)..(137): n is a, c, g, or t
  misc_feature (155)..(155): n is a, c, g, or t
  misc_feature (274)..(274): n is a, c, g, or t
atttttatgtgtagacaggctgtgggttcccctcacttaaattgaagctctgttgaacttgagacacttaagantcttgcaagtntgaaaagtggagtgaaacaaaaccatttctaaaacgaaaatgtgtaactncnttcagttttacacagtgnagaaataagtattaaacaagttagtctcaaacggttatatcttaaggtcattttattcctgttatcattaactagacatatcttggtttagagagcagcacacaagacattgtgtactntttaatagctaa

SEQ ID NO: 430622 - DNA, 380 bp, Homo Sapiens
  misc_feature (273)..(273): n is a, c, g, or t
catcttagttcatggtaatctccttggcagcacttattgtctttgtgtgagagcaaatgatagagtcatccattcaagttaattaagagcatctgcattgcaaaactggtcactaaattgctcgccaaatttgaggcttttttcctgccaacacaaattaattttttaagtagcagcattttcaggagagaccaaataaagaaagcaacaataaagttgcctgtctagtgagatgtccccaaactatcaactttaaacatacctttgcctttnatagtagttcttcacacaaactgccttaatcaaaatgcgtgtctcttgctctgtcattttatgttttggctctttagcaacctaattgtatggttagacagattcct

SEQ ID NO: 430623 - DNA, 354 bp, Homo Sapiens
agaaggacctgagttgtggccaacaacaggctgcagaaaggcaatgccatcctgaagatttctcaactaagagtctgcacccatgacagcccaccgagaccctcgctccaagtttgtggagaaagggaacccgcttggcagcatgtggaaagaccccacgatgagcagcagacacagcaacgctgcctcctacatctcgacagcatctgtgtaagactcgctagcatctggtgcacacactgtatgagacagcaacagccagaacagacagctttacgttgatgaacacacagacggtggcgcatgttcagagatgccgaggggacgccgcagttcccaaaatcacctctggcc

SEQ ID NO: 430624 - DNA, 412 bp, Homo Sapiens
  misc_feature (336)..(336): n is a, c, g, or t
  misc_feature (378)..(378): n is a, c, g, or t
ccaccccatgcccaacaagccatattgtcaataaataaggaataactgaaaccagaccctttaggaagagacagaaattccattacccaggaaaccactcagtgaagatgctgatagttctgatatgttcttatgccctgcccccttcccccaaaaaaccacctgcagaaccaaatgtttctcctcaaagcccatcagcacagattgataataatatcactatcaagccagggctagtgcttctctacatactgtactgtcacaggtacaaagcaagccctggacagatactgtctccctgcccccacaaatccagggaggaaaaagaccagggangctttgatttccttgggatttaaacctcatgttcaaaaaggntaataaaggtgctcgtacttgtatcttcttccct

SEQ ID NO: 430625 - DNA, 403 bp, Homo Sapiens
  misc_feature (386)..(386): n is a, c, g, or t
ttgatagttctactgggagaccacaaaatgacatggtccatcctcctccttatccaaagatgcatggttaaaataatatagattaggaatcatcgttacctccaaacagttaattcaattcaaatttttagcccagactggtttttaaagacattttctgccaaaattttttggaagtaaacacattaagggtaggtgtggagaacgattaatggattcatttttatactcacatctgttttggaaatatattttatgcaataaagcataaactaacaggtatacttataaatgtctggttttagaaacactaaaagatctccaatcttaggaggccttaatttgaaactctgcttttatttgcctgaactagtggctaacctgtntaggcatctcacgaggg

SEQ ID NO: 430626 - DNA, 238 bp, Homo Sapiens
gtgtaaatcactgtgcccaacctgctcaaactcttggagagaagcaagtcttctagctgaacgtgataatggcctcaaaagcagtgttgacagcagataatcttcacacagacaaatgtctacagtttctaaataagccaactgtgcatatggcctacaggctcttcagcataacctacccaaagctcaggttccctgaaggccaggacagtacctcgggccttcaagcagcatttgg

SEQ ID NO: 430627 - DNA, 392 bp, Homo Sapiens
  misc_feature (80)..(240): n is a, c, g, or t
attttgttgaggtccagtttgggtggcagaaactaagacactgagctgatgagagaacttgttgcttttcgccctgcgcnnnnnnnnnnnnnnnnnnnnnnnnnnnnnnnnnnnnnnnnnnnnnnnnnnnnnnnnnnnnnnnnnnnnnnnnnnnnnnnnnnnnnnnnnnnnnnnnnnnnnnnnnnnnnnnnnnnnnnnnnnnnnnnnnnnnnnnnnnnnnnnnnnnnnnnnnnnnnnnnntgttgcatctttaacagctgtgtttggaaaagggtgaggaattgattcatcaatattcaatactaagctgcaaaatcaggaatgcagccaattggtttaattgatcaaggcttataaactcttaagggactctagtgaactgatacaaacta

SEQ ID NO: 430628 - DNA, 288 bp, Homo Sapiens
gcaaagcttattttttcagttgtgggctctagtttggttgggaaactatttccttagacctgggtcacccctcgggctcccttaatctcccgccatatgttctccagaatcagggcatggtgttctgccctggtgcgactcagcccggttgctttgcacagactctgggccagggcaggatgtcggtgtttgccgggtgttcgccgggtgttatctgtggcgctcagtatggtgcatagtgtagacacgtgccctaggtggtgtttaattgatctgggtaagactcag

SEQ ID NO: 430629 - DNA, 124 bp, Homo Sapiens
  misc_feature (88)..(88): n is a, c, g, or t
taaaatttctctacttttaattgtacttctaatacagacacttctgaaatcagttttcacattgctgcagccttaccaatttgtaganactgtttatgtgatgttttgattcttcatttatata

SEQ ID NO: 430630 - DNA, 245 bp, Homo Sapiens
  misc_feature (105)..(105): n is a, c, g, or t
aacgaagttatttttctagagcattcatagtttgtttttatacagttaaggttctcatccatctggattttttggtaagtgtggggagaataaaatgaggagccnctgtttttttctccaaatggcatgtattgtcccaacacaatttattgaatcaataattcatctctcccatacgaatttaaactattgaactttcacatcaaaattttggaactacaaagtaggtttaacaaggtgagaac

SEQ ID NO: 430631 - DNA, 315 bp, Homo Sapiens
aatatacagtatgatacactgatgtgcagaatgtgattagtttattaatcatatgtgaaaatattagtagctacatatggccagaatagattttyctctctacaaatgtaagttagtgttgatagaatttgttatgcgatatttggttctttggtttcagtctcaatgctttcttcttggcatttcattgactctgtaaattaacctcagcatcaattttcttttaaattcaacagttattcaaattgatcggaaattaaacttgtatgtagctagttatcactttgggggtacactttaattgacggggttctg

SEQ ID NO: 430632 - DNA, 329 bp, Homo Sapiens
  misc_feature (208)..(236): n is a, c, g, or t
gactacaggtgtgccccacgatgcctggctaatttttaaggtttttgtagagatggggtcttcctatcttgcacagactggtgtggaattcctagctcaagcaattttcctgtctcagcctcacaaagtgctggtattacccgtgtgagccaccgtgctcagcccagtcatgtatttctaattattgtatttgtgaactaatctatgnnnnnnnnnnnnnnnnnnnnnnnnnnnnngggtggcatttctgggccaccagggaaggtgggattggggttgcagctattttcaaattatattaaaagcaggatcccagttagagcgctatc

SEQ ID NO: 430633 - DNA, 220 bp, Homo Sapiens
  misc_feature (42)..(42): n is a, c, g, or t
gtcctcactgtaaacaaatgaggatggaggacactgagaggntcaaatatgaaaggcagtatggggagttagagccactcgtctactcctgtaaagagcatgactactcacagtctttctagcgggtagtcactctttcatttaacaaatacttagtccctgcaatgatctaggataataactcaacagtgtatatcaagagcctttaaaaagttatacc

SEQ ID NO: 430634 - DNA, 149 bp, Homo Sapiens
  misc_feature (79)..(79): n is a, c, g, or t
acttcttcctggtttagtcttgggtgggtgtatgtgtccagaaatgtattgatttcttctagatttctagtttatttgngtagaggtgtttattctctgatggtagtttgtatttctatgggatcaacggtgatatgctctttatcatt

SEQ ID NO: 430635 - DNA, 149 bp, Homo Sapiens
cctgaacaggtaatgagaaaaatttacacacaagtgattttgaaaacagaatgggttgcttacaaattacaggaaatgttataacacaaaccagaagaattcaatggaaggcaataagggattctgaaatgaaaattataaaagtatca

SEQ ID NO: 430636 - DNA, 584 bp, Homo Sapiens
  misc_feature (407)..(420): n is a, c, g, or t
ctttgtacaagaaagttgggcgctgcggagcttgaaagcgggccgcggcagccgaacaaaggagcaggggcgccgccgcagggacccgccaagacctccattatagagagagagagctcgcgtctactgccaccatgaccgggtgtgtgagagagagaagcggtgcaaatccatttcggcctcatcaactgcgtcttcatttacctgaccgccgaggcgttgagagttcaaggtgaacgcgtccgccagcagcctgttttaaagcaaatctggacgctggagcagccccctgacaaggtaggcagcgcagcacagatcctgcacagccaccttttttggcttccgggcgccggacaaggacggcaactttgtgtggggcgcgccccaaagccttgtctctctttggnnnnnnnnnnnnnnaaaacctctcccccctcaaacacagcagaggagagagaggggctttcacacagaggcggctttttcgtctctctgtatgatccgcctgtcctgcttcacgcagacggtgtcccccgtcgagaaattggagcgtgcacatcgccatgcaaccctcaggtcaacat

SEQ ID NO: 430637 - DNA, 627 bp, Homo Sapiens
  misc_feature (121)..(133): n is a, c, g, or t
  misc_feature (492)..(558): n is a, c, g, or t
ttggatattagcattattactacaaacacggggtgccctagttgaaggacactggtctggcgggctgatggtagtgatcctgcacccgcatcacctctctagctccatctgctccctttannnnnnnnnnnnncacacaagggctccttgggtgcactcgctgcaactgagccgtctgttctgctgacagcaggggcgccaaggacgccggctccccctcttgccccgcctggcccggaccctgatctgggaccccgcgggcctgccatctgactggccctgccactatatttgaaattatgcccctgaacccttccactgtctttagtcttcaccatcttgggacaaaacatagggaatgtgatgtactgttaaacatggtatatgcagtgtaatgtatgacatattatacctgatgtaatcatctcatttatttgcttctcctctgggaagcaggaggaaacttctcctcctgtctgctttgctctccannnnnnnnnnnnnnnnnnnnnnnnnnnnnnnnnnnnnnnnnnnnnnnnnnnnnnnnnnnnnnnnnnnattgtgggtgagatagaaggtgaatatccacatttccctttagaagtcacctgattcgggtttgagatc

SEQ ID NO: 430638 - DNA, 157 bp, Homo Sapiens
ctgatagtgactgttcgttgcacaattgatgagcatgcttactatatgccactttgtacaaaagttgggcacgagtgcccctgcccgcgcacccagctcgagtgcgcagatagcagtgagtgagaagcgggagtcggaggcgagtcggcgccgggga

SEQ ID NO: 430639 - DNA, 407 bp, Homo Sapiens
  misc_feature (45)..(82): n is a, c, g, or t
  misc_feature (111)..(121): n is a, c, g, or t
  misc_feature (227)..(235): n is a, c, g, or t
ggacaaaaattaaattttcaagggggttttaaggggtccgggggnnnnnnnnnnnnnnnnnnnnnnnnnnnnnnnnnnnnnnccatctttccccggcccgggggggtttgnnnnnnnnnnnaaaaaacctccccccttttttgcaacaaaaggggggggcccttttaacctgttctaaggtacccccccgggttcggggggcctaacctttgttccccctggaaaannnnnnnnnatttatttcatttgcaaaaaggtaagggggtaccccctggcaaaaaaacgctgggtaaaaattttcacccctcccctgggggaacatattatttgcgcccgggttttatttctctcccccaatactttatttgggaaaaagggttggccaaaggtttccgggaaaaaagggg

SEQ ID NO: 430640 - DNA, 170 bp, Homo Sapiens
tggaccttaacccctttctaaatggggggcggcttttggccccacagggggggtaaattttttaccccccccaaaagggtttttcccaagggccaaaaaaccggtcccccttgggacaaacgttaaattttaaggggggatttaaggggttcggggggaaatttaaaatt

SEQ ID NO: 430641 - DNA, 137 bp, Homo Sapiens
ttggacatttaccaaccactggtccctctggctgtagggatggcaacagctctgcttttgctagccccaggtaactgcactatctcttatgattctcttatatagcacctgtaccttcgtaattaatgtcttcataa

SEQ ID NO: 430642 - DNA, 316 bp, Homo Sapiens
cgggccactgcatccggcccactctaaaattctattatcataaatgaatcccaaccacttcagtttaagaaattgttgttctgtcacccagccaggttataaagtaacatatgtttgtctaaaaggagggggactatcttgcttataacttttctaattctgttcacactgatttgtgaggcactgaagaaactgatccttctgcctttttctgtagcaactatgaggcatcagttctagagcatgatggcatgcagtctcatgaatgtggccttcagaagcctgtttcaaagtttcaaacaaaggcttaacttta

SEQ ID NO: 430643 - DNA, 429 bp, Homo Sapiens
  misc_feature (211)..(381): n is a, c, g, or t
ccctaaaagccaactttgtacaaaaaagttggaacagacaggtggattcatgcaggtgggtggctggaagtgggagacaggaaaggagccgaagagagggcagggcccgaggcgcaggggcagggaggaggtgggagagtatggctatggcgggggccgttctcagatggcagacaccagcatcattacacagcatgatgagaaagtgcannnnnnnnnnnnnnnnnnnnnnnnnnnnnnnnnnnnnnnnnnnnnnnnnnnnnnnnnnnnnnnnnnnnnnnnnnnnnnnnnnnnnnnnnnnnnnnnnnnnnnnnnnnnnnnnnnnnnnnnnnnnnnnnnnnnnnnnnnnnnnnnnnnnnnnnnnnnnnnnnnnnnnnnnnnggccccccgagcttctcaatttccctgagggaccccaaacttctgggg

SEQ ID NO: 430644 - DNA, 593 bp, Homo Sapiens
gagggggggtttgttccacagaaatgagatatccagaatgaatttatgactttagacttatgtttcagttaggaagtaatgtctctgctgaaagggagaaaaatacatcttcaacaacacagctctttttggcctatcttggaaagtgtccttttcctgttaatagcagttagtagaagactcataagaagagatggaaagagattatgtgagagttttttagtgatgctgtctccccgatttaaggtacaagaaatgcatccacaatccaactgttcatgttctatccagattctcagtttgaaaatatgagcagagagcaacatgattgcaatccttggaatatatagtcttctctgtgttgctgtgactctctttggcagtccaggtgatacaattttccgtattattcctgttcagttaaagtgaagatataagttatgtagatgttaatgacacctctgtattgagttctgtgtctatcaataaatgatgccacacgagcaagctggaaagcagcagactttgccaattgccaatattttaatctatattagaacactatttgctttaataattaaagataatttctt

SEQ ID NO: 430645 - DNA, 606 bp, Homo Sapiens
ttggtgtgtctcccacagcccaacacaccggctgtggcagactgcagccagagtgcctcttcaggcctgactctgactcatctttcctcactgggtggggcttccttgtaggaactccaatgactccagccaaaggctcagggatagaactcaggtctccctgggcctaagcccctagagggaggggtggccacagtctctgcagaccagcagacttggcctttcctcctgatagttctgaggaatctgggcggcccggatgagtgggtttccccccaagcgaagcacacccccctccgcaaagggacagtcaaagtactttgttaaacaggtcctgttccctctgccacccaactggacgagaccctccaacaggggttgtaagataccctgtacaggaacaatcctgctggcatcaggttggtgcccctcgaggtcagagatcccagaaaaaggagcaggcacctgcctttgctgttctccagcctcctcaagtaatatctctgggcttgggagcaaaccagatgaatagtgcctgaagtgaacccctagcaaattgcagcagccctacagaagagggacttgaccattgaaagaaaaacaaac

SEQ ID NO: 430646 - DNA, 828 bp, Homo Sapiens
ttggtggaattccgtggaggctgcagaacttagatgcagctgtttttttacagcacctatttttgtcagattggtaaggaaacactgagtcacagaatacttaagaattggagactccagtaatgtaggatggcctgagaggacgtccaagtcccaaggggtggacacggcatgttcctcgggcacagcctcagtgggggccttccccaggcgcagctcggccacctgaggaaagggtgtttcggaggcgcagccacacacacagcgctggcagcctcacggtcacgcccatcactccctgccccccactgcccttgagaagttagtggtgtcacatccttagttttatagacagctaggaatagattgtgaagaacactcagttcactactgtgttacatttatatcacaagcttcaattaaaatggattttaaaggattttaggatttacctttagtattaacaacgtatctactgacatactgttaggattcaaaaccagttaagtataagaattgcttcatgtggttttcctagggtacaatttataaaaggtagaaagcatccaagtggctcctcaacaattacaattcttaatgatttttctcacagctgtgcccttctgtcagggtcagtgtcaaaattcgttatcaaaggcaaaacctactgtgccaagctggggcgctatatgtgaacggagtggaaatgcttcagtcacctctgccgcagcttgtgattccagcagttctcacaaaccttctgtcacatgatgaaaagaagcagcttgtataattccaactggtgtttcatttctgttctaatgctaa

SEQ ID NO: 430647 - DNA, 875 bp, Homo Sapiens
ttggcagagctattggttggcgtcttctccctgtaccttctgggatctgagggctctttccatggaagccagccccgaggtggagaccttcgcctgcagccgaggagcgggtggggcctgggaaccaaactggagccagagtggacgtccagccctctggtcttggcctccagagggagggcctggctcacggtggggccagggagccggctccaaagggtcttcaaaaagggggtccttgggggctccagctgcctcgccctggcctttctgtgggtgcgtgagagccagcagcaccccagccttggagaccgggggggcaggaccccaagtcctcccctctctcctgactgccctggccgggtgccggcactgcgagacccacctggtgagcaggcctcacagttcttagccagggccccacctcgcctgtgtcccaccagtgccccgacagacctggggcagggctgggccatgatgcagcgggccaggatagcctccaccgtcagcacagggccgccctccccgcctttccggaggaaaccactcccacctcagcccagctgtgcgccctccctagctctcctgccccctggagctgatggccccttctccactgaccgattccttagcggggcctcttggggtctcgggcctcgggtgcaccgtcccatgcccgtcctgttgtgggcaccgtggcccttggggcaggcggctctaatgcgggagcgagtccctagctccagacttaagaaccagaccccgggagcatctggcatttggcgtgacggcgtcgcacgcgggcctgggctctctggtagagtggcctctctgggagtgagcacggctggggtcgtgggcgcaaatactcctgc

SEQ ID NO: 430648 - DNA, 891 bp, Homo Sapiens
  misc_feature (719)..(766): n is a, c, g, or t
ttggctggacccccaggtatgaggagggggtggtcttagggttctgttccaggtctgccccgcccccctcccagccatgccccaggcagaacttggaattcaggtgtgcacctgcaggctgaggggctctgtgagcaggtgctgctcacacagggagttcaggcgccagccaagcccctgtgctgctgggataggcctgcttcacttagggagcactgcctcaagacaggtaaagccccctcgtttgcccccacccccatggggccgctcaggagagaaactcccattcacccctttcccagggtgctctctctctaggtggcatgccagcccccaaacacaagtggcttttgggcccaggtgggtcagcctgctgcccctgccccataccccctcgggccattgggacccctgcccttcagatgtcctagggtctaggagtggggccagtcactgtgggaagaggccaggggcttggccggagaggcagcccagggcaggacccagtcctgagtcctggagcagggccagggaggcgcccatcccgccccggccagccgccctctctgctgtttcttctatttgttcttcttttcacccacagctctgtgttcctgtcatccctcctttcagcaaaagtcctgttcccgttccctctgtccccacccactcctgttcccccaagaaaataagctatcgttgtatttgcaatctatggnnnnnnnnnnnnnnnnnnnnnnnnnnnnnnnnnnnnnnnnnnnnnnnngtaaatttgcctcccatatgtctgttgcgttgggtttctgaggagaccctgggtgaggaggatgcactggcttcccgcttctcgccccccaccccctgtgctgtccgggagacagtggtctgggg

SEQ ID NO: 430649 - DNA, 885 bp, Homo Sapiens
ttgggctccagagagtgtgggaggaaggggatggtgagcaatttttgcttgagaaaaatattgcccttgccattaggaaggcaagatttatgtgctgtgaaaagggtgcctgggcagttatctgaactgccaaatcttaaatcaaatagtatatatttctttgccttctagagagcagtatctaatggtgacaggctagtcacacaggcctcaactggcacttcatggctctgctctctgagctctgcattccagactggaatgaatgctttggaaaatgcacaaatacccatgttgatgtcattccccttcaggaccagaattccattttaaagaaaatcttgaaaattgcagaactacagataaaaacaagagcgatgagaaaagcagtggagcttccaacacatgcaccagtccctaaagaatagaccctgtctacactcattaatcactgtcattgctcctctgctttatctccgcttgtggattactcttggtcatggttctcatagaaggggcatccttcagtagcccaacacaattctaaacatgtccaaccagctacagttgagattcttcccatgttatatcactgaaaccttgtcattttatttttcaacctcagtatctaagaattctgtatgttcatttgcaagactgaatgaaactgtaagctaaccaaacactgatgcaggaggtttgggacctgacccatgaatgtgaaataagggttgaggtaataatagggacgattgcctggcttaatgatctagctttttccctaagactgtgatggggtccatgtttacaatagcatcagcttctggaaattacagtcttcaccggacagatgatgctgaatttttactgatgagctgaagggga

SEQ ID NO: 430650 - DNA, 801 bp, Homo Sapiens
ttgggggagttggaggaggagggaacggagggaggaagcttgggcaccgtcaggcgctctggtctccaatctcagtgttctcacgccggcggagagatgtcccggctgtcgctgctgggtggccaaggaggttcacatcctagagtagggcgcacgggtgcgcgaaggcgctcgccaaggaggcgtagagggcgcagcacaactcctctggggggtaaccgggggcgggagcacgcccgcccgccttatgtaagcaaggattgcagggagatcagcgcccaggagaccagctgtgggtttgcccgctgaagccgaggcgagacagaccaggggacgaagcggctgcggagagtggcagcgcgcctgcctcccgcggtgcgccagacctggacgccgggagtgcagcgggcgcgccccgggccactaggctgtgtccagtggagctcagcctgccgcctgccaccttcttcgccgcgccggcaaagcctcagccgaattccctaggactggactcggtctacgacttcgggtctcgcggttgacgaagccggtgcgggctcgaactgaagtccttcttggttggggaagaaggcatgaagcttttgcactgccccagccggctgctgtcctggggttgtcagcgccagtcagactgctttatgttctgagcgcgtatgacccctttgcagtggaacagaaactaaaagctcgacggaaactcattctgcaacagtgctttctttgcgtgcatgttggtggctgacaagggtggtgatgcgataccgagagaaactctcttag

SEQ ID NO: 430651 - DNA, 234 bp, Homo Sapiens
gtttcagagaatctagctgtgtaatataatcatcaagtactacttaataaatgtcctgtgtcagattataagaaggcaaattcagtagaagttctcaaactttctggggttcacactgaaccccaagaatcagaaatgctcatgtttccttttcttgtttttggtgagtttctccctaagtcagcctcgtggggtctactagaatgaacagtgttccctcaaaatttatgtcca

SEQ ID NO: 430652 - DNA, 776 bp, Homo Sapiens
  misc_feature (46)..(55): n is a, c, g, or t
ttgggattgtgccattgcacaatcgacaagagcaaaacccatctcnnnnnnnnnngttaatttttaaacgttgtttcattgtgttccacattgtctggaaaagtattctggttatcacagtgccatgggacctggttaggtttattataagagtcagtgaaaaattagcaaaaacatgttagaaagtactagaggttggatttgtaatgatttagaataattgtccagatactccatgagcctgggaagttacatttagcatggtgatgtgattccaacatagccattttaaaaaccagaagattgcacacccgtccctgtttatagcaactgagtttattgaagaccacgcattcctgtcttaaaaatccaactatatgcataaaatgaagactttttaaacctaggatgttggcttattagcagttataaattattttggagattatcagcctagtatgctagtacagttaaactagcattttttaacctttttaaattatcactcccccccgaacatttttagacactttttctgaattgcccctgcccatgaagttttaatgtattttgtgtgtctgtttatgtactgtgtgtatatctatgttttatacgtaaaagtaagaactttttgtcccaagaactaatatttgctgctttggaaggactatcactcccattgagaatgtgtgagtcagaataacacagttgagagttcagcttgccgagatcagggctactgagaacaaatagcaatccttccttatgtaaattga

SEQ ID NO: 430653 - DNA, 783 bp, Homo Sapiens
  misc_feature (605)..(642): n is a, c, g, or t
atacagtatattgtgcgaagaccggtgtccttaaggactgcaataatttaggaaaagtccaggtgccatttttgtcctttctactctaacgctacattttctgagcttggattttgaatacaacattattttccaggagtgtgttccagattagggagggattcctggattcttacttcaaagatttctaaattagaccaaggcatttctggagaccccttagtataaaataaacctattttccctctttattaatctttcaatccttatcctcaaactttttatagcttttgatatatttgctgatgctatttttaaactccttgtgttggtacttttatgtcaattatgattcctctactctcttaaaactgcttttctaactccttcaccagttcctcttcttcctcttgcccccagttgtgagaatttctcaaaattcaatcctaacctttggtaaagcaatctgtaattctctattccatgaccttccctgtcaccagtattatgaagaatgagtctttccctctttagggcacccatagtgctaatagcctcatactgtattctacttaattgttcacaggtttgtccttctgtgtgannnnnnnnnnnnnnnnnnnnnnnnnnnnnnnnnnnnnntttttttatacctaaaaagtccataaaacagtaagttagtaaataactgaatgaattatcttttagtaataccttatacatagaactcattacctcttcattaatttatagagcttgtgcacctttataaaaatgactccc

SEQ ID NO: 430654 - DNA, 518 bp, Homo Sapiens
ttggcaggggagtaggctgtgcagtgacggcttagggtaataagtaatggttggaggacaccagcataggagcagagtttagaacttaagaggacaagaaagctgctcagtggctggcgtatagctgtgaaggtaaccaaacaccaaagagggagtctgtcatttttataaggctggaagcgaatgttccttttctaccttaacatacagtttagggggttgcaccaagacaaagtttccaggctggagggtaatacatatccagcgcgagtgaagtccccactccaacatataccctttttgggtgggtaaacacctctttgcatgtggacagaaaatgtttatacttaaacagacatattttgcatatttttatctggagacttcttctagttttatactcttcccacatctatgccaatgccaccattctaaaacttacactccttttctacccctggtcttttccttgtccttccctacaacttggtagaggtccattttgtcttacttcacac

SEQ ID NO: 430655 - DNA, 855 bp, Homo Sapiens
ttggggcaagtacggttcagaccgcctcctcatcaaaaacagcctctctggcgccttcctgctagatcgacctttcatttcttggaaagagtctcgcacactgtgtgatcatcgtttgagcccaaagtgctaaaatacaggtgtaggtgtttgagaagcgctgtagttgattatggacgaaatgcctaatttaaggagcagaggcggagtggaaaatgaaaaaagcttcaccgcagtggagacttgttaacagccctggggagaaaggggcttaacagagtctggaaatcgtgaaagagcttgaccgatgaaatgggcctggctgtcgtatcggtaatttggtgaatgttgcttaagatcagcctggaaaggtagttagtcagatccgaagtgacatatttgcactgccaaaggagcctctggaggttaaagtatgtgttttaatttcgttgttgaggccatataatgcagagttgacggaccgaccttatgagtcaccttggagcggagtagtggagacttaaagacagactaccctggagctggcttcaaactagttcttaatattgtgactcgaactccccatccccagaaattctcagatcttagaagccaaagactggcaaggatactagagggaactactcgagtaggcgaggtcagactacataccgaataggagtccttccaaaaatatgcagtttcacatacagctgggtactccaagtgtacagttcccatcagctctaatatgacagaacgctgacgccggggtgctagagaaccttgccgtgctggaattcacgttgacgcccccacggagctctgctgcagagccctcgagtcccgcacttc

SEQ ID NO: 430656 - DNA, 573 bp, Homo Sapiens
  misc_feature (159)..(239): n is a, c, g, or t
  misc_feature (241)..(256): n is a, c, g, or t
ttggaaagactgcaaataaaaccaacgtggccagaggctgatgggcaaagacagggatgtggggggaggccaaaagtcggccggggccacatcacacggggcttcgtaggctgtggtcaggatttgggacttgactctaacaaaaatgggaagccaggnnnnnnnnnnnnnnnnnnnnnnnnnnnnnnnnnnnnnnnnnnnnnnnnnnnnnnnnnnnnnnnnnnnnnnnnnnnnnnnnntnnnnnnnnnnnnnnnnggaagccagggaagaggttcaggcagggttcatggtcagatttgcatctttagaagaggacgctggctgcagtttcaaggaggaacagagacagcctaagtgggtgtgaggagatcaggcaggatgctgctgcatggctgccactgcagtggctgtgaccatggggggaagggggatgaattcgggagagtctctagacaatatgctgggactcagcattgtgtggtgagggcccagtttaatctgagaggttggtgtttggtgtcggctcatgctgaagggtttagaagaagatataagaaaaactgagtgcagga

SEQ ID NO: 430657 - DNA, 618 bp, Homo Sapiens
atgagccacatgcctggccggcaaagagattttacgtgggaaactgatcaaataattacaatatacagaaactgtaattgtatttagattattgtgatgtaaaggggatacaggcttttttcctttgggtacaaatagagatggactgttttctatttaaataccattaaaaattgttatacttttctactttgcctgtgacatgtagtggtttttcaggcttatattctctcttccagctcaaagctctcatttaatgaaataatttgaaataaaacttgatttaaaacttgtttttcttatttgatttaatattgtctcctgccgtatttttttggtcttgttttctcttgtatagggtagagggcagtggtgagatcatggctcacagcagcctcaacctcctagactcaagcagtcttcctacctaagccactgcccacctccccctaatcccccaggagctgggactataggtgtgtaccatatggcccgactatatatatattttattttttgttgcataactgtgtactaacatttttattctgaagttaaatacatcccatctgtgaacttgtcaaacatcatgcactgaactatttttaaattctactc

SEQ ID NO: 430658 - DNA, 351 bp, Homo Sapiens
ttggggacgggccccccacgggtcccttcgcttatcagcacccgcggccccggtagctccaatcctagcgctctgcacggcgcctcctccattttgtgtgtgaccctgtgtacctatttgaccgtgctcggagctgcgtctttggaggcaccggctgccgcagagggcggtgctgacacccggagctcgccggagacgacgggtggccggagccgtggagcggcggcggagcgggcgccgcggggggtgtggcgcgggaaatgattactgacctgaagccaaataacaatgtgccctcttggacagattgctgaccaatggcttgagagctgggttctattttccctcctc

SEQ ID NO: 430659 - DNA, 417 bp, Homo Sapiens
ttggtgcagctcctggtagtgggtcagataggacacacctggggagaggggtcaatttgaaattctgtggtgcttttgagtggcgagagccatagaagttggtaaccttagtaggctgagtgagaaggagagagaaggcaggcatgcgtctcccatcacacacacattccagctccaggaaatgagaataatttaggaagaggaacctgtgagggaaactgagaaggggtgatctgagaaatgaaaaagaaaacccaaggcagagtaccatcatgaaagccaaggaagaaaagactttcaagggcaggaagtggttagttgagtctgatatttcagtagacaaataaagatgaagattggcccgcgtccatggagtctggcaagttgttggtgaccttggcaagaccagtttcaata

SEQ ID NO: 430660 - DNA, 724 bp, Homo Sapiens
ttggaaactctactttgtaagaaaaataataggaccagaaatttaaatcccaaattgaactatggaacttgaactctagcgtgttcgccccaactgggagaggtgagctttttcccagtgtttcagaactgattttctttactttctacaagggagggcagcacagggactacggttgaggcccgtgaaggctgggtttgatgccaccctatacagagcagggacctctctggctaatccccagtcctcagccaggctgtgtgaatcaagtgcctgccccagggctcttgagctattgaagctgcttgggtacaggacacagtaggtggggagggttaagacccttctgtgagttccctgtgcggggctgtacttgcctcttccaattcgtggcctttccctgcttggtccctactagacagacaaaccagccacagtccagcctgcagccagaccaccttgttcattcattctcctttgcctcagagctaagacaaaaatgagacagaaacagggctccctgggagtccactgtgctccagggttctggggaatcaggttagccagcagctcctggctgcttccctcagagactagggctctcatcctccccaagagaagcagcaagcccagcctgaccacactgtccatattgctggacagtggcctgacagaaagtgactcctccaagtcccagagccagggctttctcatccttgccttt

SEQ ID NO: 430661 - DNA, 739 bp, Homo Sapiens
  misc_feature (283)..(339): n is a, c, g, or t
ttggttccaaactgggccacgcagcttggggtccgatgggtcatggaggtgaaggagaaagagtagaggaggactccctcatgacagcaaggtcaatgtcttttgcctccagtgccccaagtttgtgaaacctttcccaggaacagagggggcctctttcctcaaagactttccatggggtgagggccaagtgttggtgatcttggctgggggtgacttgggccacagaatggcagaattctagaacgctggaatgggggacccctgaagggaagccctgagnnnnnnnnnnnnnnnnnnnnnnnnnnnnnnnnnnnnnnnnnnnnnnnnnnnnnnnnngtcagggtgctgtacagaatggaggccacattcccaccttccacacagcctgtggggtagggggttaaatgggaccacagacaggaatatgattgagaagtgcttgttacacctgagatgccatgccagaagagaaatctggagctcagagaggaaaagaattgctcagggccacccagtaaatgagtggcgaagccagagctccaagctgagccacctgattcccttccaaggctcccgtcccctccccaagcacccaagggggacagggctatccacttgtatttcatactcctccccagtgtggtcgtctgggaaaattagctccctgccttctggagccatctctcacttgtgtctgatgacccaattacactgggatgggagagcacagaacaga

SEQ ID NO: 430662 - DNA, 394 bp, Homo Sapiens
ttggggcggacgagcctaagctgccccccagctgggagaacctcatgagccgtgcctaaagtcgattgtgctacttggcttgtcctggctctgtcgctgctgggagcggccccttcctgtcccgcgggaggtggcaagaaccgccacggagagcctgccgaggtccgctgctatttcctgctggtgaagcacatccagtcacggcggccctcggcctgactcctggagaacatttcccgaagtctcgacgaggccatgcatttgatcaagcgctacgttcaggtgaacgtgtcgggagaggaggaattggaatatctgggatcgggttcttattctgctcctcagttttggcctttttatacctgtgtgccttcttcaaatgtcagatgctaaa

SEQ ID NO: 430663 - DNA, 346 bp, Homo Sapiens
  misc_feature (102)..(160): n is a, c, g, or t
acctttaaaaaccatctttgtacaaaaaagttggcacccgggcccccgaaaacacgccagccccccgggcgcgcccgccagcccccgggcaccgcggacctnnnnnnnnnnnnnnnnnnnnnnnnnnnnnnnnnnnnnnnnnnnnnnnnnnnnnnnnnnnctgagccgcgcgtctcgccaactgtccgcctcgcagacctcgctgcctcacggcgcccccggtcacgcggcctcctgacgcccggcaagcagcttcacattggactttggggcccactcctgctgcccgggccgccgcgtccttcccgtacagcatggactctgattctctttttatgttccggca

SEQ ID NO: 430664 - DNA, 394 bp, Homo Sapiens
ttggttcaaacatagtcaagagtacaactgtgatatttcatggaagttatggaataaaatgtctctaacctgctaacaaatctatcaagcagatggcacagtactgaatttgaaaccagaaatcctgggtttttatataaatgcttcatagatttgttttatgataaagggcacataactctcctaaacctcacatcacctcttgaatagggataataagtccacatcaatgctgatgccttagctattattaaactcttacagtatgatgtaaagtgaaagtacaatgtaagatcattcctaggccaactttgaccagttttatacagaaacatgtgccaacttttctgtttgcaaggataatatcaaagaaaactccagaaagttatctttg

SEQ ID NO: 430665 - DNA, 881 bp, Homo Sapiens
ttggccgagctgagcccccaggcagaaaaggggctgagttgggaggcaagggaggtaggaggaaagggatgaaaagaattaggcatgagataggaaggtaaaacttgggagagatattatagaattagaagggttggaatggagctcattcatcatggctgatgaagtaaactgatgaggtggagagagacagagtcaaggcaaggccaaacgaaaagatcttccatcccactcttcagtttcttgcgaagtttttcttgattccgccaatccacacagtttcctttataaaatggaaaagcatgaactaaaaaacccagaaatagctatctggcttagatttacaggataaaatctccatgtctgtaaaaactttaaggcagaaatttgggatttatggtacaaaccctttaagggactgtgagtcagtaatacccacagcactcaacattgtgagtttccacacatccctggacttgagtgagtctttccaagtgtttgttaatggtacaaatgatgacaaaattagtggttcaaaaatattaaagtgcacatgctttttgctttctctatgtatacagagattacatatatgtatactttctagcgtctagcaagtatggtatggctagggataattatgtttttctgattattttgtttcccatcaaacaccccacgaattttacagcagaccgccttcttgtcaccatttgaaagaatgtggtcagaaaagtaatgcaaaaactgccactttggttttgtctgtaccttccaggtcatatctccgtacctcacttcctgacacaaacaagttttcactgttgtcagcaacaaagccctaatatagctgcggaagagaaaactgcattgcattttgc

SEQ ID NO: 430666 - DNA, 823 bp, Homo Sapiens
ttggaagcaatttcagaatgattaaactcaagaaactttataagtggaaaattcattcacaggagataacgtacataaagacaagtcacttgagcatccccatcaacaccagcccccaattgtggggtatgaaggtatatttctgccctctgatttttattacactacatatgctggtgaaatgggctggcctggaaatcatcatcattgggaatattgtttctgtgggaaatgatgccctttttccaagtatgggctgattttattctgaaaataagttctgtggaactttcagttccacatgccttacctttgtgtatatggtttgtattacatgttaggatactctgcgagtcaaaaactaacagtctgaaggtggcaataatctcaaaactgtcttgtagttcagacttgagtccagcaagggctttttgtggaaagttgactttcttactacagccatgctgcttccttgtcattttggccttcctaaatcaactgatagaaagatgctcaaaaactattttctcttcagttttaccacaagttgtattattatttccagctagaagcctgggagcacaccagcttgatgctaaaatacaacaggtattttttgtttcatgctactctgaaaagaagctaactttttcatgccttaaaaatcttgcaaaagcaagggatatcaaaagtattttcataagttaaaggatggtgtttactgaaaagctctagaaatagttctaccagaaaacaaccacagagcttatttctacttctttacatttcctatttaatccccctttcgtatctggaaagttca

SEQ ID NO: 430667 - DNA, 855 bp, Homo Sapiens
  misc_feature (156)..(214): n is a, c, g, or t
ttggcttctgtgcccttgctggagtggtgttgtggtcatttggagcagaagaggcactctggctttttgagttttcagcattttgtgtcaattatttctcatctttgtgggcttatttgcctttgatctttgaggttgctgacctttaaataggannnnnnnnnnnnnnnnnnnnnnnnnnnnnnnnnnnnnnnnnnnnnnnnnnnnnnnnnnnaacagtcaggacactctactgtagtgttgctgtggtttgctgtaccccagaccctaattgcctcagtttttcccatacctggaagtatcaccagtgaaggctgcaaaacagcaaatatggcagccagctccttcctctggaagctctgtcccaggagagtactgatttgttgccagcccaaacgcactttgtaggaggtggctggaaaccccttttgggaggtctcacccagtcaggtggaatgggattacagacccacttaaagaagcagtctggctgctttttggtagagcacatatgatacattaggaggggactctttcttctggaccatttgtattctccaaagccagcaggctagaatggctaagtctactgaaccccagagatagcagccacccctgccccggtaacttggaactgcctcagaaagattccagactgctttggttggctggctggaattccaagccagtgggtcttaacttgtgagttgccatggaaagtgggggccatggaagtggggcccacggaacaatgctgcttggctccctggattcagctccctttctagggatatatacagatggatatccccccttgctggggatcttggggccagagtatataaaattcctggg

SEQ ID NO: 430668 - DNA, 908 bp, Homo Sapiens
  misc_feature (669)..(725): n is a, c, g, or t
ttgggcctatttagccttctaatggaagttgggtgtttgatgttccatagcatctgatttacgcttctatatggtaaccgttgccctctctggacacattgcagaacaaatgtctccctgttggagcccctcaaccgaaagccctcattgaaggttagcgcattctctgctgcttcagcatttccagagcacccagttgctgaagtatctgcatgtttgggcaaaacacatcaacctatccatctgtctgtgtctgcccttccaagaatccatcaccatagtaacttggtactcagacaagaggttgtagatgagaacggaacaaaggccagaccttctccttctctgaaggcggaggattaggatcatttgagtgctctcatatggcaagtgtcatggctacaagtgcttcactggcagccaccaacatctcaaggggctggccacgtagtaggtactcagaaaatatctgttaaacagtataggaacgattgagagtttttttgcttgttttcacaaatggttgtgataactgaggcagatccttcaaagtggtcattgaaaagcagtcatttgaagacaaactgaggacttgagttgggcttggttctgggaccttgggtgtgacactttacctccattttgcaaagcccatttcattgctcatannnnnnnnnnnnnnnnnnnnnnnnnnnnnnnnnnnnnnnnnnnnnnnnnnnnnnnnntagcaacaaaagcattttacctccaagtgcagtaaagtggcaagtcctgtttctatcaccttagagtcacaaaactttgccctggaatgagcaggggcagaacctcactgaagatgagcaagtttcactcttagactttgccctggaatttggcccctccagttttcctttctgcatgctttt

SEQ ID NO: 430669 - DNA, 210 bp, Homo Sapiens
tgtacaaaaaagttggggcctccagatttagcaactgcagggcatgttctgggcttagcgacagaggcaagcaagggactggtgtctctggtgagaggtgggtttgatgtatctctgtcctatgctggtctctcttctcctttataaaatcctctgtggtcaactgactactgcgtatcgcaatggaataagactgcacagttgctggta

SEQ ID NO: 430670 - DNA, 879 bp, Homo Sapiens
ttggcgggggcctgctgggagcaggagtggaagcagggatgggacttttctctgcagcctacctagatcatggtactcacaagccttgttctcgcaggcctcacctgcttttcagcccggggcgccctgggcaaccagagtgcagaggacacgtgttcatcagtcttcaccccgtactggcaactttcttggtgcaatgcccttgactgggcactgggaaggctgtaaaatcagtcttcaccccgtactgggaactttcttggtgcaatgcccttgactgggcactgggaaggctgtaaaaacagtttctgcccccaagaggagcaaagggtgggcttgcacccagataactgccccacaaatggcatgtgctgaagacctgggggcgcaggtgctgtggccctcatgcttttccccgtgctcctggaaggaggctcagtgccttggcgccagctccatggttcttggggctcctgctgttgtgtgcctctccccaggtgtctctgggctggctggttccagggttactctgggtgtattcagttcctttgatccttcccttctgtcacagtctcacgttctgtgacaggctgcatttcaggaggggtcgcttttgttctccagccggtagaaaggagaagggtgagttggtactgaccacaccccccctcccaaacccaaacccagccattgggtcatcaagacaccctcagtgactccttagcacctgtacttcgggccgtcctgcagccttttaaatcacaaagggatctgcccactttgaaacagtctgcacatacgctgggcatggacagagagggactcactgtcacaggggttggagggggaacatcggcttgtcacagaccaccggggggg

SEQ ID NO: 430671 - DNA, 852 bp, Homo Sapiens
ttggcttccctcttctcttctaaggacaccagtccttgggtttagggcccacccaatccagtatggcctcatcttaactaattacctctgcaaagaccttattcccaaataagctcacattctgaggctctgggtggatgtgcattttgggggacgctgttcaacccagtgcaggtgagcagatgggggccgggggggtgctggggtgctctgggctctggcagcatggtgtgtatggggaggagatgcctccctcaagcctgggcgtccccatggccctgctgtctaccccgagctgctccgaggttgagctaaaccacagaagcacatggccatttggggatctggagcccaccctgggccttcctgggaggagacagagagtaggaggctgtgggcccgggttttggggccctgtcctcttcctgtccctgccccttgcctcctcctcacattcctcttctccaaaccgtctaatgggggaagcttcgccctcagaagccgacagggagatctctttggtgagggaccccaggggtggagacccgaggccggcctccgcgggctggttgaggagggaggctgttagcctgggagcttggcccacgctggggggctctgtccaacccagggccacctccctcaaagccaggagggctaagtgggcactgaggccggaggaggaagccaggtcagggccagtggaagaggctgaggacctcccggggttccctgtgtccagccagaggcttggggactggccaggcccccacctgcaagggctcccacagtggccctccatgccctggcccaggtgcccagaacagtgctgcatccccaggaaagggaccc

SEQ ID NO: 430672 - DNA, 220 bp, Homo Sapiens
ttggtgtcgacaggatacacaaggagatcaacgccctgacgcccagcaccttgaacataatcatcatcccaccccgctaccgcaagtactccgtgtggatgagtggctccctcctggcctcacggtccaccttccatcaaatgtggattatcaaggccgagtaccacgagtcgggcccctccatcgtccaccgcagatgcttctaaacggactcttttaa

SEQ ID NO: 430673 - DNA, 386 bp, Homo Sapiens
ttggagagggtctccctcatgcttcgccattgttgggaccgaactgatggagggactctcttcccacctccgacgacgcccccatttcctctccgcttgggcccttgcggaacatcttctcggccatctccggcttctgggacctgcccttccggcgtttgtggttagctccttcttgcctgtgcccatgatgcttccctggtctctgtattattcatgtcacgtgcacgggccgtccgcagcacctgtaatttgtaattgcaggccccgtacattcctggaactctgggcttctcttcttgagggcatatgtgactctcgaccgcgttgtgccctgaccctctgggtggggttaggaggcacccgagatctacaatcgcccccag

SEQ ID NO: 430674 - DNA, 467 bp, Homo Sapiens
  misc_feature (359)..(403): n is a, c, g, or t
ttgggaaggcagctcttcctcacccagaaagaggcaattatttcctctcagcagcctggccccaggagcccccttccctctctggggctctgcctctccttttgtgccctgccatggagccccagggccggggcagcccctctctgcccagggaaggcaccgtcctcaaagacaaggcttggccgggcagtggccttccctgagtggaggggtggcttgagcaggacacttcttgcccttactcaaaaacgaaatcgccagtttccagaggcgtcgggggaacggctgacgaagacacaatcgttatgttctcaattgttttcctcctcttactttctctcctgcctggtttggacagnnnnnnnnnnnnnnnnnnnnnnnnnnnnnnnnnnnnnnnnnnnnntgggcacgcccacacctctggcttcctctgtgcatcctgtgaagtctgtttctgaagcattggc

SEQ ID NO: 430675 - DNA, 817 bp, Homo Sapiens
  misc_feature (73)..(84): n is a, c, g, or t
  misc_feature (243)..(252): n is a, c, g, or t
ggggcccttttggaaaggggccggctagccgggggggccaaggacatcgggcgaaaaaagaagacttcctggnnnnnnnnnnnncggagcgttctttaaaacccacgcgtggtggggccaattattgtttgaatggcccccggacagacaacgaaatgaatttgccggccggaacaaaaccttttccgggactttcttcttcttaagcaggggggtggccacagcaatcctcggtgttaaaannnnnnnnnnaagagggataaattttttccgttttggcaggaacccccaaacccgcttttttatcccggccttcttccagcgccattattttgaaacaacaccccaaaagaacacttttttggaccccccttctcgggcccggaacaagaaagaaagagaaagaccgccccacaccccccgtgatgctggtggatattaaacaccaaaaaggttgtgtgaaggggggggaggagggaatgtcccatttatggagagaggaggagatgcgcccgtcgaaacattagcggtcgccgccttttcccttgctcctctcgggcgcgctgtatcagagacacgattgctcctctgatgctactgcaaaggtcagctattctacccacaagccattgttaaggcagcaaggaaaaagattttgctgactgttgggttacgtcttgaggaggatacaaccgtcgtctcgtgtttaacttattttttgctgcgcgcagaggatagcgtcacatagaggaaacacggggcgcccggccgggccacataaaaaatactccgaagtagtcgccaaacggaaaaaggg

SEQ ID NO: 430676 - DNA, 672 bp, Homo Sapiens
ttggtgctttgtgtcttcgcgtctttctgtaccgtttgccctgtgagaagccctccccctcagctcacatggtcactggctctgttttagagggtcctctttgtgctcttgctctctcatcatttccacccggagccactttgcacttaagctgcttaggcttgaaacgtgctgtgttcttttaccagccttgattttactcttgccacacccttgccggttgaaagtatgcctatccagctcagacactgccatcttctgcctccttgggaccctcagaaacactttgtagctctcttctacctaataataattatttggaattaaaatgtttctttgccttcacaaaaaatccttgggctaacttatttcagttttctttgtagctcctagaacagggtcttacagacatttcatattcagtaggtattcatggtgtgtaggattcatagtataattagaaaactattggctttcaaacaactaagggccaaaaagcagcaaaaatgaatgcacaattaaaatgagttcctattaacaaaacaaatttactgtaattatgatagctaggtaatccttgttctcttatatatttatatatacttactagtgggcaccaaatattagtatacccagtttgagatgcaattttgttgaaatatatttggacac

SEQ ID NO: 430677 - DNA, 909 bp, Homo Sapiens
  misc_feature (375)..(383): n is a, c, g, or t
ttggcatcatttgatcatagcactgtgattgcttttgatgtgtgtctctagtggtgtgttgtctgttggcatgcttaaagcacatgtccattaaaattcattttgttccttttattttccttgttttcttggttagtgattcatttgcataaacattaatgatctctgcatactggtttggggttttctctttccttctaactctaaagaaaaaatttttgctgcagaattatcctcagaagaggcttccctggccttcatctaccttgcagtctgaccaagtatgataaattttagccgttttcaaggaaacatctctctacccaggtcattgctgtcactagcagctttcaagtcaaacctgcagcactaaannnnnnnnnatcctggtttctctacatactaaccccatgtctctctggactcacacctggctcaggccttccagaccaaactcatacttcctcctcaccagaagtttccgaatctcacactagagaagatttgtcacctttaaagtccactcacattattttgactcagggttttgttttttgtctatttcccctcctgcaactctcctttaaaagtgaaaagagagagaatggtttaagtagtctgttgctcataagcacgtgtctgcagtctgtcacttgcaaggccttggtgatcaccatgcagcacttgtgcgcacacacacccccacaagtcttttttcctaataatccattttccacattgccatgagggtaaagggttccaatcaaaaccaccattaaactgcatagtttctagtcttccctcagccctgatgctaattatgatagtttgcatagacataacttaaacttgtgattctccctccttccagagctttttgtagccctttttcccccaaaattagttttg

SEQ ID NO: 430678 - DNA, 422 bp, Homo Sapiens
ttggaacatagtctctgcgtgcgtagctttgtgtagacaggcgtgagcgaaccttatgtccagactgcccctgctgcctgttctgtccctcccgggagcccccgacgcaaattgaaacctgtcgccatggatatgctaaaacaggggaaacacaacatgaccctgtcggtgtggaatatgtatggatcccgcatgataccttctgcataatgaattgcaccggaatctgtttgcaaggctggtcatgcgcagcgcccgggagctctacctctctacctggtggaggccctcgagcccaacgtgttattgcccgcagccctgcgatcatatcctcgtataggcgacccaccaaaagagcctggtgatagctggttgtccaccatagaatgtgagctcacctttcaagatcccctggaaaccct

SEQ ID NO: 430679 - DNA, 889 bp, Homo Sapiens
ttggcttgctcccaagagtactgttccaggaagacctgccccattgtgtaagtactcattcaaacctctgctcgcataatgcttgctaacatgcctttggccaaattaggtcacatagctaacccaaagtcatgtgggtggccatcaacactgggatgtgtgtggcttgttggaggtcactgaagtgaaacctaccgtagttacacagtaagtcagtcaaattcttggtttattggacagctgacagctgttaagaaggaccctatgttaaaggaaatggatacaatctaataacattaacaatagataatggtttttaaccattaacttccattgataatggttctaattagagcgcaagataactagtgaaacgagaattcccttatcccccttgcggggcatgcgacatgggtatggctcactcttttggtttccctgttgctcaaacccctaggaggagcatgcagacgggcaggtgcagaggccgtggggagcgcttctgggctctgacctcacggcagcgtctagggatggctgtctgtgactcccgaatccctagtgggcgtctcttacagtgtgctctttcagctttgccgtctgcagaaggattatgttaatcagctcgatagaccctctgccttattgcaagggcagtggccagtttaacagctttctgtatcccaagttcttgcccagtgtacaagaagaatcggatgacacgtgggcttgaaggatgagtgcaacgttttattgagtggtggaggctctcagcgagatggatgcggaaccggaagtgggggatggagtgggaacgtgatcttcccctggagtcctgctgttctcggtagacggacgcctctttccttctctgccatgccgccctgcc

SEQ ID NO: 430680 - DNA, 685 bp, Homo Sapiens
  misc_feature (76)..(88): n is a, c, g, or t
  misc_feature (136)..(414): n is a, c, g, or t
caactctaacttttttacgttctctaatcctcacaggttctccagaacaaaatccttgataggtgtgcttcctccnnnnnnnnnnnnnctcaaatgatgggttaaagttcaaatgttaggaaaggctgggtgtggnnnnnnnnnnnnnnnnnnnnnnnnnnnnnnnnnnnnnnnnnnnnnnnnnnnnnnnnnnnnnnnnnnnnnnnnnnnnnnnnnnnnnnnnnnnnnnnnnnnnnnnnnnnnnnnnnnnnnnnnnnnnnnnnnnnnnnnnnnnnnnnnnnnnnnnnnnnnnnnnnnnnnnnnnnnnnnnnnnnnnnnnnnnnnnnnnnnnnnnnnnnnnnnnnnnnnnnnnnnnnnnnnnnnnnnnnnnnnnnnnnnnnnnnnnnnnnnnnnnnnnnnnnnnnnnnnnnnnnncagaaacagaaacaaatgcttggagagtgttgtgttagtaacttattgtcttagtctattttgtgttgctataaaggaatacctgacgctggataatttataaagaaaagaggtttatttgggtcacagttctgcagctgtacaagaagtatggtgctgacatctgcatctggtgacccctcagaagcttccagtcatagcagaagcaaagagggagcagatgtggcagaaagggagcaagagtgagggagggaggtggcagtctgttttt

SEQ ID NO: 430681 - DNA, 242 bp, Homo Sapiens
ttggcttcagtcccacttgcgactgttgcctgcttaaagtcaatgacacatacggcactggtagcggatgcccatgattggggaccgagtctttgtccaccctactggctggctattgcatggcactaagtttgactccaatctggatcgcgggacaaattctcctttgacctgtgaaaatggggaggcttcccccgcttgggaccttgccatacccgccatgaatgtgggggaggtgtgcc

SEQ ID NO: 430682 - DNA, 301 bp, Homo Sapiens
ggggtctgccttaaaaaaagaccctggtcttaggcaaggggaacatttctccctggagagtcaggtcctatcctgtgctgccctgtctgcccagcccagggcgatgcctggaagcctactgacattgcagggagtcagcctcgcccccaccccctactggttttccaatgttttgactggagggcaaaattttactactactcatctttttggagaccagggctgccctgctggcagcctgccttctaagtgaaatcgactctgtttccccactttaaccccaaattggggcttggaccaa

SEQ ID NO: 430683 - DNA, 549 bp, Homo Sapiens
gcataaaaggcccctttgtacaaaaaagttggggcaggaggccttggggttggtgggaagcgcaggtcgaagagcgatgccacattctggtttcctggggctgccggccacttcggtggacccagcgctaatgcggccgcggccacgcccaagaaataagaagcggggctggcggcggcttgctcatgagcctctggggctggatgttgaccctttcctggaaaagttgcggctaccggagcgcacgaacggtggcttgttttcctaagcccctcatgaagaactcttcttcttgtactctggctccaaggaaaaagggctgacaaagaaaacagcttcattccataagaattcactgcttcccaagaaaccccttccggttgacctcttcccccccaacacatcgtggctccctgcccccaaagacgtcctcgagaacttggtccccaacgtggctagactcatgttgaacgagaaactatggtataacctggcctacctcggcgagttgcccccggaggtgcgcaaggactagacccggctcctcaa

SEQ ID NO: 430684 - DNA, 143 bp, Homo Sapiens
aaacaaaagactacaaattgaaaaaacaaacctgaacaaccattcaaaggaagatttgctgaggtacatttttttacatgcaaactctgagaggcaagtcatttaggggctcttattctcaagaagcaagacccaaatatccc

SEQ ID NO: 430685 - DNA, 714 bp, Homo Sapiens
atgagccatcgcacccggctctttaggtgttcttttaggagctggtagcggaggaaggtggttacccatctgtgacagagccttggatgtcacgaggccacaggctggcctttcctcctgtttacaggaggtgagttttcctgagttcccagcctcagtgttctctgcacagtctgtcactgactcccgctcccagtgctcactgcctcttgttctcactgcctcctgttctcactgcctcctgtttctgctgagttctttgcatctgcctgatgttggtttaaagctccacccctcccaggggaatttgtcccatgattcacctcctctttggtgatctcttgattgcggctgctgcagccatgtaaaccttaaaggcgagccaatttgtttgtgatccagtggccaaaatggttcaccctcaacttcccttaatcccctgcagcatctgagacacatgggtgaatgtatgtaaggtacttggggctaaccaaagttaaatacatatgacaagtacctgaatctagataatctaatggtaagatatcgtttgctctctggacttcatgggctcaccccagcaatggggtgcctggaaatgaagagatctttcttgtgtctcatcctctgggctcccagcctccctcaacatcatgacctccatctgtaacacccaccatcctggagcagcatcctggatattggaactctgaa

SEQ ID NO: 430686 - DNA, 894 bp, Homo Sapiens
cctataaaagccaactttgtacaaaaaagttggtgccgagctcccggcgattgggtccgctcccacggggctgggaacagaggggcagaggatgcttcccccgagccgctggcaggagtgcccttcccccttcagtctggagctcagagtttgtgcgtccctgggggtgaaggggcgtccacgctgtgatggtcgcctctgctcagtcctgggggccaagccagggtcggggtgatcgagcaggcccttttaccaggtgtccccagtaagttaactaagtaacttgagatgtgacttcagggtggaggacctgcacccagtggccacctacctggtgacctgacccttcccatcattaggggatggaggctggcccagaagccgggcactggggtggcggccgtgtgggagctgcctctcccacttcctcgaagcaggcactgtctgctgttcttagatctgagtatccgttaacttttgtcctcttttcccgttcctttcttcactccctgccccagattaggagttcctactctatcacagtatgaaagaaaagtcacttttcacattggactcaagccgtttttgcaaagtaaactaagaagtgtcttggagccctgagtgagtctcccagtgctgctgcagggctggactaggggattccagcctgcagtctctgagggctctgtagggtctgaggaagagagttgccctctggaaacgtctcttctctgctgttcgggaaaaaccttattaagatttcctccaaaacactcatgcgcagcacgcatggttcggttttcagccctcccacagggccagcagctgaagtttttctggaagactccctgtgcctttctctgggggaggggtgatgccacgggctggaaagga

SEQ ID NO: 430687 - DNA, 223 bp, Homo Sapiens
tcatattttagcattatttatgtatttgctttgtactttgctgagacagatcagatcaagggagctttgaggatttgccttcccagatttgtcagtatattacaaccaaattcttaatgctaattttagcaccttttatttattgggttttttctggcataaaaagtaaagccttttaattgaatcatgccacctatatgcctatattattaatcctatgtgt

SEQ ID NO: 430688 - DNA, 602 bp, Homo Sapiens
caagaccaaattattattttatttttcccttcctaacactcaaattcatggcaggggaaaagataataaaacataatcaaactaacatataaacccaattcaaaaacgtttaacaatctattaaagctctttgttgtaaaacacacaaagttaaacaaaaacatctttatataaattatccttaataatctgtaaacattgaaaaacaattgaaaattctgaccaaattcctatggcaagcaggggtgtacaaaagtgcaatcatggttagtgataaacaacttaccatcaaaataccacttcagcctacttaactttcagccaaatactgaaggtttcaccatggaaaaacacttttatcacttttaaagtaacttgactatgttcaccctgagtgctcttgcctcagtatggcaactgattatgagttcaggttaagagcaacaccagggaatacaaaaacccacgttaagttggccattctgacatgaatctatacttgaaaatgaaaacaatcccaaagaaaacctgtatgtcaaaaacaaaactgttcctgcctttcaccccaaaatatttaaaactaaatctaagccacttttaaa

SEQ ID NO: 430689 - DNA, 361 bp, Homo Sapiens
caaggatatttgtgagggctatctgaagcactgccggaactgaagggacatgttcagtgacgagcaactgaaggtattctttgggaacattaagaatatctagagatttcaaatgggctttgtgatatacttggagaaacattataacaatgatgacccccttctcagcgagataggacccagcctttttccagcacccccacggaatctggatgtactctgaatattgtaacaaccacctggatgcttgcatggagctctccaaactgataaaggacttccgctcccaactcttctttgaggcctgtcgcctctagcaacagatgattgacattgctctcgatggtttccttttgactcc

SEQ ID NO: 430690 - DNA, 371 bp, Homo Sapiens
  misc_feature (283)..(294): n is a, c, g, or t
ccacctctggccgctgggaagacatcatcgcttccgccctacttcctcctcctgttggcggcggtgaaaatcccatatggagtaaaaccgtggagtccagagatgggggtcggaaggggggcctttgaccgcctcccaggcgcacctcccccggccgccgaccactccccggaaccgtgattgggccggccctccgggggcgaccccggactgagcccccccacccgcggccggcgccctactcctcctcccaacagtccctgccgctcccaggcgcgcttgnnnnnnnnnnnnctctttcccaccgccgtccccttcccaaatctcggcccccctgcccgctcccgagcccccggaacctccgcccgcct

SEQ ID NO: 430691 - DNA, 693 bp, Homo Sapiens
  misc_feature (197)..(213): n is a, c, g, or t
cccaataacccgccaactttgtacaaaaaagttggtgcccaaatagctcaagatggcggccagagattagaactcagaggcatctctcctacctggcagactgagttccctgctttcgcaccacttcctttaaatggaccattcaggaatttacccacaaacttaaagtgacccatgccctattctctgtcacatgnnnnnnnnnnnnnnnnngtctgacttttcattcctgcttctcatgacccagggactgacggactgccctcctgactcactgtgccctccttgtccaggatctataagtaaaaaatctttgaacttgtttcctattgtggtggtatgcaaaatttgcaccttccatctgaagaactaggggctattccatgccaggttttccctgggatgctggagggaacataaggtaaggttcctagtgccagtgtactggtcaggagaaataaagtggacacaagtcagagaagagataaagggcatctgctagtataaacaagtttcctgtgtaaaggaccccctggtctcagattactaggcattaggccatctgccaggtaaaagaaatattctgtgaaggcacactgtaaacacccatatccagttctccttcattttcctgctagggtagggttactagtcacccctggtactggaacaccaatctagcctgggcaacaa

SEQ ID NO: 430692 - DNA, 342 bp, Homo Sapiens
catattaatataatcagaaaaataacagaacgagaattttttaaattattgcatattgaaagtgtactcataggcaattagtatgctaaatatatattacaagttacgagcaaaatagtggttacatcgattgatttttgaatagtggaccagccttgcattgatgtaataaactcccacttggatgtgatatataatactgctgcattcactttgctagctaacaatagaaactaagattagaaggaaagcatatgtttagcttagcatggtggtttccaaatctggctaatcaaaatcaactggaggacttgaaaacacaaattttccaaaccctaactc

SEQ ID NO: 430693 - DNA, 365 bp, Homo Sapiens
cgcctacccccaacagagtagtcctgccattggcaccaacccctctgctgattttctccgtagtcctagcctcctataaggcccaggaagagggggtgtggccagaatgactccatggcccaaagacgctcctccctgcaggcactgtgggaacagacacagagatggagaagcagggacatgctgagaggaccaagccaaggttatttaggaggagagtcaaagggatcatagacagttggggatttgaactgcaacagatagggatgagggatttatctctcttctttaaggtgcctttgataaaggacaagtatcttcccgcgccgctcgcgatgagaggggagcaggacctatccctcctc

SEQ ID NO: 430694 - DNA, 130 bp, Homo Sapiens
gcttctcgttgtcttgccagcattactcaaccacggacacactatgcattggctgaaggggatggtgcgagcgtggaccgtgaccacccgattattgctggatcttcactcttatatattgggacaccag

SEQ ID NO: 430695 - DNA, 579 bp, Homo Sapiens
ttgggccccggctcctggagcggttgggaggtgcccggttggctggcatctgtgcttgacgcggaggcctccggggtcacgagctccggaggtgaaggtgccccgtcttcgggttcccatgccgccctggcgacctgcggctccagccccaccacggactccggtgggacgtgggtggcgcaagcacacctttcccctgtgactcagcttgaggggccccaaggtgtcccactgagcacgcgcccagcaggccatcgcgctgcgggttctggtcttcctgtcatttgttggggttcggaggacaccagggagtctgaggatgggagagccccagtttcggaggggccagggcagtgaacacaaagccccgcatgcccgggcaggttgggagagtccttctgcctgcgcagcctggctgggctggagcagggggatggcccttgctgcctggctcacgaaagccccctgtgggagagccccaggagcgcagggcatgtggggtgcaggaagcgcctttccccacgccccggtgtaggtgaactcgatagagtagggaggagggtgacacccaccaggggt

SEQ ID NO: 430696 - DNA, 930 bp, Homo Sapiens
  misc_feature (63)..(122): n is a, c, g, or t
  misc_feature (126)..(185): n is a, c, g, or t
ttgggtgaccctagtttctgtaaatgtaagcaggagaaagcaaggaggggtggagggagaggnnnnnnnnnnnnnnnnnnnnnnnnnnnnnnnnnnnnnnnnnnnnnnnnnnnnnnnnnnnntagnnnnnnnnnnnnnnnnnnnnnnnnnnnnnnnnnnnnnnnnnnnnnnnnnnnnnnnnnnnntggggaggcagaggagacatgtccttgctgaccgccagtgctctgtgggtttgggccccccattcatcccttgcccatcctgcacttgtgaagtttccaaggtcctctgttactcggcctgggcaccgctgcaccttgggactctttctgcagatggcgcctctcctggaggtctctagcactctgacctcttacaaaagcccctctggcctcggattgataatgtggggtcaagtgtgtgcgttctgggcagagcctggaggtaggctggagctcgtgtcccgggtctggatgcttctctcagtctctgtgccccttctggctccgggatctgggcccactttgcacaaagtggggaggcagagcggggtctggcccccggaggcggccgcagcatttctgcgctggagcaagcaggtgccgcctggctgcagccttgcagggtgttggcgctccctgtgtcctctgtctgtctctgcggctctgctcccggcctttgctggccttttgccctcccgccgctgcctcactgtgaagacacatccccgaaagcccagagcttgtcctcactgtgaagacgcgtccctggatgcccagagcttggatgggcttctaccactccacggccgcctcagcccatggttattttccactcgccttttcgtttgaaagcacttatgtgcaaattgccacgtgcacaacagtcccttcgtggggagctctcagtgagctcagctgagccctc

SEQ ID NO: 430697 - DNA, 790 bp, Homo Sapiens
gatgtaggcatttatagctataatcttccctcttagtactgttttttctatatccaataggttttggtatgttgtgttttcattaccatttattccaggaaatttttaaattttcatcttaatttcttccttgatccactggtcattcaggagcatattgtttaattttcttgtatttgtatagttttcaaaattcctcttgatattaatttgtagttttattccactgtggtcaaagaagatgcttgatactatttcaattttttaaaatgttttaagacttgttttgtgaaataacacatggtctattcttgagaaaaatccatgtgttaatgagaagaatgtgtattccgcagccattggatgaagtgttctgtaactatctattagatatatttggcttataatgcagattatgtttgatgtttctttgctgatttgctgtctggaagatctgtccaatgttgaaagtggggtgttgaaatctccagccattattgtatcagggcctgtctctctccaactctaataatatttgccttgtgtatctgggtgcttcagtgttgagtgtttatgtatttaaattttttatattcttttgctgaattgattcctttattattatacagttaccttctttgtctcttgttatagtttttgtcttgaaatctattttgtctgatacaagtatagctactcctgctcttttttggtttccattggcatagaatatctttttccatccctttatttttagtctatgtgtttatttataggtgcagtgtgcttc

SEQ ID NO: 430698 - DNA, 818 bp, Homo Sapiens
ttggggaagcatttattcaagaaaaatggctcttggtaaggacagctagcattgtggtgtttttacttgctccagtcttaaccccttccctccaactccatggtaaccttgaaaaccaacagcttgcactcatgaggaaatccagtggtccggcagccaccagaaggggctgaggttggagcacctttgaagtctatttcccagagaattctcatcatttgacctatctagttgttccccggaaaaccacttgcaaagctttctttatttcacctgacttggagctcgccccatgtggtagggtagaggggggccttttccccaagtgcatttgtcaataacatttagaagcaattgtttgatttcatggctgcctgagatcatggataacagccaggtcaaacaacaggcttaacaaaaaggcttaagaggaaaagcctgggaatgagattttcagagagctttgataagctctgatatattcccaggaatctagaaggccaggcatgtgtagagttgtgtccatgctcaagaatgacatgagaaatccctaggttgtcacctctggctgactttgaggctctgcacaaatgggaagtgaaggctaaggtggagttgccaattgtacactccattgcttattgaaagcacactccaacatgcacacaaaaccccttaacaaagacttactggttccagttatttaaggaagtctctgtccaatcactagttaaccactaaacaaaccacatagaagcttcagtggctaacacaaccaaagaatacagactttataaaattacttcagaaatgtcatt

SEQ ID NO: 430699 - DNA, 855 bp, Homo Sapiens
ttggcagacagttttgcagcatggctgttttatttttactgatttatccaatgtttgagaaagttaatcccctcccattgaggaataagaatgctaggaataaaatataaagcaggttggaagaagaataacataggagcagttattagaagagaattaatcatagctgttatttttaagcatcaactcagttctaggcacttttaactttaaaacacttagcaagtgctaagtaggggcttatcaatataaatgatttaccagaaatccacttacctaattgtaaaaaacagtagttaaatccagagctgttacagtaggtagctagtcagacatgagcagggtaggggagggctgaacactccctactcacttaccaagatatctcaggtgattgttacagtatctctctaaaataacaattggttgcagccagcaccaggaaaaggcagtctcccaaaggatagaaacacctgaaactagtgatcaactgcttcttgataagatttcaggagttggacgagtgggctcaagcatgctcactaagaggcggaatggtggcgtttaacaggtataagatcattcttgagcacctcgagtgagcatgtgtacaatttcagtacagacactgcacatgctcctctgccaagtgctggcaagcccctgtgtatgcaaacagcccacccctagggaagaatcagggggagaagggatgcaaccctctcccctcggaagtatgccaacatgtaataaccctagttaaaggtcaaacacggcacttcatctctcaagtcacccacttgaccctcttccaagtgtactttacttctttctattcctgctctaaaggttttt

SEQ ID NO: 430700 - DNA, 812 bp, Homo Sapiens
ttgggtgaaatatgtatatgtagccctttaatgtttcagggacaatggaactatgaggtctagcttctattaactgaattagaagctttgagggaaaaaaaagtgataagtcttggggcatccatctccaatctaaggcaagctataaaagcctaagggcctcaatggcagtgtttgaagatattcttatctcctaaaattaaaaggccgactgtgttaaaaattagacctaggttttaattatgaaagtggtaggcctgtaaacaccatctagccttaatatatttatgacaaagctatggctcttattgaaaaaatgaaacaaaattcatgagaaactatgtcctagggagggacacttgagcggataagcattaagaattttgaacccctaaattcttctgaatcctcctggctgttaaaaacagcaccccccaatgtttctgagtaaagtttcccctccccttgcctggagggcatacatggatattatctgagatgaatttcttacaagttaatgtcgttctcctcaacattccttcctacagcccctctatgccttcaggcaaataaccagggtgaggtttcagtatactttgaacggggaagtataattctgcatcaggaggaaacagattatacatcacaggaaaggtagtgcctagccagtatttatagcacgaaacaagattacatatgtagcagtcaattcagtttatgggactaagtggcggagcaatgtaaagactaatatgaagagaatttattgatacccatcatttactcatgatcttaattgagtacttgggtaa

SEQ ID NO: 430701 - DNA, 872 bp, Homo Sapiens
  misc_feature (662)..(671): n is a, c, g, or t
ttgggagatttaagatgctaatgagacatgcgacatatgaacatccatgtacagctactgcgcaaatgcacgaagaggaccgcccagaacatgcttactagcaacacctcttcccacccgtttatgaataatcatggaagactccattaaagggagcatccctcgtgccggcctttgatgtctcatccttacgagcagcctgccctgaagtttctctcagggtgtactgtccattctgcacctaacttacaaaatattctttttctttttcaataaattagtctatgctacatctcctttgctgtgtatctcttgttgaaattcttttaaactaagaagacaagactcgaggacttacaacagccatcaacacacacactatgtatgtattcaataaaaaatgattccttgtgcagaggcagggaaatgtggcacataccaggagaaagatcagtcaagggcaagacccagaaatgacagttgattctacagcagataagaaatttaaatcacttcttataaacatgcttacttatgtcaaggacttcaagaaaaacatgaataaaatgaaatgagagatacgaaagtttgcctaacaccaaataaaaaatacggtatctgaaaagaaacatccaatcaataagcttaatagattagcattnnnnnnnnnngtaacagtggacttgaagacataacaatggaaactactgaaaataaaacacagggagggaaaaacgctaaaaacatgaagagccatggtgataaatgtgacagcagcagcaatctaacatatgtgccattagaatccttgaagagaaaagagagtattagaagaagaatgactgaaatgttttcaaatttaatgaaaatta

SEQ ID NO: 430702 - DNA, 379 bp, Homo Sapiens
ccctttaggttagtgttgttttacctataagattagaataatgataacttctttataatattttagaataattaaagcatatttaaagtgtttagtcaatacatagaaagtggtacatagaaagtgctcagcaaacagtaaccactgctgtaattattacttcctttactgttattaatattattttaatgatattgatttcttcaaaagtcaaatatctagatcatttgtacatacatctgcatatacttgtacacacagctccactaacagaaacaggtgattagtattgttagggaaggtagaaggttacaaaggtcagacacaggcttcagggaagaaaaagataaaattctcttgaaggttctgttctggaaat

SEQ ID NO: 430703 - DNA, 835 bp, Homo Sapiens
  misc_feature (287)..(302): n is a, c, g, or t
ttggattctaagttactaaataaatttttaattgaacagctgatatactgatcaggtgcaaaagtgatatttacagtcccaaccttagatttgaaagtagctataaactgattatagtctagattgatgagacaaattgaaatacaatgaaactgcactaatattccaaactaatgtttttgggggagaaaatggtggcttaaataaatgactctgccatgaagaaggaaccaaagatacagtacattgcaaattacaaaaggcaaataagaatagactacaatttnnnnnnnnnnnnnnnngccatatgctttagacccaaagtacagagctatgcactgtgaatatgtgcatttagttgactcattaaaataaggtgttaagatacactcaggagtaaataaactttacaagaactgtgaacagtctgaaatttacaattttatgaatattcatagaagtcatgagactcctgggtcagaggcaaataacagcttattacagcaacagcagaagccaaattatcagcatttttgcacggatttcttgatccactttccacatagcaaagtgaagaggggcagatggcatgtgcatgcacaatagattgtattacaggaaaggaacccagagcttagggaacccaaattatttataacgggcggttagcatgcacatccttggttccacaaggtgatactaatgttattttccaagactgtaatgaaatcttcctctggttcttgggggagacactatcttcataatctgaggctgtttattatacaaacatccttgaaacaacagtctacgacaaaaggcagttagccctccc

SEQ ID NO: 430704 - DNA, 1002 bp, Homo Sapiens
ttggggcgccgcgaccgccttccttcgctgcgtcccgcccgctccacgcctcgctcaccgccgccgcttctccctgccccgcagcgcgcagggaccatgtcggcggagaccgcgagcggccccacagaggaccaggtggaaatcctggagtacaacttcaacaaggtcgacaagcacccggattccaccacgctgtgcctcatcgcggccgaggcaggcctttccgaggaggagacccagaaatggtttaagcagcgcctggcaaagtggcggcgctcagaaggcctgccctcagagtgcagatccgtcacagactaaggagatggcaggcattgacagcttcactccatgaaggccatctctgtttctctcctccgcttaaccaagctgttgtggtttttcagcatagtgttgtatgttccattgctagctgtcctgctgtttaacacagtgttgtattttttttctaaatgtacataattagaaaagaaaataacaataggaagctatgtgtatcttctgtgtaaagcagtggcttcactggaaaaatggtgtggctagcatttccctttgagtcatgatgacagatggtgtgaaaaccatctaagtttgcttttgaccatcacctcccagtagcaatttgctttcataatccatttagcaatccaggcctctgttgaaaagataatatgagggagaagggaacacatttccttctgaacttacttccctaagtcactttccttatgtatcatctaatacaatgatggttgagtgaaaatacagaaggggtgtttgagtattcagatttcataaaacacttccttggaatatagctgcattaacttggaaagaagcctgttgggccagaagacagaaactccaactggcaaaaaagcaagcatctaagaaaaaaaccaccaaagttcttgaatttactatatttaaatgcattggttaagtttattttgctaaataaagtgaactgctttttgtctctaa

SEQ ID NO: 430705 - DNA, 908 bp, Homo Sapiens
ttcccacccaaacccacagaaccccaaacaaggcatcaccaggaaagacacgggaaagccaaatcacagttgaaccagggacagagaacccttggccccactgatgtcccaagccaccagcagctgcttccaaaatccctatgctattacagtgggaattacatcatttaaaaagcctgattattccaggcttctaatctttcatataaaactgcctttgttttgctgctttgttcaactgagaggcccaggaaagcggggagggtccctgatcagggcaggaggccacctcagaagcccaggcccaccagtgcccaagcacatgtcagggctcagaacaaggcctcaaccaagagggttgatggcctccagtcaagaaactgtggctcatgccagcagagctctctcctcctccagcaggcgccatgcaagggcaggctaaaagacctccagtgcatcaacatccatctagcagagagaaaaggggcactgaagcagctatgtctgccaggggctaggggctcccttgcagacagcaatgctacaataaaggacacagaaatgggggaggtgggggagccctatttttataacaaagtcaaacagatctgtgcgttcattcccccagacacacaagtagaaaaaaaccaatgctgtggtttctgccaagatggaatattcctcctcctagttccacacatggcgtttgcaatgctcgacagcattgcactgggctgctgtctctgtgttctggcaccagtagcttgggccccatatacacttctcagttcccaacaagggcttatgggccgaggggcaggctccaattttcaagcacacgaaggaaggatccatcacctccaccaggatctcgatcagcacgggctcgtactctgccacaaacccaa

SEQ ID NO: 430706 - DNA, 475 bp, Homo Sapiens
agcagggggaagaggcaggtctgggagggtggagaggaagggcgctgcccaatgtggctgtctgctcaactgttctcccagaagaaattgttacaggccactgtgagagcagccacaagcaccacatactcctggaagtccacctccccgtctccattctcgtctagctccttcatcaccttgtccacagcatccacatccttctgggcatccaggaagccagagagctccgtctgcagcagctctttcagctccttcttgctcagcttgtacttgtccccctctttgcccgagtgggcgtggaacacgttgatgagggtgtccatcgccgtctccagctcagagcccattgcagcagtgcacggttggcgtgggcctgaggtgggagcaggttctggacagatggccaaggttgcaaatgtggctgctggagctgtgtttggagaggctgtcttcaacccaacttttttgtaca

SEQ ID NO: 430707 - DNA, 733 bp, Homo Sapiens
aataatgagttctttttaaaccatgtcatacattcccccatcctgatatcgcatgatccattataatataggcagggggatttactattggtggggcgtgccagaccctcccttgcttcagccagacagttcaacctggagttccttgttcctgcgcacctccgcagcatgcctctccttttcctgcagacgttcaataatagcagctagattagcctcacggttttccttaatttgttccattttcaggatcagcttttcctccgccatcttgctgaagttgttgttctcctccaaagccttctgaaggacttctcgctcgtgttccctcttctctgccaattgtttcagcacctgggcctcctgagactttcttctttcctctgcagcctccagtttcttctggatctcctccagggacaggtctttcttctttggagaagctaaagttcgtggggcttctgagataggagatggtggcttcaagatcagctcaaaagcctggccagaggcacgtttgttgatttgcttcacttccatatcatcgtaagtatagatgttgatgttgcgaggttccgggtaaaagcaagagcagatcagtgacagcatggacagctccttcattttttccttgtaggccattgctgttttagccattgtagggatgtgcagacgctgagcagtggcgaaggcaaagggtaccggctacagcagcgccaactttttgtacaaa

SEQ ID NO: 430708 - DNA, 676 bp, Homo Sapiens
aaggagtggagggaaaggacaccaagtcttggggagagggaaggacccttcttcggccttagaggggagaggagaaccctgaagtgggccctcccagtcccatctctgggcacagatcccaccagtctgctcaccagtctgctcagtcaaagcagagtgggtgcactggggtggacgtgtcagccctgagcacccggcctccaggctgcaggaatatgagccagtgtcttcactttgctcgtgcctcagttttacaattgtaaaatagggcactacctagaatactgggtacattttgtgtgtgagtaagaagggaccgcaagaggcccttggcttagggaaaagcagccggtcactatggggtggagagggtcagacgtgtggcagtggcttactggggttaagaagcagcagtcccaggggctcagaggctggggcggcctggtatgacacagcaaggaagaggcctttagaaatgggacaaagtcatgccctgcccccatggatacatcccctttctctcctgtttcagcatcttcaagaggatgagtcacttccttaattcccacaatccagaggccaagtgcaactggtcacccacaacccctacttgtatgcctagcgccatcccaattgcctcctcctccatctctaccagcgtcccctccagtcccaa

SEQ ID NO: 430709 - DNA, 1449 bp, Homo Sapiens
agggacagaggagggaggggagcagctggggtggtggggagctcaggtctggggaaatgtgccagcagaggcggagcaactatcgtgcttctgctcgggcccctcatgagacggggcagaggccaccaggtgggtctgcctcacatcacatccttgtgctcctgcttggactccttaatgacctctccatcccgcatctccacggtcttcaccacgatgttcctcttgaggtggccttctgacacagacttggtgtccaggctggtttctcgaatctgcaggttggagaaggtctgcacgggaatggtgatccggttctcctcgccctctagcagcttcctgtaggtggcgatctcgatgtccagggccagcttgacattgagcaggtcctggtactcctgcaagtggcgggccatctcgtccttgaggctctgcccctcttcctccagccgcgccagcgcctcctgataactggccgcctcccgcacgtgccgctcctcctgctcgcgcatctgcctctccagggactcgttcgtgccgcgcagagactccaggtcgcaggtcaaggactgcaactggcgccggtagtcgttggcttcgtgcttggcctggcggagcagctccgcgttgcgggcagcagcgtctgtcaggtctgcaaacttggagcggtaccactcttcggcttcatgcatgttgctggacgccattgcctcatactgcgtgcggatctctttcagggctgcggtgaggtctggcttggccacgtcaagctccacatggacctgctgtcgggccagctgctcctggagttcccgaacctcctcctcgtggatcttcctcaagaaccggatctcctcctccagcgactcaatcttcctctccagatccagacgggccagggtggcttcatctgcttcctgtctataggcagccaggttgttctcggcttccagcctcaggttggtttcatcctggagcttctgcctcacagtggccaggtcctgtgccagattgtccctctcaacctccagccgggcgctgttggcggtgagttgatcgagccgcagccgcagctctcgcagctcagcctggtagacgtctgccagcttggtgggctccttggcccgcagctggttcagctcagcagccagcgccttgttttgctgttccaggaagcgaaccttctcgatgtagctggcaaagcggtcattgagctccatcatctctgcccgctcactggcccgggtctccttgaagccagcattgagtgccccagccagggagaaatccacccgggtcgggagtggagggggcattcgagccagggagaggcgggtgccaggacccagacggcggccaggagccaggccccccaccatcatctcccctgaggagacgtaggagcggcgagcagcggaggtgatgcgtctcctctccatcctgctccaa

SEQ ID NO: 430710 - DNA, 706 bp, Homo Sapiens
taaactggtaatagaatttattcaaatgtgccttaatataggcgctggggcttgcccatggtgctcttgatatataaggcccggacattctgccagtttttcttgagcaatgacaccaagaagttgacagccaggtgaatgttatacacaagctcatcgtctgtcatcttcacgtgaccaacagctacagccagacataacaccttcttcatttggaacttgattgtggacttcacctcatccactttggccaccatgttttcgttgtgtgtgagcagggaagggaactttcctgccttatttaaacctgggccgaggattcgtggaatctgcttgatcagagactctgaggccaaaaacgcatcatacttcttggccagcttcttgaccagttttttattcttgttgagttttttcagcgcctcgatgtccatgtgggggatatccacggccttagcctcgtcacagtgctgctggtcccccaggacacacacagagaacttagggcggggagtggacttaagcctgacggtgcccgagaagcgcttgtccttctggggatcatagttcttcaagctgatctgcaactccaccgtctccaggaacttgcggcgcttgcgctggttcccgtgcaggacttcccgcaccgcctcgtacagggtgtcgcgagagactttgctgctcatggcttctcacgccgcgccaa

SEQ ID NO: 430711 - DNA, 912 bp, Homo Sapiens
ttggggccgggcgaggtgcctgggatgcttctccccttccgcgaggaagagatctaattgggtagggcgggtgtagactagcctgccgagccgcccgctggcacctgcagcctcctgggcgcccgccgggccccggcgagaaagttgttaaagggagcgaggtggttgttcctggggtccgaggcgcgcctctcacgccctgcccaacagaagccgcagtcccgtggggtctggagacgcagtttcctgttaatgacaataaatccctgctccccctgcctcagacatctacgcagtgaaatcgagcctggccttgagggtccacaccgcgagggaagatgcgtgcgcccattccagagcctaagcctggagacctgattgagatttttcgccctttctacagacactgggccatctatgttggcgatggatatgtggttcatctggcccctccaagtgaggtcgcaggagctggtgcagccagtgtcatgtccgccctgactgacaaggccatcgtgaagaaggaattgctgtatgatgtggccgggagtgacaagtaccaggtcaacaacaaacatgatgacaagtactcgccgctgccctgcagcaaaatcatccagcgggcggaggagctggtggggcaggaggtgctctacaagctgaccagtgagaactgcgagcactttgtgaatgagctgcgctatggagtcgcccgcagtgaccaggtcagagatgtcatcatcgctgcaagcgttgcaggaatgggcttggcagccatgagccttattggagtcatgttctcaagaaacaagcgacaaaagcaataactgaaaaagactgtcctgtcagcgatgactttatacatcaagggggtcttgttttgctagagagtttggggtttgggtttgtgga

SEQ ID NO: 430712 - DNA, 775 bp, Homo Sapiens
actttgtacaaaaaagttggggtctgggccggtccctgcgagaggcccaagcaggtgagaccgaggaggccgagactgtgagcgccatggccttgctgtcggtgggggccgagcaggcccaggctgcggcagcccgggaacacagccccaggccggcagaggagcccatggagcaggagcctgccctgtgacgccccggcccccatccctctgggcttcaccattgtgattttgtttattttttctattaaaaacaaaaagtcacacattcaacaaggtgtgccgtgtgggtctctcagccttgcccctcctgctcctctacgctgcctcaggcccccagccctgtggcttccacctcagctctagaagcctgctccctctgcagggggtggtggtgtcttcccagccctgtcccatgtgtccctccacccattttcctgcattctgtctgtccttttcctccttggagcctgggccagctcaaggtgggcacgggggcccagacagtactctccagttctggggctccccgagtgaggagggaacgggaagtcggtgccttggtttcagctgatttggggggaaatgccttaatttcactctcctcccttctccagcctcaggggaggatctggaggatccactactgtctttaagatgcagagtggaggggaggtgggcacccaccctgcgattctccaccctttccccttctttcgtcctcaccatctctgcagacccctctcctcctccttcctcttggtctcagcactga

SEQ ID NO: 430713 - DNA, 950 bp, Homo Sapiens
ccaggggatctaccaccaaaagctccttctagtagtacagctggtgcatctgccttaccccatcctctcctctcagattcaccgaggactgttcaggtggtaacattctcttagggtagggaactctgcagagggagagctgaggaggttccggccatagttgtttgtaatcttagggctctgggcttggctgaaacatgacggtattgcttggtttcaggcttgacactgccaggcgcctattgcttgacctctgtttaaatgagggacttcaagactagacagcatggctcttttcagtttattgcatgaaggagttacactagtccaagttaaaagcggaccccaaatggttacattatacaagctgtgaggtttttaaacctgtgacaagggagagaagggaaattctactcattgcaaggaaatcctcacttaagcttcagtgagccacaagcacttaaaacccatgaaccttcagctgatcgtccttagccagtccaatctctacgaggaactggcatatgttcttgcgttggtcaccctgtagctgaattacttctccatattccggatgctcaattacagtaccattgcaggcaaactttttcttaaacgccttcactagtttctttttatcgtaatcatcagcgatcccttggacagtagtaagggtcttcctgccgtttctctgttgaattcttatatggatataatcctcagtgccagcaggaagcaggtcatcacccttacttgcatcagcaaaggggtcgaaagagtggaggttctggatagcggacatacgatacgattccttttcctcggtggaaacggcctgcggaaggcggcggcggcggtggcgggagaaggcgggcaggggggaacggaacgtcgggaagcgagggggctcaagggggaggctgctgaatcctcggcggcggctcagccaa

SEQ ID NO: 430714 - DNA, 1482 bp, Homo Sapiens
  misc_feature (443)..(451): n is a, c, g, or t
tagaggactcctactttctgctctgagtgcgcaagtcttcctggactctccggctgtgggctgtggtttggaaacgaggttgttcatagaggctgctctggggccaccatgcagggcaacggtgacgtccagaggccacctgcttgacatctccatcaccaaatctccaggaagaccctgtttcctatgtgaggccattgcccagcccacgtttgcctccttttcctccctctgccacacgcgaattcagctaattggggtgtgtgggcagccacggcctggggaggtggccccctctctgtgctgccccacgttggactctaacagctgcccagcccgcatgtcacataccaaaagctcccacatgtagtaagccactccttgactgtctaatcctgttaggaaaaatgaagtctactttaggaggtgagagaaggacaggnnnnnnnnncaaaggaagcttggatgtcaacagtcctctctgccgcccacgtcctctctgtctctgcagctgtgtgcctccatggcagtgaccagcaaaagcgcaagggtgccgcagccacggcgaaaagaaagtccaagggtggaggggtgaacgtggagggacgtctgtgcacctggccccctgaagacccacgtgcgtctgggggcacattgcgggggaaggaacgtgatcttcacacagaaagggacagttttaaccgttttctgttttcatgttctcatttaactgttggccggaaattgccggtaggctgccgtggcctgaccctactacgtgcacaactccgcaggcattaggggaggggtcatctgctctaattaggtaacaggggcaagtgggattaaagttttaaggcagttatattaagaagctgaggacaggattccggaaccaggtgggttttcagcgtctagccatgggtgatccagagcgactatctcttcctcccagcttaaaaattttggaaagcgtgccctgggcatcgactcccttgaatcccttgtgagccgatttatagtcggacgctctgcctccgtagccaaatcctggtctctggccttcggccccctttccctgcgacgggggtggtgtgcgaggcgtcacaatgttcttgaagaagtggactacggggttttcatcttgggtccggccgtgtgacttctggggcagggagccatagtgagcagttcttgccgggtggtgtgagtccatatgaccctgtaattccatttcctgctttaaatactaaaggataaattacatgcttttggaaatggcttctataatgaatatattggccaccaatcttttgagggaaaagtaatttaaattttaataaaaacttatgtttatacaataaccagtacatgaatgttcatagcagctaaacccactagatttcactaaaaccttcaaacaacctgaatgctcttgaggggctgaagggataaacacactgtgctgtatccaggcaccaa

SEQ ID NO: 430715 - DNA, 1604 bp, Homo Sapiens
  misc_feature (574)..(582): n is a, c, g, or t
ttctgggaggaagtgaatgagccggttatcttctcagagagggttagtgctggccactgtgcactgccgctgccagcacgcccggtcacagccagtgtctatgggcgactggcgcggctgcgaggctgtctagaggactcctacccttctgctctgagtgcgcaagtcttcctggactctccggctgtgggctgtggtttggaaacgaggttgttcatagaggctgctctggggccaccatgcagggcaacggtgacgtccagaggccacctgcttgacatctccatcaccaaatctccaggaagaccctgtttcctatgtgaggccattgcccagcccacgtttgcctccttttcctccctctgccacacgcgaattcagctaattggggtgtgtgggcagccacggcctggggaggtggccccctctctgtgctgccccacgttggactctaacagctgcccagcccgcatgtcacataccaaaagctcccacatgtagtaagccactccttgactgtctaatcctgttaggaaaaatgaagtctactttaggaggtgagagaaggacaggnnnnnnnnncaaaggaagcttggatgtcaacagtcctctctgccgcccacgtcctctctgtctctgcagctgtgtgcctccatggcagtgaccagcaaaagcgcaagggtgccgcagccacggcgaaaagaaagtccaagggtggaggggtgaacgtggagggacgtctgtgcacctggccccctgaagacccacgtgcgtctgggggcacattgcgggggaaggaacgtgatcttcacacagaaagggacagttttaaccgttttctgttttcatgttctcatttaactgttggccggaaattgccggtaggctgccgtggcctgaccctactacgtgcacaactccgcaggcattaggggaggggtcatctgctctaattaggtaacaggggcaagtgggattaaagttttaaggcggttatattaagaagctgaggacaggattccggaaccaggtgggttttcagcgtctagccatgggtgatccagagcgactatctcttcctcccagcttaaaaattttggaaagcgtgccctgggcatcgactcccttgaatcccttgtgagccgatttatagtcggacgctctgcctccgtagccaaatcctggtctctggccttcggccccctttccctgcgacgggggtggtgtgcgaggcgtcacaatgttcttgaagaagtggactacggggttttcatcttgggtccggccgtgtgacttctggggcagggagccgtagtgagcagttcttgccgggtggtgtgagtccttgccagagccccgcttgggcgcacccctgtcaccgccaaagaagcgcccgatggagtcaaggatgcccgtgtctctgtgccttgggaggaagccatgcctggcatggtccatggtacttgctgtggccaggtacttggatccgtgcctctgggagggtctcttctgtgacgccatcacatccaggctctcggaggtggctgcactgtcttctccaacttttttgtacaaagttggccattaaaaaaaagcattgctca

SEQ ID NO: 430716 - DNA, 1175 bp, Homo Sapiens
  misc_feature (143)..(151): n is a, c, g, or t
gtgctgccccacgttggactctaacagctgcccagcccgcatgtcacataccaaaagctcccacatgtagtaagccactccttgactgtctaatcctgttaggaaaaatgaagtctactttaggaggtgagagaaggacaggnnnnnnnnncaaaggaagcttggatgtcaacagtcctctctgccgcccacgtcctctctgtctctgcagctgtgtgcctccatggcagtgaccagcaaaagcgcaagggtgccgcagccacggcgaaaagaaagtccaagggtggaggggtgaacgtggagggacgtctgtgcacctggccccctgaagacccacgtgcgtctgggggcacattgcgggggaaggaacgtgatcttcacacagaaagggacagttttaaccgttttctgttttcatgttctcatttaactgttggccggaaattgccggtaggctgccgtggcctgaccctactacgtgcacaactccgcaggcattaggggaggggtcatctgctctaattaggtaacaggggcaagtgggattaaagttttaaggcggttatattaagaagctgaggacaggattccggaaccaggtgggttttcagcgtctagccatgggtgatccagagcgactatctcttcctcccagcttaaaaattttggaaagcgtgccctgggcatcgactcccttgaatcccttgtgagccgatttatagtcggacgctctgcctccgtagccaaatcctggtctctggccttcggccccctttccctgcgacgggggtggtgtgcgaggcgtcacaatgttcttgaagaagtggactacggggttttcatcttgggtccggccgtgtgacttctggggcagggagccgtagtgagcagttcttgccgggtggtgtgagtccttgccagagccccgcttgggcgcacccctgtcaccgccaaagaagcgcccgatggagtcaaggatgcccgtgtctctgtgccttgggaggaagccatgcctggcatggtccatggtacttgctgtggccaggtacttggatccgtgcctctgggagggtctcttctgtgacgccatcacatccaggctctcggaggtggctgcactgtcttcttggatggtctggagctcgtcggactcagccaacttttttgtacaaagt

SEQ ID NO: 430717 - DNA, 1513 bp, Homo Sapiens
  misc_feature (471)..(479): n is a, c, g, or t
gggcgactggcgcggctgcgaggctgtctagaggactctaccttctgctctgagtgcgcaagtcttcctggactctccgggctgtgggctgtggtttggaaacgaggttgttcatagaggctgctctggggccaccatgcagggcaacggtgacgtccagaggccacctgcttgacatctccatcaccaaatctccaggaagaccctgtttcctatgtgaggccattgcccagcccacgtttgcctccttttcctccctctgccacacgcgaattcagctaattggggtgtgtgggcagccacggcctggggaggtggccccctctctgtgctgccccacgttggactctaacagctgcccagcccgcatgtcacataccaaaagctcccacatgtagtaagccactccttgactgtctaatcctgttaggaaaaatgaagtctactttaggaggtgagagaaggacaggnnnnnnnnncaaaggaagcttggatgtcaacagtcctctctgccgcccacgtcctctctgtctctgcagctgtgtgcctccatggcagtgaccagcaaaagcgcaagggtgccgcagccacggcgaaaagaaagtccaagggtggaggggtgaacgtggagggacgtctgtgcacctggccccctgaagacccacgtgcgtctgggggcacattgcgggggaaggaacgtgatcttcacacagaaagggacagttttaaccgttttctgttttcatgttctcatttaactgttggccggaaattgccggtaggctgccgtggcctgaccctactacgtgcacaactccgcaggcattaggggaggggtcatctgctctaattaggtaacaggggcaagtgggattaaagttttaaggcggttatattaagaagctgaggacaggattccggaaccaggtgggttttcagcgtctagccatgggtgatccagagcgactatctcttcctcccagcttaaaaattttggaaagcgtgccctgggcatcgactcccttgaatcccttgtgagccgatttatagtcggacgctctgcctccgtagccaaatcctggtctctggccttcggccccccagctaaatctgctcagggacagtcctctcccctttccctgcgacgggggtggtgtgcgaggcgtcacaatgttcttgaagaagtggactacggggttttcatcttgggtccggccgtgtgacttctggggcagggagccgtagtgagcagttcttgccgggtggtgtgagtccttgccagagccccgcttgggcgcacccctgtcaccgccaaagaagcgcccgatggagtcaaggatgcccgtgtctctgtgccttgggaggaagccatgcctggcatggtccatggtacttgctgtggccaggtacttggatccgtgcctctgggagggtctcttctgtgacgccatcacatccaggctctcggaggtggctgcacccaacttttttgtacaaagttggcatttttggg

SEQ ID NO: 430718 - DNA, 1240 bp, Homo Sapiens
  misc_feature (1129)..(1137): n is a, c, g, or t
tttcttaaaagtttattgttttatttcaatattcaggaacagtgtacactttccgttcagccatcgtcacagcacgtgctgtgtgggtgcggccacgtatggatcgcagagccgacctcagctcagcgacgcagagtgcttctgctgaaaaatttggaggtttgtgtctggagttttgttctttgtaaccctctcatcatcgaggctatatattaatagacatggtattaagcccacacgaaacattcagaattagaattggattaagaagacgcgttttggcatcacgctgactactcctcatctccgtcctcggggagggcgatgccagcgtgggactctttggaaggcctatcaatcacaggtgcgctaaaatcaaaaggtgggtcagtaggttagtgagggaggcgcgaaaggagatgccagcgggtgttaggaaggatatggtcagaagagctctttgtctccatccacggggccgtctgctcagcccgtgtgtctcggtgagtaattcgggagcaggtgcacgcctgtgcctactcgctaccacgcgtcttctgggaggaagtgaatgagccggttatcttctcagggagggttagtgctggccactgtgcactgccgctgccagcacgcccggtcacagccagtgtctatgggcgactggcgcggctgcgaggctgtctagaggactcctacccttctgctctgagtgcgcaagtcttcctggactctccggctgtgggctgtggtttggaaacgaggttgttcatagaggctgctctggggccaccatgcagggcaacggtgacgtccagaggccacctgcttgacatctccatcaccaaatctccaggaagaccctgtttcctatgtgaggccattgcccagcccacgtttgcctccttttcctccctctgccacacgcgaattcagctaattggggtgtgtgggcagccacggcctggggaggtggccccctctctgtgctgccccacgttggactctaacagctgcccagcccgcatgtcacataccaaaagctcccacatgtagtaagccactccttgactgtctaatcctgttaggaaaaatgaagtctactttaggaggtgagagaaggacaggnnnnnnnnncaaaggaagcttggatgtcaacagtcctctctgccgcccacgtcctctctgtctctgcagctgtgtgcctccatggcagccaacttttttgtacaaagttggc

SEQ ID NO: 430719 - DNA, 1287 bp, Homo Sapiens
  misc_feature (238)..(246): n is a, c, g, or t
cccacgtttgcctccttttcctccctctgccacacgcgaattcagctaattggggtgtgtgggcagccacggcctggggaggtggccccctctctgtgctgccccacgttggactctaacagctgcccagcccgcatgtcacataccaaaagctcccacatgtagtaagccactccttgactgtctaatcctgttaggaaaaatgaagtctactttaggaggtgagagaaggacaggnnnnnnnnncaaaggaagcttggatgtcaacagtcctctctgccgcccacgtcctctctgtctctgcagctgtgtgcctccatggcagtgaccagcaaaagcgcaagggtgccgcagccacggcgaaaagaaagtccaagggtggaggggtgaacgtggagggacgtctgtgcacctggccccctgaagacccacgtgcgtctgggggcacattgcgggggaaggaacgtgatcttcacacagaaagggacagttttaaccgttttctgttttcatgttctcatttaactgttggccggaaattgccggtaggctgccgtggcctgaccctactacgtgcacaactccgcaggcattaggggaggggtcatctgctctaattaggtaacaggggcaagtgggattaaagttttaaggcggttatattaagaagctgaggacaggattccggaaccaggtgggttttcagcgtctagccatgggtgatccagagcgactatctcttcctcccagcttaaaaattttggaaagcgtgccctgggcatcgactcccttgaatcccttgtgagccgatttatagtcggacgctctgcctccgtagccaaatcctggtctctggccttcggccccccagctaaatctgctcagggacagtcctctcccctttccctgcgacgggggtggtgtgcgaggcgtcacaatgttcttgaagaagtggactacggggttttcatcttgggtccggccgtgtgacttctggggcagggagccgtagtgagcagttcttgccgggtggtgtgagtccttgccagagccccgcttgggcgcacccctgtcaccgccaaagaagcgcccgatggagtcaaggatgcccgtgtctctgtgccttgggaggaagccatgcctggcatggtccatggtacttgctgtggccaggtacttggatccgtgcctctgggagggtctcttctgtgacgccatcacatccaggctctcggaggtggctgcactgtcttttttggatggtctggagccaacttttttgtacaa

SEQ ID NO: 430720 - DNA, 1380 bp, Homo Sapiens
  misc_feature (341)..(349): n is a, c, g, or t
gccaccatgcagggcaacggtgacgtccagaggccacgtgcttgacatctccatcaccaaatctacagcaagaccctgtttcctatgtgaggccattgcccagcccacgtttgcttccttttcctccctctgccacacgcgaattcagctaattggggtgtgtgggcagccacggcctggggaggtggccccctctctgtgctgccccacgttggactctaacagctgcccagcccgcatgtcacataccaaaagctcccacatgtagtaagccactccttgactgtctaatcctgttaggaaaaatgaagtctactttaggaggtgagagaaggacaggnnnnnnnnncaaaggaagcttggatgtcaacagtcctctctgccgcccacgtcctctctgtctctgcagctgtgtgcctccatggcagtgaccagcaaaagcgcaagggtgccgcagccacggcgaaaagaaagtccaagggtggaggggtgaacgtggagggacgtctgtgcacctggccccctgaagacccacgtgcgtctgggggcacattgcgggggaaggaacgtgatcttcacacagaaagggacagttttaaccgttttctgttttcatgttctcatttaactgttggccggaaattgccggtaggctgccgtggcctgaccctactacgtgcacaactccgcaggcattaggggaggggtcatctgctctaattaggtaacaggggcaagtgggattaaagttttaaggcggttatattaagaagctgaggacaggattccggaaccaggtgggttttcagcgtctagccatgggtgatccagagcgactatctcttcctcccagcttaaaaattttggaaagcgtgccctgggcatcgactcccttgaatcccttgtgagccgatttatagtcggacgctctgcctccgtagccaaatcctggtctctggccttcggccccccagctaaatctgctcagggacagtcctctcccctttccctgcgacgggggtggtgtgcgaggcgtcacaatgttcttgaagaagtggactacggggttttcatcttgggtccggccgtgtgacttctggggcagggagccgtagtgagcagttcttgccgggtggtgtgagtccttgccagagccccgcttgggcgcacccctgtcaccgccaaagaagcgcccgatggagtcaaggatgcccgtgtctctgtgccttgggaggaagccatgcctggcatggtccatggtacttgctgtggccaggtacttggatccgtgcctctgggagggtctcttctgtgacgccatcacatccaggctctcggaggtggctgcactgtcttccaacttttttgtacaaagttggc

SEQ ID NO: 430721 - DNA, 1291 bp, Homo Sapiens
  misc_feature (285)..(293): n is a, c, g, or t
ccaaatctccaggaagaccctgtttcctatgtgaggccattgcccagcccacgtttgcctccttttcctccctctgccacacgcgaattcagctaattggggtgtgtgggcagccacggcctggggaggtggccccctctctgtgctgccccacgttggactctaacagctgcccagcccgcatgtcacataccaaaagctcccacatgtagtaagccactccttgactgtctaatcctgttaggaaaaatgaagtctactttaggaggtgagagaaggacaggnnnnnnnnncaaaggaagcttggatgtcaacagtcctctctgccgccgacgtcctctctgtctctgcagctgtgtgcctccatggcagtgaccagcaaaagcgcaagggtgccgcagccacggcgaaaagaaagtccaagggtggaggggtgaacgtggagggacgtctgtgcacctggccccctgaagacccacgtgcgtctgggggcacattgcgggggaaggaacgtgatcttcacacagaaagggacagttttaaccgttttctgttttcatgttctcatttaactgttggccggaaattgccggtaggctgccgtggcctgaccctactacgtgcacaactccgcaggcattaggggaggggtcatctgctctaattaggtaacaggggcaagtgggattaaagttttaaggcagttatattaagaagctgaggacaggattccggaaccaggtgggttttcagcgtctagccatgggtgatccagagcgactatctcttcctcccagcttaaaaattttggaaagcgtgccctgggcatcgactcccttgaatcccttgtgagccgatttatagtcggacgctctgcctccgtagccaaatcctggtctctggccttcggccccccagctaaatctgctcagggacagtcctctcccctttccctgcgacgggggtggtgtgcgaggcgtcacaatgttcttgaagaagtggactacggggttttcatcttgggtccggccgtgtgacttctggggcagggagccgtagtgagcagttcttgccgggtggtgtgagtccttgccagagccccgcttgggcgcacccctgtcaccgccaaagaagcgcccgatggagtcaaggatgcccgtgtctctgtgccttgggaggaagccatgcctggcatggtccatggtacttgctgtggccaggtacttggatccgtgcctctgggagggtctcttctgtgacgccatcacatccccaacttttttgtacaaag

SEQ ID NO: 430722 - DNA, 1404 bp, Homo Sapiens
  misc_feature (376)..(384): n is a, c, g, or t
ggtttggaaacgaggttgtcatagaggctgctttgggccaccagcagagcaacggtgacgtccaggaggccacatgctgacatctccatcaccaaatttcccaggaagaccttgtttcctatggaagcccattgcccagcccacgtttgcctccctttcctccctcgcccacacgggaattcagctattggggtgtgtgggcagccacggcctggggaggtggccctctctctgtgctgccccacgttggactataacagctgcccagcccgcatgtcacataccaaaagctcccacatgtagtaagccactccttgactgtttaatcctgttaggaaaaatgaagtctactttaggaggtgagagaaggacaggnnnnnnnnncaaaggaagcttggatgtcaacagtcctctctgccgcccacgtcctctctgtctctgcagctgtgtgcctccatggcagtgaccagcaaaagcgcaagggtgccgcagccacggcgaaaagaaagtccaagggtggaggggtgaacgtggagggacgtctgtgcacctggccccctgaagacccacgtgcgtctgggggcacattgcgggggaaggaacgtgatcttcacacagaaagggacagttttaaccgttttctgttttcatgttctcatttaactgttggccggaaattgccggtaggctgccgtggcctgaccctactacgtgcacaactccgcaggcattaggggaggggtcatctgctctaattaggtaacaggggcaagtgggattaaagttttaaggcggttatattaagaagctgaggacaggattccggaaccaggtgggttttcagcgtctagccatgggtgatccagagcgactatctcttcctcccagcttaaaaattttggaaagcgtgccctgggcatcgactcccttgaatcccttgtgagccgatttatagtcggacgctctgcctccgtagccaaatcctggtctctggccttcggcccccttcacgccagctaaatctgctcagggacagtcctctcccctttccctgcgacgggggtggtgtgcgaggcgtcacaatgttcttgaagaagtggactacggggttttcatcttgggtccggccgtgtgacttctggggcagggagccgtagtgagcagttcttgccgggtggtgtgagtccttgccagagccccgcttgggcgcacccctgtcaccgccaaagaagcgcccgatggagtcaaggatgcccgtgtctctgtgccttgggaggaagccatgcctggcatggtccatggtacttgctgtggccaggtacttggatccgtgcctctgggagggtctcttctgtgacgccatcacatccaggctctcggaggtggctgcactgtcttctccaa

SEQ ID NO: 430723 - DNA, 1034 bp, Homo Sapiens
  misc_feature (482)..(490): n is a, c, g, or t
cacgcccggtcacagccagtgttatgggcgactggcgcggctgcgaggctgtctagaggactcctacccttctgctctgagtgcgcaagtcttcctggactctccggctgtgggctgtggtttggaaacgaggttgttcatagaggctgctctggggccaccatgcagggcaacggtgacgtccagaggccacctgcttgacatctccatcaccaaatctccaggaagaccctgtttcctatgtgaggccattgcctccttttcctccctctgccacacgcgaattcagctaattggggtgtgtgggcagccacggcctggggaggtggccccctctctgtgctgccccacgttggactctaacagctgcccagcccgcatgtcacataccaaaagctcccacatgtagtaagccactccttgactgtctaatcctgttaggaaaaatgaagtctactttaggaggtgagagaaggacaggnnnnnnnnncaaaggaagcttggatgtcaacagtcctctctgccgcccacgtcctctctgtctctgcagctgtgtgcctccatggcagtgaccagcaaaagcgcaagggtgccgcagccacggcgaaaagaaagtccaagggtggaggggtgaacgtggagggacgtctgtgcacctggccccctgaagacccacgtgcgtctgggggcacattgcgggggaaggaacgtgatcttcacacagaaagggacagttttaaccgttttctgttttcatgttaccacttcccccctggcgccaaagcaccggttggcccctgggccctggcctttttaagggcccatgtgcgcccgcattgggggaggggtcatggcgcttccgcgggtaacagggacaattgagttgaaattagataggcagctatagcaagaaggccccgacccacggcccccccaccgggcgagcctccatgcatccgcggggggtccagcgatattgtcccaacttttttgtacaaagttggccttttattgaagcattgctcatcaatttg

SEQ ID NO: 430724 - DNA, 1224 bp, Homo Sapiens
  misc_feature (216)..(224): n is a, c, g, or t
tccctctgccacacgcgaattcagttaattggggtgtgtgggcagccacggcttggggaggtggccccctctctgtgctgccccacgtggactctaacagctgcccagcccgcatgtcacataccaaaagctcccacatgtagtaagccactccttgactgtctaatcctgttaggaaaaatgaagtctactttaggaggtgagagaaggacaggnnnnnnnnncaaaggaagcttggatgtcaacagtcctctctgccgcccacgtcctctctgtctctgcagctgtgtgcctccatggcagtgaccagcaaaagcgcaagggtgccgcagccacggcgaaaagaaagtccaagggtggaggggtgaacgtggagggacgtctgtgcacctggccccctgaagacccacgtgcgtctgggggcacattgcgggggaaggaacgtgatcttcacacagaaagggacagttttaaccgttttctgttttcatgttctcatttaactgttggccggaaattgccggtaggctgccgtggcctgaccctactacgtgcacaactccgcaggcattaggggaggggtcatctgctctaattaggtaacaggggcaagtgggattaaagttttaaggcggttatattaagaagctgaggacaggattccggaaccaggtgggttttcagcgtctagccatgggtgatccagagcgactatctcttcctcccagcttaaaaattttggaaagcgtgccctgggcatcgactcccttgaatcccttgtgagccgatttatagtcggacgctctgcctccgtagccaaatcctggtctctggccttcggccccccagctaaatctgctcagggacagtcctctcccctttccctgcgacgggggtggtgtgcgaggcgtcacaatgttcttgaagaagtggactacggggttttcatcttgggtccggccgtgtgacttctggggcagggagccgtagtgagcagttcttgccgggtggtgtgagtccttgccagagccccgcttgggcgcacccctgtcaccgccaaagaagcgcccgatggagtcaaggatgcccgtgtctctgtgccttgggaggaagccatgcctggcatggtccatggtacttgctgtggccaggtacttggatccgtgcctctgggagggtctcttcttcttatagcgcatcacatccaccaacttttttgtacaa

SEQ ID NO: 430725 - DNA, 914 bp, Homo Sapiens
  misc_feature (679)..(688): n is a, c, g, or t
tttgtacaaaaaagttggggaaaggggacaggactgtccctgagcagatttagctggggggccgaaggccagagaccaggatttggctacggaggcagagcgtccgactataaatcggctcacaagggattcaagggagtcgatgcccagggcacgctttccaaaatttttaagctgggaggaagagatagtcgctctggatcacccatggctagacgctgaaaacccacctggttccggaatcctgtcctcagcttcttaatataactgccttaaaactttaatcccacttgcccctgttacctaattagagcagatgacccctcccctaatgcctgcggagttgtgcacgtagtagggtcaggccacggcagcctaccggcaatttccggccaacagttaaatgagaacatgaaaacagaaaacggttaaaactgtccctttctgtgtgaagatcacgttccttcccccgcaatgtgcccccagacgcacgtgggtcttcagggggccaggtgcacagacgtccctccacgttcacccctccacccttggactttcttttcgccgtggctgcggcacccttgcgcttttgctggtcactgccatggaggcacacagctgcagagacagagaggacgtgggcggcagagaggactgttgacatccaagcttcctttgnnnnnnnnnncctgtccttctctcacctcctaaagtagacttcatttttcctaacaggattagacagtcaaggagtggcttactacatgtgggagcttttggtatgtgacatgcgggctgggcagctgttagagtccaacgtggggcagcacagagagggggccacctcccccaggccgtggctgcccacacaccccaattagctgaattcgcgtgtggcagagggaggaaaggag

SEQ ID NO: 430726 - DNA, 1533 bp, Homo Sapiens
  misc_feature (513)..(521): n is a, c, g, or t
cactgccgctgccagcacgcccggtcacagccagtgtctatgggcgtctggcgcggctgcgaggctgtctagaggactcctacccttctgctctgagtgcgcaagtcttcctggactctccggctgtgggctgtggtttggaaacgaggttgttcatagaggctgctctggggccaccatgcagggcaacggtgacgtccagaggccacctgcttgacatctccatcaccaaatctccaggaagaccctgtttcctatgtgaggccattgcccagcccacgtttgcctccttttcctccctctgccacacgcgaattcagctaattggggtgtgtgggcagccacggcctggggaggtggccccctctctgtgctgccccacgttggactctaacagctgcccagcccgcatgtcacataccaaaagctcccacatgtagtaagccactccttgactgtctaatcctgttaggaaaaatgaagtctactttaggaggtgagagaaggacaggnnnnnnnnncaaaggaagcttggatgtcaacagtcctctctgccgcccacgtcctctctgtctctgcagctgtgtgcctccatggcagtgaccagcaaaagcgcaagggtgccgcagccacggcgaaaagaaagtccaagggtggaggggtgaacgtggagggacgtctgtgcacctggccccctgaagacccacgtgcgtctgggggcacattgcgggggaaggaacgtgatcttcacacagaaagggacagttttaaccgttttctgttttcatgttctcatttaactgttggccggaaattgccggtaggctgccgtggcctgaccctactacgtgcacaactccgcagggcattagggggaggggtcatctgctctaattaggtaacaggggcaagtgggattaaagttttaaggcggttatattaagaagctgaggacaggattccggaaccaggtgggttttcagcgtctagccatgggtgatccagagcgactatctcttcctcccagcttaaaaattttggaaagcgtgccctgggcatcgactcccttgaatcccttgtgagccgatttatagtcggacgctctgcctccgtagccaaatcctggtctctggccttcggccccctttccctgggacgggggtggtgtgcgaggcgtcacaatgttcttgaagaagtggactacggggttttcatcttgggtccggccgtgtgacttctggggcagggagccgtagtgagcagttcttgccgggtggtgtgagtccttgccagagccccgcttgggcgcacccctgtcaccgccaaagaagcgcccgatggagtcaaggatgcccgtgtctctgtgccttgggaggaagccatgcctggcatggtccatggtacttgctgtggccaggtacttggatccgtgcctctgggagggtctcttctgtgacgccatcacatccaggctctcggaggtggctgcactgtcttcttgggtggtctggagcccaacttttttgtacaaag

SEQ ID NO: 430727 - DNA, 1223 bp, Homo Sapiens
  misc_feature (229)..(237): n is a, c, g, or t
gcctccttttcctccctctgccacacgcgaaatcagctaattggggtgtgtgggcagccacggcctggggaggtggccccctctctgtgctgccccacgttggactctaacagctgcccagcccgcatgtcacataccaaaagctcccacatgtagtaagccactccttgactgtctaatcctgttaggaaaaatgaagtctactttaggaggtgagagaaggacaggnnnnnnnnncaaaggaagcttggatgtcaacagtcctctctgccgcccacgtcctctctgtctctgcagctgtgtgcctccatggcagtgaccagcaaaagcgcaagggtgccgcagccacggcgaaaagaaagtccaagggtggaggggtgaacgtggagggacgtctgtgcacctggccccctgaagacccacgtgcgtctgggggcacattgcgggggaaggaacgtgatcttcacacagaaagggacagttttaaccgttttctgttttcatgttctcatttaactgttggccggaaattgccggtaggctgccgtggcctgaccctactacgtgcacaactccgcaggcattaggggaggggtcatctgctctaattaggtaacaggggcaagtgggattaaagttttaaggcggttatattaagaagctgaggacaggattccggaaccaggtgggttttcagcgtctagccatgggtgatccagagcgactatctcttcctcccagcttaaaaattttggaaagcgtgccctgggcatcgactcccttgaatcccttgtgagccgatttatagtcggacgctctgcctccgtagccaaatcctggtctctggccttcggccccctttccctgcgacgggggtggtgtgcgaggcgtcacaatgttcttgaagaagtggactacggggttttcatcttgggtccggccgtgtgacttctggggcagggagccgtagtgagcagttcttgccgggtggtgtgagtccttgccagagccccgcttgggcgcacccctgtcaccgccaaagaagcgcccgatggagtcaaggatgcccgtgtctctgtgccttgggaggaagccatgcctggcatggtccatggtacttgctgtggccaggtacttggatccgtgcctctgggagggtctcttctgtgacgccatcgacatcccctatgtgctatcgtcgaggtggcccaacttttttgtac

SEQ ID NO: 430728 - DNA, 816 bp, Homo Sapiens
cagctgggacaggtatcggtttgtcacctcagggggcttgcccaggtgctgggacaggacgatgaggttgaccagcgtctccgggtagccactatccttgtctagcgcctctgcagcaggccctcagcggcctcccagcggccatgggccatgtggcaggccgcctgcccattgagcagcagcagggtgggcgagcacttgtcagccatctcctggaagatgtagtaggcatcctgcagcttctcaccacccgtggccaggctgacccaggcagtggcgagctgggtgagggtggcatcctcgtccaggtcctgcattctcttcagctccttccgggcgaggtccaggcggtccagcttcagcaggatctgcactgtcatggctgtgcactccaggctgtccccctggtgcagcgcacgcagggcggcatccgggttctggtcgtggagatagatggaggcggccatgagcaggaaggtggtgttggtcacgtccacgctcctgctcatctctcggtccagctcggccacgatgctgtccctccgactctcgtgggcgaggtagtcagcaaacatgcgcacggcctggagctcaggggccgaggagggcttgatctcatccaggaccacaccgaacttcctctgcgccaggtacgctctatacaggaagacgtccctctccacgtctctctctgggcttgacagcttcacccgctgcgcctcgtttatgcactgctggtagctgccgatgtagaaggcgttctttacgtcgaacagctcgtctacctccccggagccgccggaggccgggccccaa

SEQ ID NO: 430729 - DNA, 989 bp, Homo Sapiens
cagggggacgtggccgggtcaccggcttccagcagcaggtcagggctgtcgaagcggctgcagtcggccaccatcaccgtgcggacggtgctggcattgaggttctggatcttgaacagccgcttcaccacgttgacgttctctgactccacatcctggaaggcattgttgagccacagcaccgagcaggaggtgatatctccgatgcggtgcaggttccccgagatgaggctggtctcggtgagccaacagccaaacacgtcatagggcttgttccgcacgcgggacagcagcgcgaaggagtctaggctgatgacagcaatctcgccggatgaggagttgtgcggccccaggaacacccccgaggccagcagtagcgagtcgtccttgttgaactgggagaactgggtgtagctccagttgtagggccgcatgtccgcgctgtgcagcagcgagatggtcaggtcgttgctccagatcttcacagtgcagtccttggagcaggacgcgaactggtacccggaatgggagaagctgaggtgcaggacctggtctgtgtgttcccgcagcgtctgcacctccacgcagggcaccgtgtcatacagccgctggaactcctcgtaccaggacatggccgctgggtgtcggggcacgtcgcgggccacctggtagtagcggtagaactgctccctccacaggaactcgtcccgcgacacggcctgccattggcggcacaccagcccggcggccagcacgtcggccgggcccaggctcaggaagatctggtagaccaggctgtcggggagcaggggcgtgccgccctcgtccatcgtgacattctgcccaggcggcccacggccgcctccgcccgctgcgccgcccccgccctgcgcgacccggacccgcttccgctgccgcagccgctcggaccgccgcccccgcccaacggggagcccgccaggcccgacgccacgagccccgaggcccaa

SEQ ID NO: 430730 - DNA, 837 bp, Homo Sapiens
ttggggcgtggactgcagcacaggcctccgcaccacggggaagctgaacctggtggacttggctggctcggagcgcgtgggcaagtcgggggccgagggcagccgcctgcgggaggcgcagcacatcaacaagtcgctgtcggctctgggggacgtcattgctgccctgcgctcccgccagggccacgtgcccttccgcaactccaagctcacctacctgctgcaggattcgcttagtggtgacagcaagaccctcatggtggtacaggtgtcccccgtggagaagaacactagcgagacgctctattccctcaagtttgctgagagggtgcgctctgtggagctggggcctgggctacgcagggcagagcttgggtcctggtcaagccaggagcatctagagtgggagccggcttgtcagacgccacagccctcggcacgggcccactcagcccccagctctgggaccagtagccgccctggatccatccggaggaagctgcagccctcggcctgacggctggggctgcagagtctctagggaagtcgcggccactgcctgtgtgacggatgtgaccccgctgggcctgaagctgggccctcactggcctgtccctgctgcagcgccaggacccccggaggtagaggcgagagtggaggctcttcttctgccccgtctcccctcaaagatgagaaacatgttcagaaggaaacggtgtctctcggctgtggctctgagtgcaaattgcatgggcggaaaggcgggggtggctgctcttcctggcagcctgggccatcagcgaactgggccccgtgaggagggcgggagtgtggagg

SEQ ID NO: 430731 - DNA, 471 bp, Homo Sapiens
gtccatgaggcattttatttgtaaatatatgtattacatccctagaaaaagaatcccaggattttccctcctgtgtgttttcgtcttgcttcttcatggtccatgatgccagctgaggttgtcagtacaatgaaaccaaactggcgggatggaagcagattattctgccatttttccaggtctttgagttgcacgtcaaatctggggctgatcaccccacacttgtttagcctgcctgtgaggttcacaacaattttcccagctctgtggtcatcaatgatttcaaattcgccaatgtaaccatgcttcatcatcacagtgagaaaccggacgatgactttggagcacggcctaataagcacctggcgtttgcctctcttttcggcattgttgatactcttgagagcatctgccaggacattcatgcgcaccattgtggcggcgcggaaagccaacttttttgtacaaagt

SEQ ID NO: 430732 - DNA, 637 bp, Homo Sapiens
  misc_feature (66)..(82): n is a, c, g, or t
cctgcctcaggtttatttgtacaaatagcacaggaggaccccagccccatgcagatggtagcccannnnnnnnnnnnnnnnntcgcaccagtccttctgtcctcatgttggcagagatatctactctgaagcctttgtaggggcctgggtacgtttgggagcctgagctggaactgaagctggggctgcagcctgggccttggtttgatccttggccttggccttggccttggcctttggccggcacagcctgagccccttggcaatacgggcacgagcacgcttcccaagcttggggtgggcaatgtaggcaagtagatcgagcttgcggctgacaccctttgggatcttgggcttaacctccttgggctttacgagggccttgatagcctcggcacgtgcactcatggccttggcattgttggcctgcatcttctttaggccctttttgttgtgcttcttggcaaagcgcatgttcctcaggaacttggggtccacccccttaagagattcgtatctttgtgatcggggtttcttgataccatttctgtgccattttcgggactggttgtgtgtggtgtggttcttggacttggccatgtctgcaccataagccgcggctcccgaagcgccccaa

SEQ ID NO: 430733 - DNA, 523 bp, Homo Sapiens
ataatccaatctttatttaaaaatctaatctgccagtttagcgttttccaccaactcggggagctgaaactttcacaggcttcacaatcttttgcttaggtgctgcctttgtaggtgccttagcagcagccattgcagtctttttagatgcttgcttagccttttttgcttccttagcagccctgatagcttgttctcgttgagcctttctaacttcaggtttctgattcctcttggccattatatcagcaagagatgcaccagtaatggccctctggaatttgactgctcggcgggttcttttcttttgaatttcttccgactgtccctttttgtgcttccttctgtagaggacagtccagtttatctgccgaggattcctcttggaaaggaaagccgactcgcatttcgcattaagaaactggaaaaccttcccgtcggtcctggcgtagcgcctcccgtgtccggggtagatcttgtacccgctaaaactgcacagctcgaccttcatggcgacagccaa

SEQ ID NO: 430734 - DNA, 484 bp, Homo Sapiens
  misc_feature (212)..(224): n is a, c, g, or t
ccatgacaacaattaatttatttattgagggtgaggcagggaagcggggagggagggtaggggtgacctctcttcctcacaggcaccaggccttgtttctctcccagataagctaaggtcggcaggggctgaggggagtgaggcagggaggatgcatggggcctgtgggaatcagagagaagctggggtcagaggtaggagctgacgctgtnnnnnnnnnnnnntgaaaggtgaggcaaggtcaaaggtgaactgcagctcggagggaggggtccaatataaaccaggacttgcaggtgtagaagtaaaatgggactcatagagggtgaaagagaagttggagtcagaggggattcagagatcaaagagaagttggggtcagaggtaggagctggggctcaggtggggggttaaaggtgaggcaaggtcagcggtgaagtgcagctcagagggaggggtcaaacccaacttttttgtacaaagt

SEQ ID NO: 430735 - DNA, 544 bp, Homo Sapiens
gaaactttaaaatccctcaaaaactgtttattatacaagtgagttttgagtcacgatgggcttatcggtaggatttctggtagcgagcgcgggcaccagggcctccaaactttttggactcgcagcgacgagggtcagctaccagcagggtccggtcatactggatgaggatgtctttgatctccttcttggaagcctcatccacatatttctggtaataggccaccagggctttggagatggactgacggatagcataaatctgggccacgtgaccaccaccctttacacggacacggatgtctacaccagcaaatcgctccttgccgagaagcagaactggctccagcagcttgtactgtagcgtgcgcggctcaatcatctccaggggccgcccgttcaccttgatgagaccattgccgcgtttgcagtgcgccacagctgtcgctgtcttcttgcgtccgaagacctgcaccgactgcagcggacccttggacggcatggctccgagcgtggactagacaacctcaccgcgcggcgccaa

SEQ ID NO: 430736 - DNA, 723 bp, Homo Sapiens
ccaggggtaatcacaattaagtttttattgtatctgctgagatactttccatacacacgtaagcatatacatatatacacacacacacattattgtacacttaatttatgtccttaatacattctgaagcactttccatatcagcacgttgagatctagctcattggtttaaacatctgcatgtttcattttatgattatacaaaaaaatttttcagcagttccctattgatggatatttacatatttttgttttgtctgacatgacaaacattgcaaatgtacatcctttgtctcatgatgaatcatgccttgagtctcactcatatctgatttagatgagactttggactttgactttaaagttgatgctggaacaagttaagactttttaggggctattgggatggaatgaatttattttgcatgtgaggacatgaatctggggagcccaaggtgtggaatgctatgttttgaatgtgttgtctccacaattcatgtgttggaaacttaatcccaatgcaacagggttgggaggcggagccttctgggagatgattaggtcacaaggactctggcctcatatttgattgatgccattataaaaagggtttgcgggagcatgttagctctcccttgcccttccatcttctgccatgggaggacagcaagaaggcccttcccagatgctggcacctgatcatggccaacttttttgtacaaa

SEQ ID NO: 430737 - DNA, 382 bp, Homo Sapiens
ccgtcttctccttggcagctttgggtttgacatctgtggcttgcttctcagccacctcggctttcactggagatggctcttctttgctgggaacctccttttcagtcactgaaggtttggtctctgtttttactggcttgtcttttttcaccattaccttttctttgctttcaactttgggtggcttttccacgtgattcacttttgtgacctcaggggtttcttcttttgactccttgcgcacggatttgctaggaagtggttttgcggctggcttcagactttctcggctatcagccctctgtttcagttttgtttgtttcaccacaggagtgggcacctggccagtgagatccttttgggtggccagtggctgctccaa

SEQ ID NO: 430738 - DNA, 883 bp, Homo Sapiens
agctgcatcaaaaagctttatttccatttggtccaaggcttgttaggatagttaagaaagctgcctattggctggagggagaggcttaggcagaagccctattactttgcaaggggcccttcagaagtcgctgggctcagaaggctcttagtcgtgcttgagagtgagcctttcgaagagatactcgcccagcccagcctccgggccacccagcctgtggaggttggtcaggtggtcacccatcttcttgataagcttcacttcctcatctaggaagtgagtctccaggaagtcacagagatgggggtccgtgcgggcagaacccagggcatgaagatccaaaagggcctggttcagctttttctccagggccatggcagctttcatggcgtctggggttttaccccactcatcttcagctggcttcttgatgtcctggaagagagcgcggccgccacgctggttttgcatcttcaggagacgctcgtagccctcgcgcttctcctcggccaattcgcggaagaagtggctcacgccttccagagccacatcatcgcggtcgaaatagaagcccagagagaggtaggtgtaggaggcctgcaggtacaaattgaccaggctgttgacggctgcctccacgtcggtggaataattctgacgaatctgggagctcatggttggttggcaagaaggagctaaccacaaaaacggtgctggcaggtcccagaagcaggagatggccgagaagatggtcccggaggttgcaagcggagaggaaatcggagggcggtcggaggctggaagagagtccccggatctgttccgtccaaacactgttgaagcaagagacagacccgcgggaccccaacttttttgtacaaag

SEQ ID NO: 430739 - DNA, 640 bp, Homo Sapiens
agccatgcaacaatgtcttttattatgtatgcggttttaaaattatttcttgaatctctccatacacaggcaaaaataagtgtgttacttaacatactggaaattgcctaacttaatcattgcctaaagaagagaaaattatccccaaaacgtgcttaaccaggaggccaatgcatttgccgacctccaagaacatggagatgaacgtgatagacagactgtccaccatctgaaccttcattcaccaccattcgataacccttattcaggcccagatcagcagcacatttcttgccaacaatcattaagtgtccaagaagactttcatcatcatcttctgccacagaaatctgggatatatgtttcttgggtatcaccagaaaatgtgttggtgcttgaggggaaatgtcatggaaagcaaggcaccggtcatcctcaaaaatgattttggctggtatttccttgcggatgatcttcccaaagatcgtgtcgccaccaggccgagcgacctgagccttggcaatctcatctgccatctcggcctctctcccgcgcggcggccagaggagaggctcggaagaagggaggaacccgcagagcgtgcggcgcgagagggcgcagccaagcctgcgcaggccaa

SEQ ID NO: 430740 - DNA, 504 bp, Homo Sapiens
ggcatatgaaaatttattactacagtgttttcaccattaatatttatgatcttggtctttccttcttgcctttgtatagggccaaaagagaaacattggctactttgacaaccttaaagcggactccaggaatatcaccaacagcatgacctttgcgaccaaatccagcaaccagaacttcatcattttcctcaataaagttcaagcaaccgtcattgggtacaaaggctgtgattttcttgccattcttgatcagctggacccttacacacttcctaatggcagaatttggctgtttggcttcaactcctactttttccagcacgattccttttgcatgagaagcacctccaaaagggttggcctttagggctgtgcccaaatgagctttcttatactgtttatcatgccacttctggtctcgtcggtgactacggagcttcctagcagtacgaagtccacgacacttgcccatcctgtcggcgccccaacttttttgtacaa

SEQ ID NO: 430741 - DNA, 477 bp, Homo Sapiens
ggagtcatgtgcgcctttattagctgagccattacttgagagggatgaagcgggaggagtgggtggccccgatgccgggccggccatgctttacgggcttgtaggtgatggagaactcgcccaggtagtggccgatcatctcgggcttgatctccacctggttgaaggtcttgccgttgtagacgcccaccatgctgcccaccatctcgggtaggatgatcatgtcccgcaggtgcgtcttcaccacttccggcttctccatgggcggcgcctccttcttggccttgcgcaggcgcttcagcagggagtgctgcttccgccgcaggccccggttcagccgccgccgctggcgcgcactgtacagctgcatcagctgctcgtaggacatgtccagcagctggtcgaggtccacgccgcggtaggtgaacttgcggaaggtccgcttcttcttctgctctacttctgccatcttgccaa

SEQ ID NO: 430742 - DNA, 517 bp, Homo Sapiens
atagccaactttgtacaaaaaagttggccgaaagcgaagaaggaagctcctgcccctcctaaagctgaagccaaagcgaaggctttaaaggccaagaaggcagtgttgaaaggtgtccacagccacaaaaagaagaagatccgcacgtcacccaccttccggcggccgaagacactgcgactccggagacagcccaaatatcctcggaagagcgctcccaggagaaacaagcttgaccactatgctatcatcaagtttccgctgaccactgagtctgccatgaagaagatagaagacaacaacacacttgtgttcattgtggatgttaaagccaacaagcaccagattaaacaggctgtgaagaagctgtatgacattgatgtggccaaggtcaacaccctgattcggcctgatggagagaagaaggcatatgttcgactggctcctgattacgatgctttggatgttgccaacaaaattgggatcatctaaactgagtccagctgcctaattctga

SEQ ID NO: 430743 - DNA, 879 bp, Homo Sapiens
ttggagacgctggcgctgagcaacctgaggcctgcagactccgactgggcccctgggcgggcgggacggaccgcggccaaggcgggggcgctggacggtggcggcatggaggacgacgaggaggagaccaccgcgtccacgctgcggggcaagcccaggccgccgcccgtctcggcgcagtccgccttcagctacatcccgccgcggcgcctggaccccaaagagcacagctactactaccgcccggcgcggacaggaattatttccctctatgattgtatttttaagaggcgcctagattatgatcacaagttgcaccgagatgacagagaacatgcaaaaagcctgggacttcatgttaacgaagaggaacaggagaggccggttggagtgctgacgtcttctgtctatgggaagcgcatcaatcagcccattgagcccctaaaccgggactttggccgtgccaaccatgtgcaggctgacttctacaggaagaacgacatccccagcctcaaggaacccggctttgggcacattgctccatcctgaagcatccccgtggcccacagggcatgtccgataccctgtggcctggcaagtttgcacagcgagaaggtggcatctggagcctcctttccccttctcatgacgcctaggagcttggctatgcctgtgttgcatctctacagtgggacacatgaacacgttagcagcccccctcaggttgctgggttaggagcctgaccaacaacacctttagtacatgtgaagagtctctgatgtgatgattttcagctggaattatttttgatcaaatgaatctggagaccgattcattgtgagcacctgaataaaatgaaaactttgtttccccttggt

SEQ ID NO: 430744 - DNA, 730 bp, Homo Sapiens
  misc_feature (24)..(34): n is a, c, g, or t
tgtacaagaaagttgggttttccnnnnnnnnnnnctttaacacagcactgagttttattagggatttcattaaggttaaatttctaggaatgagggagtcctagttagaggacccaaaagcccacgaagcctcctcagatctcatagtgaaccacccgctctggttctttggagggatcaccgcctcgttccaggtacagattattgtaaggatactgctttggtcccacaggctggtagacagggtacacgtcccccacccagcacatgaatatcatgaaagccaggaaaccgaagagctgcatacacatgacatgccaagaaacaggtgtgggggatgtatccacacggttcctgttgtacatgtctaggtgccagtgcatcggttcaccccagttcaacctcaggcccggctggtcccagctataccatggatctctctcatgctgtgagcggtcagggagcttcgggtagtcgccataccccatgccatcatccgggtaaggttcgtagtcttccacacgcatattatacttcttggcggcggcggcccgttcttctggggtcctaggatagggccccgggaacatgtccttggtcatgtgggaggctgtccgtgcgcccagcggcatcacgttccgggatgccctttgcagccactggactcccaagaccccggccctggccaccgctcttgatgtgcccttcttcccaacttttttgtacaaag

SEQ ID NO: 430745 - DNA, 602 bp, Homo Sapiens
gttgctgaatgatattttattagcttgataatttgggcctgcccttagcattaataagcttcagcactagtcacaagactttcattcactggtggggaaactttcttgttttaaaaaatgcaattcaagaaagggcatctatttcttgggggctgcggtgacagcaggcttctcttcacgggtgatgggaatggtgcgctcagggccagagacctgtttccttggtccattcacagtgaggaccccatcagatgacagggatgaagtaatggtgagagggtctacatcagctgggatccggtatttcctgtggaactccctggagatgaaaccatgttcatcctggcgctcttcatgttttccatgcacctcaatcacatctcccaacaccttaactttgagttcctctggggagaagtgcttcacatccaggttgacagagaacctgtccttctccaggcgcatctctgagagtccagtgtcaaaccagctgggtgcccgcaggaaggagggtggccgaaggtagaagggactcagggaagtagacgtcgggaggagacgagcacttctcgatcgtccaacaggtgccaacttttttgtac

SEQ ID NO: 430746 - DNA, 710 bp, Homo Sapiens
ctgttgctgaatgatatttttattagcttgataatttgggcctgcccttagcattaataagcttcagcactagtcacaagactttcattcactggtggggaaactttcttgttttaaaaaatgcaattcaagaaagggcatctatttcttgggggctgcggtgacagcaggcttctcttcacgggtgatgggaatggtgcgctcagggccagagacctgtttccttggtccattcacagtgaggaccccatcagatgacagggatgaagtaatggtgagagggtctacatcagctgggatccggtatttcctgtggaactccctggagatgaaaccatgttcatcctggcgctcttcatgttttccatgcacctcaatcacatctcccaacaccttaactttgagttcctctggggagaagtgcttcacatccaggttgacagagaacctgtccttctccaggcgcatctctgagagtccagtgtcaaaccagctgggtgcccgcaggaaggagggtggccgaaggtagaagggactcagggaagtagacgtcgggaaaagatcagactccaacaggtgctctccgaagaactggtcaaagaggcggctgggggagtggaaaggaaagaaggggcggcggatccaggggtggtggatggcgatgtccatggtggctaggtgagtgtgaggggtcagctggctggtcccaa

SEQ ID NO: 430747 - DNA, 541 bp, Homo Sapiens
aggtatataaactatttattaacagacaaggcctacagacttatttcttcttggacacacccacggtgcggccacggcggccagtggtcttggtgtgctggcctcggacacgaaggccccagaagtgacgcagccctctatgggcccgaatcttcttcagtcgctccaggtcttcacggagcttgttgtccagaccattggctaggacctggctgtattttccatcctttacatccttctgtctgttcaagaaccagtctgggatcttgtactggcgtggattctgcataatggtgatcacacgttccacctcatcctcagtgagttctcccgccctcttggtgaggtcaatgtctgctttcctcaacaccacatgagcatatcttcggcccacacccttaatggcagtgatggcaaaggctattttccgccgcccatcgatgttggtgttgagtactcgcaaaatatgctggaacttttcagggatcactagagacatggctgctttttcaagggcggcggcccaacttttttgtacaaa

SEQ ID NO: 430748 - DNA, 1013 bp, Homo Sapiens
cacacaagtatgtatcttatgtgtgcagtattggaaaccaatggtgtagtgctcctacacataaatggggtcaagtgacatcacaaattaaaagggggaaagagaaatattctagttaatcagatgcaagaagcaaacaagacgcaaaaactgtgcaaataagaccaagccagtaactttagttacgacactgcagattacactggaataacaggtttgtgaggctatagtgtgcaccacattaaaacagcaagaaagagctatttatatagaaaggctggaatgagggatttttactaaagcaaattaacttcttgtcaactgccaaaacaaaacaaaactgagcatatgagtgttagtatactgaaggcatgttataccagtttctgtgcagcatgctaaaagttagaacttcttcactggtgcttatcaatcattaatagtcacgtttttgccccttcttgccaaatttcaggcatgtcttattttagatggagtatagcttttatctattatttcatcttgtaaaaacatgtgaagacaacgttcgttctgtgccagaggatgaccagcgaccttgtttataaactgctccagcccttgttttctttcctcaataaaattgtcatcaaatattccatcatctcctctaaaaggaagctgacgcaaaaacgctttcccagggagcgggggaactacgaccttgctctctctttctaattcacttcgcagccattcaaagtcactgtatcttcttctaacagtagattctttcagcttgaaaataggaagatttgtcttgaccctgatttcgtaagtggtgaagcggccccggccgacccccaccgtttgcgggttgctcacatcgatctcgaggaagttgctggggggtccgtaggcgtcattcaggttctgcggcttggtgatcagccgccgggtgtcagccacggtctccgccatttcgctgtagctgctgccgccgccgcgggctccctccgccccctccgcgccaa

SEQ ID NO: 430749 - DNA, 925 bp, Homo Sapiens
aattcactttatttttctagtataaaaaccctatgttgtagccacagctggagcttgagtccgctgcacggagactctggtgtgggtctgacgaggtggtcagtgaactctgatagggagacttggtgaatacagtctccttccagaggtcgggggtcaggtagctgtaggtcttagaaatggcatcaaaggtggccttggcgaagttgcccagggtggcagtgcagccccgggctgaggtgtagcagtcatcgataccagccatcatgagcagcttcttaggcacaggtgcggagacgatgccagtgcccctgggtgcagggatgaggcgtaccagcacagagccgcagcggcctgtcaccttgcaagggacagtgtggggcttgccgatcttgttcccccagtagcctctgcgcacggggacgatggagagcttggccaggatgatggccccacggatggcggtggccacctccttggagcacttaacacccagaccgacgtggccattgtagtccccgatagcaacaaatgccttgaacctggtgcgctggccggcacgggtctgcttctgcactggcataatcttcaaaacctcatccttgagagaggcccccaggaagaaatcaatgatctctgattccttaatgggcagggagaagagatagatctcctccagggacttgatcttcatgtccttgaccaagcggcccaacttggtgacgggcatccactccttatcctcggccttgcctccgcgagctccgcggcctcggccccggccccgtccacggccgcgaccccggccccggatgccactgccgaaacctccgcggaagccaccgcggttccccatcccagggccaccagggcccccgggcccccccgctgcaccggcgtcatccgccatttggtgtccaaccaa

SEQ ID NO: 430750 - DNA, 1587 bp, Homo Sapiens
gcaggaatagtttaggttctcaatttgagatggccaaagagaagacagaattctccaggagaagagcaagacatgggagacaaatacagaataaagcacaaactgatcacacaacagaaaaggaggagtgtacagggtctgggaatcaagactgcaggttgacattatctaccagccagaagcaaaaagacacagagggatcaagtccatctgctggtctgcctctcacccctggccagggactggaggtggatgtgggcccatcccgggagggctgccagacccagtggggcagactggaatgccttttcctgctgttcccaccacctgatgccctatagctcgaaaaaccactgaagtctagtgtgcgactttgaaagattgtaatatatgctctggaaaacattcagcagtacgaaagccctccctgggccctcccaccctctcatggtccacaactggtagaaaggtccagaaatccttgagctctggaaaggtccctggtcagtccttggggagctcagatagctatattggaagaacctgctcaagtacggttcttgatgtctggggaatcctttcggggaagatcacttcaaactcaataatgaggtccccacgtttctcgggtgttttggggagggggaggccttctccaggaacttttcgccgcatgccaggcctgataacatctttgaatacgacgggtatcgtcctgccgtccagagtggggacgttcactgtgcagccacacagagcctcccggaggctgatcctggcaggataaatgacatcagagccatctctcttaaagatattgtggggcttgtcctttaaaacaaagacgatatcagctggaatgttgttggaggtctggtctccttccttggggaaagtgattttggttccttctttccaccccttcttcacttcgatggtcaatattttgtcttcgtttcgaatgctctttccgtcggggtttagccgcttgtgggagattttcatcttcttggtacagccgctgtagatctcttcaagggagactcgaaggtcgtgggtgactgggggatcttgcttctttcgggcgggctcttgggcagagcgggagcggccaaagttcacgttggtgaagccacccatgcccatagggaagccagagaatgggtcatcaatgtccatgccttcctccccgttccgctgcccaaaaaaggtgtcaaagggatttctgccaccgaagaactcagcaaacatggcatgagggtctccatggaatgtgtagctgaaagaggtaccattggcaccaccgccgctaccgccactggggccactcccctttaggccttcctccccgtagcggtcgaagatctcgcgcttgcgcgggtcgctgagcacgtcgtaggcctcagcgatctccttgaacttctcctcggcgccgggctccttgttcttgtccgggtggtagcgcagcgcctggcggcggtaggcccgcttgatctcctcgtccgacgcgccgcgggccaggcccaacgtctggtagtagtctttacccatgaccccctcctgcggcccgccgacccgctgtcccaa

SEQ ID NO: 430751 - DNA, 939 bp, Homo Sapiens
ttcatcatttccacccaaagatttcacagactgaagagcactatcaaaacttgcagtaattctctactttcctgcacatctctagtggaaagcgtaagaagcataagattagcataggccagcagtaagtctgtattggttgctcgccagtcacttttatcagactccaaacactgtaaagactccagatattccttaagggtctgtacaacacacgaattccattctaaacttgaacgcaaagctatgttcctctctgcctcatggcagtgggccacagcatccttcaatcttttagttgagcgatacacctccactagccggatgttcacatggacgtcatcaggtcttacataaagttctgactgaatcaagtcaaaaagtttattccatccatcttcaccttcacaatctagaagctgttcctttagtttataaattgcaggacttcctgggaaaagtttggctgctctttcaagccagtattttgctcttccatcagtaacatcatttttacaaagcaattctgcaatcttcaacacaagatctttttgtgttgggtttaattccactgaacgcctgtaacattcaacggctttgtctgtgttttcttccaattcataaagaagacccagaaatctgtgagctttgggatccctctcttgcacattaatgtaagtacatatgtattttttagcaagatcatattctttagcttcataatacagctttgcaaaatagaatcctttcattgacttctgtcgaggcgacggggtggagccctgcaccgaggcgatgtaccgctccacgtcagccttgctgcgcctcatcgcgccgccaacctggctcccgaggcgcgtgagaccagcgctcaggcccgcagcagtcgccacttccaagaggaaagcgcctgcaccaacttttttgtacaaagttggc

SEQ ID NO: 430752 - DNA, 958 bp, Homo Sapiens
aaagcttcatgtgcatttcgacagatttacttccgtgtaacgtgactggagcaaaggtgaccaccataccgggtttgagaacaccagtctccactcggccaacaggaacagtaccaataccaccaattttgtagacatcctggagaggcaggcgcaagggcttgtcagttggacgagttggtggtaggatgcagtccagagcctcaagcagcgtggttccactggcattgccatccttacgggtgactttccatcccttgaaccaaggcatgttagcacttggctccagcatgttgtcaccattccaaccagaaattggcacaaatgctactgtgtcggggttgtagccaattttcttaatgtaagtgctgacttccttaacaatttcctcatatctcttctggctgtagggtggctcagtggaatccattttgttaacaccgacaattagttgtttcacacccagtgtgtaagccagaagggcatgctctcgggtctgcccattcttggagataccagcttcaaattcaccaacaccagcagcaacaatcaggacagcacagtcagcctgagatgtccctgtaatcatgtttttgataaagtctctgtgtcctggggcatcaatgatagtcacatagtacttgctggtctcaaatttccacaaggagatatcaatggtgataccacgttcacgctcagctttcagtttatccaagacccaggcatacttgaaggagccctttcccatctcagcagcctccttctcaaatttttcaatggttcttttgtcgatgccaccgcatttatagatcagatggccagtagtggtggacttgcccgaatctacgtgtccaatgacgacaatgttgatatgagtcttttcctttcccattttggcttttaggggtagttttcacgacacctgtgttctggcggcaaacccgccaacttttttgta

SEQ ID NO: 430753 - DNA, 689 bp, Homo Sapiens
  misc_feature (442)..(493): n is a, c, g, or t
actcaaagttaacctacctgtaactttttaaaaacttgtaaaataactgaccctcccttcctgtccgccctcttcccctctaatgctcacgctcccaacacaaggggggcagggaggcaccattcaggaacctggaccaaagctgaaaaggctgggccaagccagggatggggccacagccaaaaccccgagccctacttccaggttctggttagctcagccccagcccaacccagctgctctgcccaaagctgggtgagtggggagacacctcaaaaccccccaaaacccactgaccggaggcaaaaggcagtggggctgggggtagttttccatggtcacaaaaaactagtggtggctctgaaaaggggaggacctctgggctttgattccatctccttgtcttttttctttgtttttaaaaacagggtcctgctatttnnnnnnnnnnnnnnnnnnnnnnnnnnnnnnnnnnnnnnnnnnnnnnnnnnnntgggctcaagcaatcctcctgaatgatcccatttcttaatcagtgtagccccaagaaggctggggctatttaccagggtaaaaaaaagagcttacctcccacctttggtcctaagtccctgccccctccccttcacaccataactaggtaacagtttgataactaggggagaaagcagaacagttaagcagccccc

SEQ ID NO: 430754 - DNA, 787 bp, Homo Sapiens
aatttgagagcaggtactgtttattaaccaaccagcttagaaaaataatcatggtagacactttagttcattcttctaataagcctgttgatctggtcctccctgttgccagcatctccaccttctacaaaatgggtggtctttttcttcattccacctcgtggagaagacaatttgaagggccacaggaagttatttgcctctttgaagcgttttccaacagtatagatctcatgaatcaaatcctccatgcagatgatgccgtatttaccaagagatcgagcaatcaaagcgttatctgtcaaagcaattcgcttcttattgattttgccataaccacgcttgtagattagttcatttactgacttcagattggggtacccccatgcaatatatggctctacaatcctcagcatgttaatcgaagccttgttgagcttcacaaaggttccattgaagatttgacgaaggcgaagaagctgcaacacctttcgaacctttgggctcactccattgatacctctgattctgatgacaaacgccaatttgggttctgcaggtacatagaagttgccagcttttcttgccatcctcgccattcgaatttcagttctgtacatctgcctatattccttgtgatagtgctttgctttttcatagataagcttcctccttgcctttcgaagcatcttttgggcaaacttctttctcaggcgcttgatcttcagctctgcgaaattccttcgctttttcttaagggtttctggcacagcaggaacctccccaa

SEQ ID NO: 430755 - DNA, 841 bp, Homo Sapiens
  misc_feature (220)..(241): n is a, c, g, or t
aaaaactggccagcccaaacagtgtataatcattagcaaatggaactttaaggagtcttatcattaaggtagtacaagtatttatattgtaaaactgatgtgtagcttgatctttaggggacaggaccaccaaccaatacatgcagattttgtgtgtgtggacagaaggtacttttgacattcagttttgctatatagaaacagaatgaataaatgaacnnnnnnnnnnnnnnnnnnnnnngcaagaggtaagtaaaagattcaatttgattcttctagaggggggaaaaaggagttgaaagtaggtcttcattttgcagtcatcatctgtacgaattcttcatagttgacttgtccgtctccatcaatatctgcttctctgatcatttcatctacttcttcatctgttagtttttctcctaagtttgtcatgacgtgacgtagttctgctgcactgatataaccattgccatccttgtcaaagactcggaatgcctcacggatttcttcttcactatctgtatctttcatttttctagccatcatagtcaaaaattcggggaagtcaatggtgccattaccatcagcatccacttcattgatcatatcctgcaattcagcttctgttgggttctgacccagtgacctcatgacagttccaagttcctttgttgtgatggtgccatcgccatctttatcaaatagggagaaggcttccttgaattcagcaatctgttcttcggtcagctgatcagccatggtgcgagcgaagggaggaagagcagagggagcgagggtggctgcaccagcgcgggggctgcgacggcgggggtacctccga

SEQ ID NO: 430756 - DNA, 942 bp, Homo Sapiens
ttgggccgaggggcgggcagggcccggtgccagccccggcaccgacgggacgccctcctccctccgcagggcgggaggatgccgccgccagcgaaggagggcgggcgcaagggcccgcgggagcgaagcgggaagagcgcgccaggcacggcgcagggtgaggagcgtgccaagggggcgcccgcgacagagccccccaagccgggctgggccctgacgccgcagggactggcggccatgctccctgcgcagcgccaccgccatctgctcttcggcgacctgctggaggacgtgggcgcggcggcctccaccttcccgtgcgggtcggtggaaccggggtaccgcatgcccgacccgcgcccgtggacgcagtcgctcgagctgcccgccgagcgccagaaccggctcctcggcgtcctcaaggcagcggaggcccgcgggcgagtccgcgccctgcggctgcgctacacccgcatgcgggccgaggagatcgcgctgctcatccagcggcagaagtccgcgcgcgccgccatccggctggagctgttcctgccgccgcagctgaagcccgcgcggatcccggaccccctggaccgccaagagcggaggcgcgtggagaccatcctggaggagaacgtggatggcaccatcttcccgcggtgacggcgactgagagtgtgcgacgcgccccagcctcccacataaagttataattctccgaaggctcgctggtctttttgctgccactccccaggaccccgagggaagcggggagtatggacgctgcctctcccatgcacctcacagacatcaaggtacagagagtggggcctctcccaaaaaagtggggagacgcaagtgggtgggtgtgaaagtaacagtcatggacacgcctacccctaatcccgatctgcccccactggcaacctggcgttctgtggg

SEQ ID NO: 430757 - DNA, 1589 bp, Homo Sapiens
ccagcgaggctggcccccactgtgtgggtccctcgggcccccacacgggctgctcaagggctggcagcaggggccacgtcctctctaggagacacccacagagccacatgtgcacgcgtgtggcagtctcactgcaccccagcaacgcgaaggcagaaaccggtgctggtggccacacctgggcgcctggacaccgaagcccccagcacagtgaggcctctgagtgtggcttgtggtctgtcctgggttagagttgttaatatcacggaacataccatctagaacgttccagtcccgcctgacaccttcattcccaatggagaagaaatctacacaggcgtaagaccaggccatctgagacagggaatcccaggggcccctccgtctgagtggtcggcgtctgctgaacaaataccatgtctttcttcttcaaaggatcaaaggcctttaggacccacagctgaagaaggcgcctgctgccagcatgtccctcccccacggccaccacacacttcaagtttacaaaaataaatatttatcaacagtatatttgacaaaaaccacccccaatcgatggcagaaagcagtattttctagctggcactgaaacttaacctatttttttgagggagaaaaagactaaaatgtaagcactaacttcctccttctgcatcttccacagaagacccacttgtgggcattctctttctgtccgttatcagtgggtttacatccgaaggccggcggcaagacacttgaaccacaaacaccagacatgcaggtgtctcaatggcatgcagattatttaaagtgcatcacttgtgagaagcttctcaaatttctgactgtcataaccaggtgtcacctaaaatctgtcctgtaggccaagatgctacacgcagcgcccaggcagtcagaggtaagtgagcgcctcccgcctcagaaagcttttacagggccacgctcgccaggctttcctcgcccacgctgaacccacgtcctgggcacagcagctcccaagctgtcagcagtcggctggcagtgccaccacaccctctcggaatcatgcacagtgctgcctctatcacctctcaccccagcctcgcaaggcctgttgagaagagaagctccctgggaggacacccacggagctggcacgagcgcagcaggagagacggacggcagcctccggcgggcgaaggacccggcttcagatgcccgctggctggcaatcaggcagagcctggccaaccgtgccaggcccccttcctcactccaggtgtgggttcattctgccttcaggccggagtctgtcacaaggctggctggacagtggccaggtgagccaggccagaggccggccccacaccatccacaggaagctgctcagctcaccagacccaagccctgggcaggggccaggctcacagcaaagcgcgttagggcaagggcgtgagttttcgtctgggaagttctaaaaaaaacccacagtgtgagggattgtgtgtgccttaaatcaacagctctattccaattacatcacatcacaaaatgccatgaatggaatcggaaggcgctccaccacccaa

SEQ ID NO: 430758 - DNA, 1649 bp, Homo Sapiens
aagacagggaatactttattcaaaacccatcacagaaatggacagcttgggtctgtaacaaagcattcatgttttagagcataggtcagtaattgtatatgagagcatacactgctacatacaaattaactgatcagaccacaacttttcaatgtttaaaacagaataagcttccctgtaaaagcagcacctttgtgacgttttaactttagtattcctctccttcttcctcaccctctccttcaacagaatccacaccaacctcctcataatccttctcaagggcagccatgtcctcacgggcctctgaaaactcaccttcctccatcccctccccaacgtaccagtgaacaaaggcacgtttggcatacatcaggtcaaacttgtggtccaggcgagcccaggcctcagcaatggctgtggtgttgctcagcatgcacacagctctctgtaccttggccaggtctccaccaggcaccacagtgggaggctggtagttgatgccaaccttgaagccagtggggcaccaatccacaaactggatggtacgcttggtcttgatggtggcaatggcagcattgacatctttgggaaccacgtcaccacggtacaacaggcagcaagccatgtatttaccatggcgagggtcacatttcaccatctggttggctggctcaaagcaagcattggtgatctctgctacagaaagctgttcatggtaggctttctcagcagagatgacaggggcatatgtggccagagggaagtggatgcgggggtagggcaccaggttggtctggaattctgtcaggtcaacattcagggctccatcaaatctcagggaagcagtgatggaggacacaatctggctaataaggcggttaaggttagtgtaggttgggcgctcgatatcgaggtttctacgacagatgtcatagatggcctcattgtctaccatgaaggcacaatcagagtgctccagggtggtgtgggtggtgaggatggagttgtagggctcaactacagctgtggaaacctggggtgctgggtaaatggagaactccagcttggacttcttgccataatcaactgagagacgttccatgagcagggaggtgaacccagaaccagttcccccaccaaagctgtggaaaaccaagaagccctgaagaccggtgcactggtcagccagcttgcgaattcggtccaacacaaggtcaatgatctccttgccaatggtgtagtgccctcgggcatagttattggcagcatcttccttgcctgtgatgagctgctcagggtggaagagctggcggtaggtgccagtgcgaacttcatcaatgactgtgggttccaagtctacaaacacagcccggggcacgtgcttgccagcgcccgtctcactgaagaaggtgttgaaggagtcatctcctcccccaatggtcttgtcacttggcatctggccatcgggctggatgccgtgttccaggcagtagagctcccagcaggcattgccaatctggacaccagcctggccaacgtggatggagatgcactcacgcatagtggctagggattaggaggcgaaggcgacaggagcagacaccgggtcccggttaccgtccccgacaagctaagagtcgagccaa

SEQ ID NO: 430759 - DNA, 1104 bp, Homo Sapiens
tcttgatggtggcaatggcagcattgacatcttgggaaccacgtcaccacggtacaacaggcagcaagccatgtatttaccatggcgagggtcacatttcaccatctggttggctggctcaaagcaagcattggtgatctctgctacagaaagctgttcatggtaggctttctcagcagagatgacaggggcatatgtggccagagggaagtggatgcggggatagggcaccaggttggtctggaattctgtcaggtcaacattcagggctccatcaaatctcagggaagcagtgatggaggacacaatttgacctattaacctattcaggttagtataggttggacgctcaatatcgaggtttctacgacagatgtcatagatggcctcattgtctaccatgaaggcacaatcagagtgctccagggtggtgtgggtggtgaggatggagttgtagggctcaactacagctgtggaaacctggggcgccgggtaaatagagaactccagcttggacttcttgccataatcaactgagagacgttccatgagcagggaggtgaacccagaaccagttcccccaccaaagctgtggaaaaccaagaagccctggagacccgtgcactggtcggccagcttgcgaattcggtccaacacgaggtcaatgatctccttgccaatggtgtagtgccctcgggcatagttattggcagcatcttccttgcctgtgataagttgctcagggtggaagagctggcggtaggtgccagtgcgaacttcatcaatgactgtgggttccaagtctacaaacactgcccggggcacatgcttgccagcccccgtctcactgaagaaggtgttgaaggaatcatctcctcccccaatggtcttgtcacttggcatctggccatcgggctggatgccgtgttccaggcagtagagctcccagcaggcattgccaatctggacaccagcctggccaacgtggatggagatgcactcacgcatggttgctgcttcgcgactgccgagctgatggcggagacgaagaggagaggttgttgcttcttacagcgcgactcttaggcggtcgatgtaagccaa

SEQ ID NO: 430760 - DNA, 1339 bp, Homo Sapiens
  misc_feature (364)..(372): n is a, c, g, or t
  misc_feature (523)..(558): n is a, c, g, or t
gtcataggagtgtggtttttttaataccatctgtgccaagcaatatcaaagttgtccatactctccaagtttgtcctatttttaatagacaatattaaaaattttttaagtgtgtgctgataaagagactagtcacacctctgaggggatttaaaaatgagaagccacataaattctcttccttaaaaaacagccatttcaaaagattttctttaatatcataaaatattttcatggacaagtgagctagcaaacacacatgcaccaatgtgccttttgacaagagtaccccctaccccgactcccacaccaaaatggacatgagattggagaaatgaatacagcagatggaacagatagaagnnnnnnnnntcagtaaaaaggatggaatataactttgtgcttggttattttcctatgtcgcaacaaaacaagacatttcggtgcaaatagttaatctttcctctttttttccatttgtctggtggagaaaaaatactttttctataataaaatatgtagnnnnnnnnnnnnnnnnnnnnnnnnnnnnnnnnnnnngcagaaaataattttgtaaactgtcacttcgcgggcagggaggatcgatgccacgtgggccccagctcacccgggtggaggctgggagctgaaaccgaacccaggcaggagatgggcgacggcggaggtgcaaggcagggcacggcgcacaagacgagggcggccgggcggggtggattagaggtcactctcgccgtacagcgccgtggagaaggacatgtagtccagagcacctggcacggagtcggggccggtgtagggggccatccgcgcgatgcagtactcagcctggtcgggtggcagctcgcggcgcagctcgtccatggtaatgtagttcttgtccccagccaggatcttgaaggaagccatgacttggtctgctgtatctgtgtcggctgtctcgcgggacatgaagtcaatgaaggcctggaatgtcactacccccaggcggttggggtccacaatgctcatgatgcgggcaaattctgcttctcccatgttgtaacccatggagatcaggcaggcgcggaaatcatccgtgtccatcatgcctgtcttcttctgggggtcgttgccaatatcataacccaagctgatgaggcaggctttgaactcctcgggacccagtgtgccggagtgatcccggtcaaagtggttgaaggaggcccggaactcattcatctgctcctggctgatgcccttggcatcccgggtcaggatctggttctctacctcattgatggtcctggcgatggtggtgagcagctgctcccagccccaa

SEQ ID NO: 430761 - DNA, 782 bp, Homo Sapiens
catccaacaagaagccataactttatttatgatagaaccagtacaaaatttcaaaccaagctgcagttactctttgagaccccaaaaaaagttgcttccatatggttacattgttaattccataatcgcatttacaatatcattactgttgttcttcagggctcggactgcctttgctctcgacacatttgcttgtgacatgaccaattctatgtccttaacttctacacctgtttcatcgacctcttcctcttcactctcctcttgtacagttggagtctgtgtgttttcttgaatgtttgagacagcttcaccttgaactttgaatttctcagcagctgctagttgtgcttgctgggataaatcttcgatcttggcttccccaaaaactatgtaagtatctgaagcagggctcttgtagacatctggttttgtgatgacaaagaggatattcttagatttccggatagtgactctagtaactcctgtaacctgccgaagacccagtttggacatagccttccgtgccttcttttcactccgactctgttttgctttactgactggttcttcatcgatttcagctgctgccgccagctgggcttgttgtgtggttgcctgggtggaatcctgttcttcaagctctggtactgattcatcactgtcagattctgttccagaccctgtctcagcctggggctgcggcaactcctgctctgtagcagggacggtttctgtggcttcgccgggcattttgtgcagggaacgcggaaccaagccaa

SEQ ID NO: 430762 - DNA, 991 bp, Homo Sapiens
acaatgtacccatgaacatctttttccatgcacatgggtgaaaaatccttctactaaaatatagagcgccgtagttgggtcaaaaggctgctggtaacgagactgacatctaaagcaaagtatcagcttaaggttaaagcattgggcctggcaaatacctaccagggaaagcagggccagcaatattctcatcagagaaatcagaatggaaggccaaaggcattaaaggtatgggatatcgtgtaagcccctctggcccctacctccacccctcactcccctgacaccccgttgtccccttggggcgaatggatcctgtacatctctttgcatccaatgaaaaccacccattttctgttttttccttagctcctcttgagcccttgacacatctccacattctctcatcatctcctcactgctcagatgcctttcctgtaagtcctcctgagagtccttgggggaatcgtccgtccccctgtccgtttttctttttgctttccggggcacataatcttcagccgggcgcttttcggcggcccgcggctggctctctggctttgcctgggaggctggcttgccctcgccttgtggcttgccctcaccttcggacctgccctgcttttcctggcttccctcatcttccagttgtccctcatcacctggctctccctcatcctctctctttccctcgcattctgtcttcccctccacgtctggcttttcttcctcgtctgactttccttcatcatcaggctctacttcatcttctggctttccctcgttttccaggtttccttcatttttattgtagggtttttccatgtcgagatttcccctccttttcctgtcctgcagggattctggacaggttgctcctcctttttaggcctcgcagagcgctgggaacagacgcgcagacctgccgggacccgggacaggcctgtgccttctccggctcgcggaagcccgctcgctgctcccccgccaa

SEQ ID NO: 430763 - DNA, 844 bp, Homo Sapiens
  misc_feature (704)..(753): n is a, c, g, or t
gaatggtacaaatcaaagaacttaagtggatgttttggtacaacttatagaaaagtaaaggaaaccccaacatgcatgcactgcttggtgaccagggaagtcaccccacggctatggggaaattagcccgaggcttagctttcattatcactgtctcccagggtgtgcttgtcaaagagatattccgccaagccagattcgggcgctcccatcttgcgcaagttggtcacgtggtcacccaattctttgatggctttcacctgctcattcaggtaatgtgtctcaatgaagtcacacaaatgggggtcatttttgtcagtggccagtttgtgcagttccagtagtgactgattcacatttttttccaaatgtaatgcacactccattgcattcagcccgctctcccagtcatcacagtctggtttcttgatatcctgaaggaagattcggccacctcgttggttctgcagcttcatcagtttctcagcatgttccctctcctcatgagattggtgaagaaagtatttggcaaagttcttcaaagccacatcatcgcggtcaaagtagtaagacatggacaggtaaacgtaggaggcgtagagctccaggttgatctggcggttgatggcggcctctgagtcctggtggtagttctggcgcacctgcgaggtggacgcggtcgtcatggcggcgactaaggagannnnnnnnnnnnnnnnnnnnnnnnnnnnnnnnnnnnnnnnnnnnnnnnnnttggggcagtccgagggtgcggtgaagaggtgacggagggctggctatgggcggccggccggggtggggaacgagcgccgggttccgccaa

SEQ ID NO: 430764 - DNA, 869 bp, Homo Sapiens
  misc_feature (714)..(776): n is a, c, g, or t
gggtaccaaatttctttatttgaaggaatggtacaaatcaaagaacttaagtggatgttttggtacaacttatagaaaaggtaaaggaaaccccaacatgcatgcactgccttggtgaccagggaagtcaccccacggctatggggaaattagcccgaggcttagctttcattatcactgtctcccagggtgtgcttgtcaaagagatattccgccaagccagattcgggcgctcccatcttgcgcaagttggtcacgtggtcacccaattctttgatggctttcacctgctcattcaggtaatgtgtctcaatgaagtcacacaaatgggggtcatttttgtcagtggccagtttgtgcagttccagtagtgactgattcacatttttttccaaatgtaatgcacactccattgcattcagcccgctctcccagtcatcacagtctggtttcttgatatcctgaaggaagattcggccacctcgttggttctgcagcttcatcagtttctcagcatgttccctctcctcatgagattggtgaagaaagtatttggcaaagttcttcaaagccacatcatcgcggtcaaagtagtaagacatggacaggtaaacgtaggaggcgtagagctccaggttgatctggcggttgatggcggcctctgagtcctggtggtagttctggcgcacctgcgaggtggacgcggtcgtcatnnnnnnnnnnnnnnnnnnnnnnnnnnnnnnnnnnnnnnnnnnnnnnnnnnnnnnnnnnnnnnnggccttggggcagtccgagggtgcggtgaagaggtgacggagggctggctatgggcggccggccggggtggggaacgagcgccgggttcccaa

SEQ ID NO: 430765 - DNA, 853 bp, Homo Sapiens
  misc_feature (675)..(740): n is a, c, g, or t
aaagaacttaagtggatgttttggtacaacttatagaaaaggtaaaggaaaccccaacatgcatgcactgccttggtgaccagggaagtcaccccacggctatggggaaattagcccgaggcttagctttcattatcactgtctcccagggtgtgcttgtcaaagagatattccgccaagccagattcgggcgctcccatcttgcgcaagttggtcacgtggtcacccaattctttgatggctttcacctgctcattcaggtaatgtgtctcaatgaagtcacacaaatgggggtcatttttgtcagtggccagtttgtgcagttccagtagtgactgattcacatttttttccaaatgtaatgcacactccattgcattcagcccgctctcccagtcatcacagtctggtttcttgatatcctgaaggaagattcggccacctcgttggttctgcagcttcatcagtttctcagcatgttccctctcctcatgagattggtgaagaaagtatttggcaaagttcttcaaagccacatcatcgcggtcaaagtagtaagacatggacaggtaaacgtaggaggcgtagagctccaggttgatctggcggttgatggcggcctctgagtcctggtggtagttctggcgcacctgcgaggtggacgcggtcgtcatnnnnnnnnnnnnnnnnnnnnnnnnnnnnnnnnnnnnnnnnnnnnnnnnnnnnnnnnnnnnnnnnnncttggggcagtccgagggtgcggtgaagaggtgacggagggctggctatgggcggccggccggggtggggaacgagcgccgggttccgtccaagcactgttgaagcaggccaa

SEQ ID NO: 430766 - DNA, 925 bp, Homo Sapiens
ggagctggggtgtacggagaagcgcgccctggggagcctcggagattcctggtgggaaggcctgggcagaacagaaggcttgtcaagtcagagggccacctcttcctcctcaattctgccagagaaagctcctgtgctgggctctgaaccccttgcagggaggggtgcaggttatccctcttggagcaggagggctgggtgcttggaaggaaaacctaggagcttaggggccccagcctcccagggagagccaggccctctggggtgacacatttctacagaagcaggtgggaacatcacagacgtcccagggcctggggcccagggctgccaggtacagaagggctgaaggaggctgtccaggccagggtgggcagtggcctgagcccggcagctggccctacagctctctctcttcgctggtcagtgtggcaattctccgcaggttttccctgactttaataaactcgggggcgtgatcctcttccttctctggtggtttttccagctggttcagcctctgctgccgtctcagcagctcctgctcaaaggggcactgcagccgcttggcttccagctcctccttcttcttcttgatgagctggttccgccggcggtgctctaggacacgctgcagctctggcttgctgtccacaccaaggccccttctgtggttcatgagcagctcccggtggagctcctggtgactccgagaggccttcacggggttcagcagcttcttgggcttgatgagctccggattccactctctgtattctggccgggccatcaggcccccaatgtctgcccgctccctctggatctccgagtacatggcggttctcaggtcgagtccttgggaagggaagtcaggagcgtgttgctgggttcctcactccaccgggaagtcccaacttttttgtac

SEQ ID NO: 430767 - DNA, 1351 bp, Homo Sapiens
atatttccaatatatatatgccctgggcactctcggccgtgctgctcacagcatggtcctcacaccagcagcctccgccttacctgggagcttgttagaaatgcaggatctcccagatctattgagttagaagctgtattaacaagatccccagtgatttttatgcacaatcaagtttgtgaggcaccgctgcagacttctgagtgcaggaatgcggcagccctgggtaggtgtggttagaaggcctggacggggaggctgtgcggaggggatgatgaaagcatgggtgaggggagaagaccctaaacagctgtctttgttagtccccgcccacctggccgggatgccagcaacaaggccacctgcagtctgccctgcccttcctcccctcagtggctttgaaggcaggtgtccttgaagctaagctctgctggctgcaggtaaaaccacaggtgggggagttctctgagacctaggagctggggtgtacggagaagcggggccctggggagcctcggagattcctggtgggaaggcctgggcagaacagaaggcttgtcaagtcagagggccacctcttcctcctcaattctgccagagaaagctcctgtgctgggctctgaaccccttgcagggaggggtgcaggttatccctcttggagcaggagggctgggtgcttggaaggaaaacctaggagcttaggggccccagcctcccagggagagccaggccctctggggtgacacatttctacagaagcaggtgggaacatcacagacgtcccagggcctggggcccagggctgccaggtacagaagggctgaaggaggctgtccaggccagggtgggcagtggcctgagcccggcagctggccctacagctctctctcttcgctggtcagtgtggcaattctccgcaggttttccctgactttaataaactcgggggcgtgatcctcttccttctctggtggtttttccagctggttcagcctctgttgccgtctcagcagctcctgctcaaaggggcactgcagccgcttggcttccagctcctccttcttcttcttgatgagctggttccgccggcggtgctctaggacacgctgcagctctggcttgctgtccacaccaaggccccttctgtggttcatgagcagctcccggtggagctcctggtgactccgagaggccttcacggggttcagcagcttcttgggcttgatgagctccggattccactctctgtattctggccgggccatcaggcccccaatgtctgcccgctccctctggatctccgagtacatggcggttttcaggtcgagtccttccaacttttttgtacaa

SEQ ID NO: 430768 - DNA, 940 bp, Homo Sapiens
ggttagaagttggcagcatgggaagggggaggaccaggtggggaatggggatgttgttaaaaaaaatacaggcttcccccacaactggggtgcctggggggaacttggtctgcttcagcccaagaggaatcaaaagatcaaaagcagtttgggaaggccagaaccgtcaagggatggagggagaaggaaaatccagggggtggggggtctgtttggcaactggggtgaagggattgccctccccctgctgggatccccccagcccctccggtctggcaggaagggggcagcctgcaacccccaagggcaggtgtggggctgccagatgctccaggcagggggccagaaggggctcacaaaggcttgccctccagggagatgacggcactgccccccagcttctctgccagggtgcagcggtccttgacctcctcgtagcagtttgcttgcaattcatgcttgatccctgtcagcttcttcttgatggcgtccttggagctggcataaatcattttgctcttaaggggcgcagactcgggggcccagaagataaacaccagatcctccttcttgctctccttggtctcataggttgcatcatagagggcatagcggcagtccttatctggcagcatcttgacaaaggtggcgtagggatcgtcgacagtctggcccacatcgcccaccaggatctccttgccctcctccaggatgatgttcttcttgtcctcactcaggcagaagagcaccgccttcttgcgcttcttcacctcctctggcgttgaagacttacgcaccttcatgtcgttgaacaccttgatgacaccatcagagacagccacaccggaggccatgtttccggaaacgaaaaggagagggcaccgagagccgcagaagacgagagcgctgcagccgctgccccaacttttttgtacaaagt

SEQ ID NO: 430769 - DNA, 983 bp, Homo Sapiens
ttggcgtcggagcctcggcggcggcggcggtgcttacagcctgagaagagcgtctcgcccgggagcggcggcggccatcgagacccacccaaggcgcgtccccctcggcctcccagcgctcccaagccgcagcggccgcgccccttcagctagctcgctcgctcgctctgcttccctgctgccggctgcgccatggcgttggcgttggcggcgctggcggcggtcgagccggcctgcggcagccggtaccagcagttgcagaatgaagaagagtctggagaacctgaacaggctgcaggtgatgctcctccaccttacagcagcatttctgcagagagcgcagcatattttgactacaaggatgagtctgggtttccaaagcccccatcttacaatgtagctacaacactgcccagttatgatgaagcggagaggaccaaggctgaagctactatccctttggttcctgggagagatgaggattttgtgggtcgggatgattttgatgatgctgaccagctgaggataggaaatgatgggattttcatgttaacttttttcatggcattcctctttaactggattgggtttttcctgtctttttgcctgaccacttcagctgcaggaaggtatggggccatttcaggatttggtctctctctaattaaatggatcctgattgtcaggttttccacctatttccctggatattttgatggtcagtactggctctggtgggtgttccttgttttaggctttctcctgtttctcagaggatttatcaattatgcaaaagttcggaagatgccagaaactttctcaaatctccccaggaccagagttctctttatttattaaagatgttttctggcaaaggccttcctgcatttatgaattctctctcaagaagcaagagaacacctgcaggaagtgaatcaagatgcagaacacagaggaataatcacctgctttaaaaaaataaa

SEQ ID NO: 430770 - DNA, 1114 bp, Homo Sapiens
ttgggcatcatgggtcctgatggtttcccgttttcatggtaacaaattcgcacagaggttttgctttatgctgtagaataccgactttcatgatgacaacttggtttatgcatgaatattgcagtatttccatatagcaaaataacatttctacccaggataatagtcacagttttccagggagggaatgatataattttcatgacaatgtcatgtgatgatagaatttctccattgatgaatctctagtatgtgtgtatactttatttacccatacgtatattttatgaccatgagctaagttgttatttctttcattcatatccctgctgaaatattggtactagcaacttaaagttggcaagtctcatcttcagtaatacggatgccatgggagtggccaggccagattgaaggtgaatatggagcagtagcagaagcctcattccagaacccatctggccagagaagcagcagcatcctgggggatggccgtgcatggggtgtacactcgctataggcataggcccggcatggctgtcgctggacgccagctgtgcacacccagccacacctgctgcacgccgcgttagtgtgcggctccgggcctgagcattcgcaaagctcgcttctccagggagcctcctcttggctttggaaaagagcccagggacttaacgtgctgcctgttgtactctgtcccctcatgactttttagacacagggactaggacatcgaccaccctctgcccctcctgcagtcagaacccgagtagtgcaagaacggccacccggttttgccagcgttcagcgtctgcccatggacccataaggcacattagcgttgggggtctcttttcagcagcctcacagacattcccgtcctttctggttggtgttgactgtgtttcagcatcactctaccctcccatgtccttagcattgctgtgcgtgtttccaggcacttaggacacccttccccacgttgccatcttactgacagttcaaatgactctccttttttgttcgttagtaacaatcttcatttgacaccttaatacatttctgactgttcttaaaacagtggggatgcctatattttccttgagttttt

SEQ ID NO: 430771 - DNA, 489 bp, Homo Sapiens
ggcagtttttacatttatttaaacagaaaacgtgcacatgagctgcctactcattttcttcactgcgcagcctggcattggggttggtgactctgatggccagttgggcagctctttccacgatggctttgcggttcttggaggaaacattgtgagcgatctcggcacagtaagatttgttgcacatcagcagcacttccagctccttgacgttgtggaccaggaacttccggaagccactgggcagcatgtgctttgtttttttgttgcttccataaccaatgttgggcatcaagatctggcccttgaatcttctacgaaccctgttgtcaatgcctctgggtttccgccagttacgcttaattttgacatatcggtctgactggtgccggatgaacttcttggttctctttttgacgatcttgggcttcacaaggggtctgagggcggccatgatgccgagaaggagatggctgccacctccgccaa

SEQ ID NO: 430772 - DNA, 677 bp, Homo Sapiens
gttgggttaaatcttatttcttttattatacacaatacttcatgtacgttatgaaataaaacagttagggaatatgtccagtgcaaacagaggactcacacctgtgcatagacagcaccatccattgattgtcgctgcagtccacggcgttactaagcctgcgccacccacgtgctgccccaggaggcgctaccaggctcttcgggccacaggcctctcctccactgcatgtggcggcagggcgggtaggtcgcagggctccatgattgtggggcagcttcaagggcacatggggcagaggccctcgaaggtcccctcctcagtaggggatgtcattctgatagtactggatcatgttgtaggtccggctcctgttgctgaggaagcagctctggatgaccttcatgatgaaatttgcagcctcgcgctcagtcatgttggggctaaacctgtgcttcaagaacttgattggccgcgaaaacagggcaggcccgtgtccaacatgatagtgaccagggagacgaccacatccatgtagggccgcacagccaggtagcctcggacacacatctccatgaaccacttgaagggtgtggcctccatcttgccccccatgatcatcaccatctcatccgtcagcttgttttataggttcccagccgccaacttttttgtac

SEQ ID NO: 430773 - DNA, 951 bp, Homo Sapiens
ttttctcttgaactcctccacgaagtggttcaccagcctgttgtcaaagtcctccccacccaggtgggtgtccccggccgtgccttcacctcgaagatgccgtcgtcgatcgtcaggatggacacgtcgaaggtgcccccgcccaggtcaaagatgagcacgttgcgctcccccttgcccgttctgtccaggccgtaggcgatggcggcggccgtgggctcgttgatgatccgcagcacgttgagccccgcgatcacacccgcatccttggtggcctggcgctgcgagtcgttgaagtaggccggcacggtgatcaccgcgttggtcaccgggtagcccaggtacgcctcggcgatctccttcatcttggtcagcaccatggacgagatctcctcggggtagaatgccttggtctcccccttgtagctcacctgcaccttgggcttgtctccgtcgttgatcacctggaaaggccagtgcttcatgtccgactgcaccaccgggtcgccgaacttgcggccgatcagccgcttcgcgtcaaacacggtgttctgcgggttcagcgccacctggttcttggccgcatccccgatgagccgctcggtgtccgtgaaggccacgtagctgggggtggtgcggttgccctggtcgttggcgatgatctccaccttgccgtgttggaacacccccacgcaggagtaggtggtgcccaggtcgatgccgatcgccgcggctttggccatgccggttccctgctctctgtcggctcggctctgagattgggggctggaaacggaacactggatccgcgagaagagctcggtccttccggacgccggaaactcgacgcgccggtgcctgcagccgcacaggttcgctctgggaagccttgggacaacgggagtcactctcgaaaaaggtagtggactgtcgcagcagctcctcagccaa

SEQ ID NO: 430774 - DNA, 1059 bp, Homo Sapiens
cagttttagaaatcacagcagcagaagcaatgtacagacagcacagaaaaaacaacccaatgtatgcaattctggtcagtttctttgcttattttaagtattttttgcctcctgtacaaaatacataaaagcatgccatgagatcagaaaaagaaaagagtttaacaaatggttacaagaaatagactctgtacaagaggagataatgtttcttcccctaccccccacccactacccccgcttcctctcttcttgctctgctttaggttaaattattctgaagacagttcacatccaagtcagcctggtcacctttgccaccctcaagtttgggcgacatggagttctggatgttaaatgactcctcctctttcaggcaggacttgagaacctcctggattttgtggggagcactaggatcatcctgacagataacgttatcatagtgagccaaggcacgggcatggggggaggaggtacggggagtgttgcaaagtttccttacatttgggtgagagccctcggcaatggtggagagggagaagttatcattgtggagctcagatggggtccggaatttgttggtcctacgcagcttggtattctccgtcttgagcaggtagagcttcttggcaaagaacaccgtcatcatgaagagcaggagcaggacgagggcagccgagcccacggccacgcacatcacctggaagtcggtgatgatggactcgcagcgcatccccttgtgccagatgtagtcctgcgtgttgcacctgcagaaggcccctatgttctccaccaggtagcactggccgccattgtgacagtaacttgggaagaggtcgcacactgaccggcaggagccgttatgccgcacaaagccactgcggcactcagtgccattttcactggaggccaagtccctgcctggctctcctgggcggggcctgagggcgatgctgctgccggggaccgaccccagagtgtgctgtggagggacagcatgccaccgactggtgggctggcctgtcccgggccccagaccaggcttcccagtgccaa

SEQ ID NO: 430775 - DNA, 933 bp, Homo Sapiens
ctttgtacaaaaaagttggggcggcttcaggagagagcgggacttcaggcggcggaggcagcaccgaggaagcatttatgaccttctacagtgaggtgaaacaaatagagaagagagactcggttctaacttcgaaaaatcagattgaaagactgacccgtcctggttcctcttacttcaatttgaacccatttgaggttcttcagatagatcctgaagttacagatgaagaaataaaaaagaggtttcggcagttatccatcttggtgcatcctgacaaaaatcaagatgatgctgacagagcacaaaaggcttttgaagctgtggacaaagcttacaagttgctactggatcaggagcaaaagaagagggccctggatgtaattcaggcaggaaaagaatacgtggaacacactgtgaaagagcgaaaaaaacaattaaagaaggaaggaaaacctacaattgtagaggaggatgatcctgagctgttcaaacaagctgtatataaacagacaatgaaactctttgcagagctggaaattaaaaggaaagagagagaagccaaagagatgcatgaaaggaaacgacaaagggaagaagagattgaagctcaagaaaaagccaaacgggaaagagagtggcagaaaaactttgaggaaagtcgagatggtcgtgtggacagctggcgaaacttccaagccaatacgaaggggaagaaagagaagaaaaatcggaccttcctgagaccaccgaaagtaaaaatggagcaacgtgagtgaccgcccaagtcacaggcacagaacctttcccctgctatctcccttcctgcttcgaaggactcattctttcctcccacttccaccccaacatagagtagtatttgctttttagtccattttgttttcaatacgatttaatatcgatcagagtaat

SEQ ID NO: 430776 - DNA, 578 bp, Homo Sapiens
gtggagtaacaagacgctgaatcttgggtgctttggtcctaggtttcttaccttctttattaagggctttcttacaacatactggcggacatcatcttctttagagagattgaaaagtttgcggattctgctagctcttttggggcccaggcggcgaggcactgtagtatcagtcagtccaggaatatccttctctcctttttttacaataaccaagttgagaacgctcagatttgcatccacaatgcaaccacgaactgattttctctttctttctccagttctccttggtctgtaacaggaatgccccttactcagtagcaggcggacacggccatgggtcaagacaccctgcttcatggggaaaccttgtttgtcgttcccaccactgattcggaccacataacccttccattcttcacccagagcgtcagcagcaacttctgtggccatacgcttctcatagaaagtacgaagtttgcgttcatcgtccacttcaatgagtttctggcagccagtggctgggaaggagatgttcagcttcatcttgaagcagctgaacgcctccgaggcgccaa

SEQ ID NO: 430777 - DNA, 1268 bp, Homo Sapiens
  misc_feature (188)..(198): n is a, c, g, or t
tacagacagattagctttattcatggactctcggggggcggccgggcccacccgcccgggacacgctcacatgggggggatggggactctccatgccacaatcacaacacacgacgcccgcgttcggaccgggccggctgggatggggggcgggggacatggcacagcctggctcctggttttggttnnnnnnnnnnnggttctcgaggttaatgggagtcgggcggggtgctctggggctgcccgggggccgcttggagagccactgtcggggatcggggaggagccgtcgctcggatcttcgtttaaaaacacatagaacatgctacatccgcgcagacgctggatgggaggaggcaacactggaggggcgaggctcccagccgcgaccgcaaccctggccctgtccatgccccggggttggacgcgggcgggtaggacagacagatggacagacactaacacaggctccgagggggttgcctcagagcggaaggaagatctcgtgattggggagaaggagtctaaggacagccctggctctggggggcggggcagggacagggacagaattgtgctgctggtgggggctctcctgggcccctacgcctctggctcatactcctgatattcctcctggggtgggtcctcataactctccccttctggctccatcaggggctcaatcagtggttcttcagcagcttcctgggccacttcctctggcttcagatcagtagggaattcctccctcttcaccagtcctgtggctgctgcgatgttccctgccccagagaacacagctcctcccagatgtgaggcctgttccttggttttttcagccactgaagccacaccttgtaccacaccttctcgggtcttgcttccgacgtagaggacgccctccttggtcttctccgccgcctcggtgaccccctgcttggttttctccgcggctgccacaacgccctccttggccatggacaggcccttcatgaacacgtccatcctggcggcctggatgcggggccggggctggggatggagcggcggctgcggcgggcggacgcgggggctccgctaggccaggccggggtggaccaggggccggaggagggatagggccgggatcaggcgctcgggtcgcgggtcctgagcaggagcgcagcagtgcccgggtctcgggtgcgtagccagccaccgctcgttcctcgcgccctgcgagctcgcgcgctccggctccggctccggcccaacttttttgtcca

SEQ ID NO: 430778 - DNA, 920 bp, Homo Sapiens
cattttgaacaggttcagctattactgaaacttgtaatttctaaacttaagttggggcaaatggctatagtgcagagtaatgccatcactgggcactgcgaatgccatgactgaagaattaacagccacccctcaggcgcaggaccaggtgcagggtcgactctttctggatgttgtagtcagaaagagtgcggccatcttccagctgcttgcctgcaaagatgagcctctgctggtcgggggggatgccttctttatcttggatcttggccttcacattttcgatggtgtcactgggctccacctccagagtgatggtcttgccggtcagggtcttcacgaagatctgcataccacctctcagacgcaggaccaggtgcagggtcgactccttctggatgttgtagtcagaaagagtgcggccatcttccagctgcttgcctgcaaagatgagcctctgctggtcgggagggatgccttctttatcctggatcttggccttcacattttcgatggtgtcactgggctccacttccagggtgatggtcttgccggtcagggtcttcacgaagatctgcataccacctctcagacgcaggaccaggtgcagggtcgactccttctggatgttgtagtcagaaagagtacggccatcttccagctgcttgcctgcaaagatgagcctctgctggtcggggggaatgccttccttatcctggatcttggccttcacattttcgatggtgtcactgggctccacctcaagggtgatggtcttgccggtaagggttttcacgaagatctgcattttgacctgttagcggataccaggatcctgccaatcaccaaccacgtccacccacagggacacaaacaagctcacccaaaaggcccaaccgccccaacttttttgtacaaag

SEQ ID NO: 430779 - DNA, 1002 bp, Homo Sapiens
gatggtcttaccagtcagggtcttcacgaagatctgcatcccacttctgagacggagcaccaggtgcaggagtagactctttctggatgttgtagtcagacagggtgcgcccatcttccagctgctttccggcaaagatcaacctctgctggtcaggaggaatgccttccttgtcttggatctttgctttgacgttctcgatagtgtcactgggctcgacctcaagggtgatggtcttgccagtgagtgtcttcacgaagatttgcatcccacctctgagacggagtaccaggtgcaaggtggactctttctggatgttgtagtcagacagggtacgaccatcttccagctgttttccggcaaagatcaacctctgctgatcaggaggaatgccttccttatcttggatctttgccttgacattctcgatggtgtcactgggctccacctcgagggtgatggtcttaccagtcagggtcttcacgaagatctgcatcccacctctgagacggagcaccaggtgcagggtagactctttctggatgttgtagtcagacagggtgcgcccatcttccagctgctttccggcaaagatcaacctctgctggtcaggaggaatgccttccttgtcctggatctttgctttgacgttctcgatggtgtcactgggctccacctcaagggtgatggtcttgccagtgagtgtcttcacgaagatttgcatcccacctctgagacggagcaccaggtgcagggtggactctttctggatgttgtagtcagacagggtgcgcccatcttccagctgttttccagcaaagatcagcctctgctggtcaggagggatgccttccttatcttggatctttgccttgacattctcgatggtgtcactgggctcaacctcgagggtgatggtcttaccagtcagagtcttcacgaagatctgcattgtcaagtgacgatcacagcgatccacaaacaagaaccgcgacccaccaa

SEQ ID NO: 430780 - DNA, 1310 bp, Homo Sapiens
tcggcctcggtgaactccatctcgtcccatgccctcgcccgtgtaccagtgcaagaaggccgtgcgccggaacatggccgtgaactgctcggagatgcgcttgaacagctccttgatggccgtgctgttgccgatgaaggtcgcggccatcttcaggccgcggggcgggatgtcgcacacggccgtcttcacgttgttggggatccactccacgaagtagctgctgttcttgctctgcacgctcagcatctgctcgtccacctccttcatggacatgcggccccggaacacggcggccacggtcaggtagcggccgtggcgcgggtcgcacgccgccatcatgttcttggcatcgaacatctgctgggtgagctcgggcaccgtcagggcccggtactgctggctgccccggctggtcaggggtgcgaagccgggcatgaagaagtgcaggcgaggaaagggaaccatgttgacggccagcttgcgcaggtcggcgttcagctggcccgggaagcgcaggcaggtggtgaccccgctcatggtggccgacaccaggtggttgaggtccccgtaggtgggggtggtcagcttgagggtgcggaaacagatgtcgtagagtgcctcgttgtcgatgcagtaggtctcatccgtattctccaccagctggtgcacagacagcgtggcgttgtagggctccaccaccgtgtctgacactttgggcgagggcaccacgctgaaggtgttcatgatgcggtctgggaactcctcgcggatcttactgatgagcagcgtgcccattccggaccccgtgccaccccccagcgagtgggtcagctggaagccctgaaggcagtcgcagctctcggcctccttccggactacgtccaggacagcgtccaccagctctgcgccctccgtgtagtgcccctttgcccagttgttgccggctccggattggccaaacacgaagttgtccggccgaaagatctgaccgaaggggccagaacggacagagtccatggtgccgggttccaggtccaccagcaccgctctggggacataatttcctcctgtggcctcgttgtagtacacgttgatcctctccagttgcaggtcactgtccccatggtatgtgcctgtggggtcgatgccatgttcgtcactgataacctcccaaaacttggccccgatctggttgccgcactggccggcctgcaggtgcacgatctcccgcatggcggtggcgctgagggtggacgcggcggcggtgagcaccgctctggccaacttttttgtacaaagttggctat

SEQ ID NO: 430781 - DNA, 878 bp, Homo Sapiens
cagcctccgtgcacatggagatcaaatctaaacttaggtcaagacccctacttctccagggatgccaggaccagagaagggcagaggtcaggagggggcatgaggaggccaagtctggggcagcctcctcagaggcaaatctacactgcagccaatccccctccagagaagcccttggaatctcccaggccatttcactacaaacttatgtttgaatcctttattagaaaccatgcaaactttaatacaaaaaatacaagtgcaataagaatctttgtgtcaatacagttcccgggatttctcctcactgcagccatcccaaggcctagctgggatgccctctgtgggccttgcctctcctccctcccctctccagtcagggcataagggaagcagatagccttagtctcatgccttttatttttaaatttccagacctgatttcctactatctgcatgaggctctcttggacatgagggcttacatgtcctagggtgtgggtgccggcctgaaggaattccatctcctggccctttcttgttctccagccctggctttttatcctagggctgaccaccagatcccagggaatgggacagagatgccaaaaccagcctcttggttagaaaagaaaagcagcatacacacaacaaaatggcaaaaccaaccagtccacgctccaagggccccttgtgtgcctgaccggctcaccagccacagcctctgcacccctcttccctgccgcaccgcctccagggccctaagctgcccacatcctccagcgggggtggcataaggatatctccgccctgttccctctaacacttactgaggactttcatgtagacatggcttcaacctgcagaactatttccaa

SEQ ID NO: 430782 - DNA, 828 bp, Homo Sapiens
tttcagcaacaaatgtcctaactctcctttccacttcttcaggcatggtggggcaaccggacattttctttattcccaaaggagaaaaagcaagaacgtggtggggaatcacctttccccagggctgctggtggtgtgggggaatcctaccttctccccaactccattacctcatagtaggcaagggtccctgcctccttggtgaaccggcctggaattcccggtcctgagattggggctccaacaccagtctcagaagaagccagagtgaagctcctcccgaaggtggggatgcccatcaccagcttactggcaggagcccccagcctcaacatgtaccccacagcatagtcctgggtggggtagggtgggaacaacgtgagcagttagtgcacaggtgcggaaggttgagcaattaatactgctgccttagcaggggttattggtgtatggtgcactggggattcccctgtccctccgggaacggatcatgtcactttaaagtgaattttacagtttcattcttgaaaaaaatcctttgaggcataggaaggggctattactatttgacagatgcagaaatcaggtggttggctctgagggcacaatgactcctacctcctcggctcccagcctctccccattcggccccctgccctcactccatttaccctgcagatcaccttcccagagcaacgcagcatgcccagactttgggcctcagtttccttatctgtggaatgggcctcatgacccccctcttgcaggactgtactgagggctagagagattggtgtgtgagcactggcagatggcaggtcttgccaa

SEQ ID NO: 430783 - DNA, 1306 bp, Homo Sapiens
taagtcataaagaggtatcaaaattaaaagcaaaaattacagggtaagacttaacaaaactactaggagcgtcaaaggaagtgaaaatgggactaggcgcggggcaatatgaattaatgaacatgggaaggacaaggatggggagaacagtgagcatgtgctgaagatactaggggagaggatctggtgaaaaatttgatcttagacaagcgcctaggtaaagaaataatgggataagatttctaaaccccactatgtgcttaagagtcatcctcgccattggcgctgtctctgtcatcctctccttcctcagcctctttttcatcatccttgatcaactccagctggtcatccccccgatcttcattatcatcatcatccagtaggtccccctcctcagcagagtcatctgcacccccctcagactccatcttcacattagtctcatctttcttcacggagctgctgctctgctcctcttctgacttatcattcttcatctctactgcttgtttgctctgttccttttcaattttttccaggttttccaggagagaatccactttttgttttatctgggtcagctccttcttaatggcctgaaggtcatctcctttcaactttccagacttggaagatccccgctgtccactcttagaattgaagccacttttgccccttcgtgaagtgtttcctgatacacgctgacgtttcgagggcactacagcccgagcaataggaggaggaggaggtacacgtgctgggtaactgtacatcctatcataatagtcccgttgaaagtcatagtccaagtcaaaagaggagccgtacatctccgctgcagatcgtttcacacctgcttttcctcggttcacttttggctctgcaccaggttaatatctaaaacctggccagcaatcattctgccatcctctcctgctacagcagcccgggcatttctctcattaacatactgaacgaaggcaaagcccttatgaacagagcagcccacaattttgccatacttcgaaaagattgcctccacatcagatttcttgaccacaagagtgttgagattcccaatgaatacacgggagttcatggagcgaggatctgtcttgttggtaacgttgctggccatcgtgtttgatggtaaggtttctcacaaagccgaaaatgtagctgaagatcaaaaaaatctcacaagaaggggagggagaagagattcgattctgagtctcctactcccgggttctgcgtagagaagccgactgctgctggaggtcggcaacgcggccacaaccaa

SEQ ID NO: 430784 - DNA, 637 bp, Homo Sapiens
gccagcccctggggtttccacctcctgcctccggccctccagaggggtgaggccccaaccccagggcagcagaaggatgagggcctcctgctcctcctcttcccccattccatccccttcttatctccacagtgggggccccgggaggaaccaaacctgggtgggagggcagggacccaaggccccgtggcccggggaagggggctgggattgcgccagccccgcagccctggcctgtagtgtgggcatgggcagggcccctcctggcctgggcccagtgggggtggggccattagttccagatcttgaggaaggagtcccaggagcccgtggccacagccatgccatcgtcggtgaccccgaggcagctcacgcggttgtcgtggccagcgaggactcctgcacggtcgcccttcatggcatcccagatgttgcagttgaagtcgtcgtagccagcgagcagcagccgtccgctgcgcgagaaggcaacagaggtgatgccacagatgatgttgtcatgggagtacatgaggagctcctgatcggcccgcaggtcgaagaggcggcacgtggcgtcgtcagagccggtggtgaaggctttagactcggttggggaagaaccaacttttttgtacaa

SEQ ID NO: 430785 - DNA, 313 bp, Homo Sapiens
agggtgtagtggtctttcaactccttcatttttctgatggcggactttaccgtgacagcggaagaggtattgtacgtccaggcaccgccagccactgtcttcatgcaggaaccacagtgccagatccccacagctcgtctcttcatcttggttttgccacagaaagagcaagtgtacttggcgtgctggctgatttcaattttcttcaccattttccggagggaggccccatagcgggtcccgtatttaccgacgatcccgactttcttggtacgtttggccaggtcgccgcgacccaacttttttgtacaaa

SEQ ID NO: 430786 - DNA, 1324 bp, Homo Sapiens
ttgtacaaaaaagttgggggtacccggcagcaaaggagatctcgccggctttacgttcacctcggtgtctgcagcaccctccgcttcctctcctaggcgacgagacccagtggctagaagttcaccatgtctattctcaagatccatgccagggagatctttgactctcgcgggaatcccactgttgaggttgatctcttcacctcaaaaggtctcttcagagctgctgtgcccagtggtgcttcaactggtatctatgaggccctagagctccgggacaatgataagactcgctatatggggaagggtgtctcaaaggctgttgagcacatcaataaaactattgcgcctgccctggttagcaagaaactgaacgtcacagaacaagagaagattgacaaactgatgatcgagatggatggaacagaaaataaatctaagtttggtgcgaacgccattctgggggtgtcccttgccgtctgcaaagctggtgccgttgagaagggggtccccctgtaccgccacatcgctgacttggctggcaactctgaagtcatcctgccagtcccggcgttcaatgtcatcaatggcggttctcatgctggcaacaagctggccatgcaggagttcatgatcctcccagtcggtgcagcaaacttcagggaagccatgcgcattggagcagaggtttaccacaacctgaagaatgtcatcaaggagaaatatgggaaagatgccaccaatgtgggggatgaaggcgggtttgctcccaacatcctggagaataaagaaggcctggagctgctgaagactgctattgggaaagctggctacactgataaggtggtcatcggcatggacgtagcggcctccgagttcttcaggtctgggaagtatgacctggacttcaagtctcccgatgaccccagcaggtacatctcgcctgaccagctggctgacctgtacaagtccttcatcaaggactacccagtggtgtctatcgaagatccctttgaccaggatgactggggagcttggcagaagttcacagccagtgcaggaatccaggtagtgggggatgatctcacagtgaccaacccaaagaggatcgccaaggccgtgaacgagaagtcctgcaactgcctcctgctcaaagtcaaccagattggctccgtgaccgagtctcttcatgcgtgcaagctggcccaggccaatggttggggcgtcatggtgtctcatcgttcgggggagactgaagataccttcatcgctgacctggttgtggggctgtgcactgggcagatcaagactggtgccccttgcc

SEQ ID NO: 430787 - DNA, 346 bp, Homo Sapiens
acgccgcgtggatccggcttactaaaagccagataacagtatgcgtatttgcgcgctgatttttgcggtataagaatatatactgatatgtatacccgaagtatgtcaaaaagaggtatgctatgaagcagcgtattacagtgacagttgacagcgacagctatcagttgctcaaggcatatatgatgtcaatatctccggtctggtaagcacaaccatgcagaatgaagcccgtcgtctgcgtgccgaacgctggaaagcggaaaatcaggaagggatggctgaggtcgcccggtttattgaaatgaacggctcttttgctgacgagaacaggggctggtgaaat

SEQ ID NO: 430788 - DNA, 470 bp, Homo Sapiens
tctttataatttttaatgatcaaaacaaagcatctaaaaccgcagtttctggaagaaccacttgttcttgcctgtcttgtatctctcttcaaacttgaccttggcctcccgtcgggccttacgtttaagagcaggatctctgaagacatccttattgacgacagttttgtccaaggggatatccacagagtaccttgtgggcattaggtgattgtagttatacactttcacaaaagattttatctttgatctcttggcgatcttcttcttgcccatggcagctgtcactttgcgggggtagcggtcaattccagccaccagagcatggctgtaggggcgatctgaggtgccatcatcaatgttcttcacgatgacagctttgcgtccggagtagcgtccagccaggacaagcaccaccttcccaggtttcatgaacttgcccatttcggcagcgaccacccgggccccaa

SEQ ID NO: 430789 - DNA, 1664 bp, Homo Sapiens
cagttttattgaattagttgcatgcaggagcaattctgttcttcccatgagcagcagagtcgagtgttagagtgcaggatccagagcggggagaggctgggcggagttgggggcctggaggctggggcctggttacttggtgacgtgcagagctctctctggggggctgcagctcatcttggggggagctggactcagatgcccccgtaggtgcaaaagcaacatccacatctcactcctcccggtgctttttgcggtattcctgcagcgctttctccgccacggtctccataaatttagggttcttcctggagacttctacagggaccgtcacagtgatgggatcagagtcaaagagcttcacgaccacctcagtgacaccggaaggaacgtccgagtcagaagtgtgggaagccaccgtggtgacccgcagatagtactggtcttcgccttgcgtgaggtttgccagccgggacacccagttaaactgctcgttcagctgctccagcaaggaggaggtgttgagcatcttccactggtaggactttagcagctcgttgtatttcctggtcaacctctcagcgacctggagggattcgtcgagctcccgccgcagcttagcctgggaggggttgttggtggaacagtccacagacaagatctcccggcacttgtcacactggtccttcatccgcgggcagcccgcggagttgtggcggatctcccggcacacagtccggtcatcgtcgccttctcgtatgaattctgttggcgggtgctggaaggccgggctgtggaagtggatgtccatggcctgctgagcctcgtgtatcatctcaaggaagggctggaacatggcgtggaagttcaggggctcgtacggagagaagggcatcaagctgcggacgatgcgggacttgggaaagaagaagtgaggcctccggtggggcaggctgaagggcaggtagtggtaggtatcctggggctcccgggtgaagaacctgtcctggaagagctcgtctatgatgctggacgcgcggctgaagtggtcctgcatgacatccagcatgtgcgtctgctgccggtcgttctccagcagggagtcgatgcggtcaccattcatccagaagtagaagggcgagctctggttcaggaactcctcaagctggcggccaaccaggcctgagccacttctgcagacgcgtgcgtagaacttcatgcaggtctgtttcaggcagggcttacactcttcccagagggccatcatggtctcattgcacactcctgggagctccttcagctttgtctctgattccctggtctcatttagggcatcctctttcttcttcttggcttcttctaggttgctgagcagtgtcttgcgctcttcgtttgttttttctatgagagtctttatctgtttcaccccgttgacagcattttgaatttccttattgacgtacttacttccctgattggacatttcctggagctcattgtctgagaccgtctggtcccccaggacctgcccactctcccaggtcagcagcagccccacaaacagcagcagagtcttcatcatgcctccaattctggagtctttgcacgcctcggtcagcggcaccctgtgcccgcgcgctcctccccccaacttttttgtacaa

SEQ ID NO: 430790 - DNA, 827 bp, Homo Sapiens
tccagatcactaggagcagcagtctgtcggtgggatgcgatggatggcgatggctgtggcagcgcaggtctgtgggcagaatgatgtagtcgtctggcagtctggtggagaggagagggcttggcagcggcggcagtgggtggtctgtccagtgtgtaacaggagcccagcttgcagctggagcgcaggacagcgtccaaatgtacatgggaggggctggctggctggaaggagagggcggcggctcgctccagagtgaggcccaggggcggcagcaggagcctggagcgctattcctggaacaaaggcaagcactacgcgggagggaacaggagcgcaggggacatcgcggcggctcgagggggagggaggcgcggagggagggcgccggtggcgaccctggcggcggccagtaacacagcggaccctccccagagcacccgcccccaggcccgagggtctcccggcctagaagtcctcgtcctcctcccatccaaagactcgcttcatctcggccagaaagccccggtaatcattgaggagggggctctccttcttgatgtaggggatcacccactgcagggcgggccctgtgaggcgggtgatgaggaacgtcaccttcagggcgtcgctggagaacgtgttctcgtccacgaacatgtaggagcccgtctgcacgatgaactccgggagtcggtcggtatcgccgtcaaacgtctcgggaaagggaatcgggttcctccagcgacgcgtcgcaggccggatcggcaaggccaggagggcctttatcagctgcacccgaccgtccatcgctgctcctcgcccaa

SEQ ID NO: 430791 - DNA, 868 bp, Homo Sapiens
tttcaattatttttatgtacagaaaactcaacagtgtacatttaacccagtttagtggcaagttctttagcctttgccttttcgagcttggcgatacgagccacagacttaggacccaggacattgccaccccagtgacggcggatctcatcgtatctgtcattgtaattggtcctgatagcttccaccagcttagccaaagcgcctttgtcttccgagttcacctgtgtgaaggcgacagtggtgcaggtcttcctgtggactagacgtcccagtcttgcctttcccttgataatgcagtaagggacccccattttacgacacagggcaggcaagaagacaaccagctcgatgggatccacgtcgtgtgcaatcaccaccagctgagctttcttgttctccaccaaggtggtgacggtgttaactcctgctcgaaggacaggtggtctctttgttgggacgtcccctttgccagcagccttcttctcggcccgggccaacagtctctgcttcttctcttgctttgtctctggtctgtacttgtgggccagcttaagcagctgagtagctgtttggcggtccagggcctgggtgaactggttaatcgcaggaggcactttcagccgcttatagaggatggctctctgccgctgcaacctgatatagcggggccatttcacaaagcgggtgaggtctcttttgggctggatgtcctgtccaatgccaaaattcttaggccttttctcaaacaggggattcaccactttcttagcctcctgcttcttcacgacagctggggccggagccaccttctttcccttggccttctttctcttatgggcatcttgggccaacttttttgtacaaa

SEQ ID NO: 430792 - DNA, 1336 bp, Homo Sapiens
aggtaatgccatccctcgatgtcagaatccgcactgctgatgatttttcaagatcggtattgttagtgttattggtatctttttggcagcagtttcacaggagtccctttgtggtgaggacgtgggcccttggcttccaggaggagggagctacaactcgtcggagcggatgacgtggaagagggtcacgttgtagaggatctggtggccgttgttccaggcatacagggcccggtccttggggttgtagtccagcatggagatgtgggagtatttgttctggaatgggatgtcgatgtattcataggtggaggcattggtctggtatgcatagtggaccttggtaccccctgagtagccgttggtgacgtacagcgtgccgcagatgatgaaggcctccccggcgctgcgcttggggtagctcgtgttccaggtctgcagggtctgcagggacacggggtccagcctactgaccacgatgttgccagcgttctggttggtggcgtacacggcccacagcccgctctcgtccaccatgaggtcgatgtccgagtggccaccccaggcgtagtggtacatgttgttgtaaccggcatagtccaggctgcgggtcttgaggatggtctctgtcttcaggtcaaacctgatgatgatgtggctctggaacttgttgaagtagatagaaccgttgtagaccacctgccccgtgcccgaccaggggtgggggagacggtgggaggtgaaattgtccgtgttcatgaagtcaaccatggacttgtactcacgtacgaagcggttgttgtgatagccgtccatgtaccacacccggttatcgccttcaggggcgagagggtctgtcatccaggatccgaacctcgagccggaggtcttgacagtcacggggtcactgatgcccgtcaacttcccgcaagctagtttttgcatgcatgcacggagcctttcttcaagattggacactctgctctgaagttcatcgtagtcataggcgccaatttcctcttgcagctcgttaagcactgacgtcagattctggacctcctctttaaactgcaataccaatttggcatcggccttgtactcttccaacacaggtatcaaaggcctaagttcatccattttcgcttttatcgccttaaactgcctggccaggtgttgcttatgactctcctccacctgtttgaacttggactccagtcctttcatttggttctccatcttctccacgtactgcaagtctctctgggtccgcctgtccaagacctctatggattgagacatgttctgcaccttctccagtagcggcctcagctgccaa

SEQ ID NO: 430793 - DNA, 987 bp, Homo Sapiens
cccacggcagccttgcacttctccaccagcccggcccactggcgctgcatgtcttccaccaggggctcgaaccagctcttgaggcgggcctggaaggcctcggcctgcaggcgtatctgctgggcctgctcctccagcttggcgcgcacctccgccacctgctccttcacctcgtccaggcggtcgcgggtccggctgcccatctcctccatccgcgcgcgcagccgctcgccccaggcctgggcccgctcctgtagcggctggccggccagggagcccacagtggcggcccgcacgcggccctgttccaccaggggccccaggcgctcgcggatggcgctgaggccgcgctcggcgccctcgcgggccccggcctggtacactgccaggcgcttctgcaggtcatcggcatcgcggaggagccgcttacgcagcttgcgcaggtgggaggcgaggcgcacccgcagctcctcggtgctctggccgagcatggcctgcacctcgccgcggtactgcaccaggcggccgcacacgtcctccatgtccgcgcccagccgggcctgcgccgcctgcagctccttggacagccgtgcccgcgtctcctccgccaccggggtcagttgttcctccagttccgatttgtaggccttcaactccttcatggtctcgtccatcagcgccctcagttcctgggtgacctgggagctgagcagctcctcctgcacctgctcagacagtgtctgcacccagcgcaggtaatcccaaaagcgacccagtgccagttcccagcgctggccgctctgccactcggtctgctggcgcagctcgggctccggctctgtctccaccgcttgctccaccttggcctggcatcctgccaggaatgtgaccagcaacgcagcccacagaaccttcatcttcctgcctgtgattggccagtcggctcctggggaaggacgtccttcacctccaactttttgtacaaag

SEQ ID NO: 430794 - DNA, 937 bp, Homo Sapiens
taatagtttcagaaagaggaacaaattagctcagtccaacatgattggcagttggcatattctagtgaagcaagtgttctgactgctaaggatttaatttggataattttaatacttagccatctaacacttcaagcataacccagaataaatgcatcacttccctttcactttaataccgcacctacctcacttcgatatagaaatatcattcaatatgatttccagaaggacaagtttcctggagaatacaggcatgaggacaatgcacaaaaagaaaaactcaaaataaaactctgtatgataatttactagtctaaggaaacaaaaccttccaatatattaagaaataaatccagttacaaatgcactaataggtctatgtgaagaggttctggtataataactgaaaatggctggctatttacaagatacacaagcagttacggtgcacctagcccagcaatggccctcagaagccaaaagtgttctctccgctgtaggccacatataagaatccatcttcatctttttccttctcgtaaagctgtcccatagttaggctggactgtgggactgtcttatccacaaacaggaagatcgccttttcagaaggaagctggatccttttcctgatgatccacatgaactgagccacagtgatatcagatggaaccaagtacttccgtttgtcaatgtcaacaatctgagagcctgagaccttttccacaatcaccggaaccctgtcgggatatttcgctcgaatcttcgcggactccacgcatctgtgttccagcgagtggtcctccttgaacatccacttcatggcggcggcgggaaggggacggaaccggctcgcggagccgcggagctcagcgcaccgagcacaacaacaacgacggcggcagcggcagcggcagcgacggcggcgacccaa

SEQ ID NO: 430795 - DNA, 880 bp, Homo Sapiens
gctattaatcatgccacaatattttaattacgtacaaagatctgacatgtcacccagggacccatttcacccactgctctgtttggccgccagtcttttgtctctctcttcagcaatggtgaggcggataccctttcctcggggaagagaaatccatggtttgttgcccttgccaataacaaaaatgttggaaagtcgagtggcaaagctgttgccattggcatctttcacgtgaaccacgtcaaaagatccagggtgcctctctctgttggtgatcacaccaattcttcctaggttagcacctccagtcaccatacacaggttaccagtgtcgaacttgatgaaatcagtaatcttgccagtctctaaatcaatctgaatggtatcattcaccttgatgaggggatcggggtagcggatggtgcgggcatcatgagtcaccagatgagggattccttttgtgcccacaaagatctttctcactttgcacaacttgtacttggcctcctcaggtgtaatacgatgtacagcaaagcgacccttggtgtcatagatcagacggaaattctctcccgtcttgtcaatgctgatgacatccatgaatccagcagggtaggttatatcagttcggaccttgccatcgattttaatgaaccgctgcatgcaaatcttctttacttcatctcctgtcagggcatacttaagtctgttcctcaggaaaatgatgagggggagacactctctcaacttgtggggaccggtggatggacgaggagcaaacacaccggtcaatttatccagcatccaatgctttggagctgccacccgcttcagatgcttcttgggaccacgagccatgccaacttttttgtacaaagtt

SEQ ID NO: 430796 - DNA, 946 bp, Homo Sapiens
ttggcgcaggagccgcagggccgtaggcagccatggcgcccagccggaatggcatggtcttgaagccccacttccacaaggactggcagcggcgcgtggccacgtggttcaaccagccggcccgtaagatccgcagacgtaaggcccggcaagccaaggcgcgccgcatcgccccgcgccccgcgtcgggtcccatccggcccatcgtgcgctgccccacggttcggtaccacacgaaggtgcgcgccggccgcggcttcagcctggaggagctcagggtggccggcattcacaagaaggtggcccggaccatcggcatttctgtggatccgaggaggcggaacaagtccacggagtccctgcaggccaacgtgcagcggctgaaggagtaccgctccaaactcatcctcttccccaggaagccctcggcccccaagaagggagacagttctgctgaagaactgaaactggccacccagctgaccggaccggtcatgcccgtccggaacgtctataagaaggagaaagctcgagtcatcactgaggaagagaagaatttcaaagccttcgctagtctccgtatggcccgtgccaacgcccggctcttcggcatacgggcaaaaagagccaaggaagccgcagaacaggatgttgaaaagaaaaaataaagccctcctggggacttggaatcagtcggcagtcatgctgggtctccacgtggtgtgtttcgtgggaacaactgggcctgggatggggcttcactgctgtgacttcctcctgccaggggatttggggctttcttgaaagacagtccaagccctggataatgctttactttctgtgttgaagcactgttggttgtttggttagtgactgatgtaaaacggttttcttgtggggaggttacagaggctgacttcagagtggacttgtgttttttcttttt

SEQ ID NO: 430797 - DNA, 1017 bp, Homo Sapiens
tgttttgctcaatgaacatctcttgtgcaaatgactctgctttctttcgaaggtccttctccagctccaggtttacttgcatctcctcatactcttctacagctaacatggacactctattgcatttttctaagacttttctctgttcaagaacttctgaatttaaaacagtcttttcttgtttaactttatttacttcttcaattacttctacgagtttgctcttgagattttccagctcaatggctaaaatcttcttttcctcctgaacagatacaatttgatctcgaagttctttaatttgcttctgacactgtactgagacacaagtctcggcggcaccgtctgtgtctgtagtcgaatcttcatcatcaatgtttatctcttcagttattacatctggtcccagcttggccatgtacaacatgctgattcttttcaacgttttattttctttatttagctttgttgccaaagcttcagcactttctcgacaagtcttctctatttcaagatggttctgcatgaaattaacttcctctatgaccatgtgagaaattttctgaaattcttccagttttttaacggcttcatctcgttcttgcctaattttgtcacacttctcctttgttttctggttctctgctctaaggtcttcatattcgcctattgcttgctccttcagactggtaatgagctgcagctgcttctcttcgtccgagctgttcattttggcgggtggggccgggaataaaagggaaagagggagcggcgcggggcacacaggaggagggggaagaaaaagcaagatgccggtggcttgcggctccactacccggaagttggatccgctcccgctcctcctcctcctggcgcggagcgcgcgagtgagatcatccccacgcacctactcggcggctgcggccgcttcacctgcaggcggggcggggcgggcccagcagtcccgtgcagggggtggaggaacgagggcgggtcggcagccgctatgccagccaa

SEQ ID NO: 430798 - DNA, 1484 bp, Homo Sapiens
  misc_feature (1071)..(1083): n is a, c, g, or t
caggaagggatcccaggcatcccgacctccccaccaaccccctccgaaaaaacacaaagttctgaaaccccaggtgcacttgtctaggaaacgggctgtcaaactgaaaagcatttcaggggaagagatgtcagtacagagggtgacacgtacgcttgccttgatgttattttaaacgtggcctgcttagatcatggaaaatcggaacattctcctaagtcaccatcaacacaaagtgaggagcagacgctacgaggaagaggacaggccgtggccgactggctgcctggggctggtgcctgccctggccccagtgcgaggctctgcagagggactatgggcgtgccctctgcatcagagcatctgaagcgagccgcattgggtggcaaacgccgctgtggagaggcgcacgggctgctcaggaggcacctggctcaggattctgcggcatcactgcagccagaggcctggggagaggagggggcagagatcggtccctgccaggcaaactctagtgaaaatggccagtgtccagcaccccgccagggccgggaagggcggcccttccggcagctctgggctggctcgggctgtgggcccaccggcatgctgggctgcggtccgcaagcataccatctgctaaggccagaagccacacctgtggcttcaaaccaaaaggccaaagggcaggacgatggaggaaggccggacacaccgaaggggtccacatgcttaagcccagacaccctcagccacaggtcaggttgtacaacagtgtcagtcccattggaccagagaggcaaatcgagcctcaggcagaggccaaaggaaagtaatttgacctgggaaagacctccctcatcctctcagcccaaagccaccatgttcgttccctgccccagaccccaggtcagagcccagctgagaaacttcagccgttggtgctgagtcccaggtcgcccgggccagcagctgagcagggagccgactggcaggggcctcaaagaatccacccttcaaagtggcctgtgaaggtggaaccactgaccccatccctgcaggatgttggtnnnnnnnnnnnnnttaccgtggggccagcgtgcagtcctagggggctgccaatgaacgcctcaggggggacgctggggttggctgaatgctccagccaaggggaacagccacgcagccccacacggcaacgtcactacggcagaggccttcctcgggctggaggcctgcttgctgagggtgggaaccgaggaccaaagtgtcccctctaaaacatgggctgatgggctgttgactctgcaaagcagcagcaagaattctagacccaggcctggccctgacagtctgggaagcggcttctcacctcaagccttccctgtgcaaggactccttctgggtcccaaagagcgctcaagggtctggggggaaccaggaaatgctgcgggaagggacaaggtgtgccacatgacacccaa

SEQ ID NO: 430799 - DNA, 1241 bp, Homo Sapiens
gggggaggtgagggctgggtcccactctagggcaacaagggccattcaacaggagacctccatggtgtgccccgggggccccgaagaaagagttccagactcgctgctctgggacagggtgcgagagcgggaccggttgccatcaacggatgctgcactggtcagagaggctgtacgagaccgggacaggcgagtcatgcaggatgaggccatgtagcccatgccttgcaggaagtacttgaaggcctcggtcagcttgcctggctgagtcagctggggctgacctccggagtcagccatcttgaggaacgaggtctgggtggggtccagttttgagttacattccaccactgcatcttcatgaggtgcttggtctcctaccaccagcatcacaggacacctgagggtgatatcacctccacgctcaaagttcaggtctcggcggttgttgtagctgttccagtacaattcaatgttatccaggttgggtgcatgtgtaatgatatttctgtacttttgtatcaactcagaatttccagagagctcttcctggctgaaaagatgtccaaggatcatctccggaatggaagaggtgaggcctgttagcttgtgggctgcccaatccatccaacccttggcattgggatcaatgttgatgaggacaagaccttcaacagtgtccgggtggttaagagcatatctcgccaggatgtaggctccagctccaacaccaactccaattattgtagagaaatttaggtactgcaggacgcaagggatcatgtctgcaagctggtccagagatgggtactgatatcccaaagggaacacaggggctccctcttccattccaggggcatccacatgaacccgcacaaagttctgaatgatttcctgcatgtcctcgaactgaaacagtggctggaagcaagatttatagttgagtcccacatcgtggtaggtaaggatcgctgggcgtttgggtttgggggtgccatagacagtgaaagtgacagagccgtatggtgtctccacagagtgagtcttggccgcctcaggcgtctgtcctggcaacagtggcttctcctctgtgatctgcacctcctgcagctccgccatggtggcctgctgccgccgcggccgcttccaccttcacttgcctttgactcgggcccgccccggctcgggcttcccgcagacccgcccccggcccgccccagcccgcccacgggcgctaggct

SEQ ID NO: 430800 - DNA, 1321 bp, Homo Sapiens
ttggagctgggcccgtgtttcggccgccgccatggccgcggtggacctggagaagctgcgggcgtcgggcgcgggcaaggccatcggcgtcctgaccagcggcggcgacgcgcaaggcatgaacgctgctgtccgggctgtgacgcgcatgggcatttatgtgggtgccaaagtcttcctcatctacgagggctatgagggcctcgtggagggaggtgagaacatcaagcaggccaactggctgagcgtctccaacatcatccagctgggcggcactatcattggcagcgctcgctgcaaggcctttaccaccagggaggggcgccgggcagcggcctacaacctggtccagcacggcatcaccaacctgtgcgtcatcggcggggatggcagcctcacaggtgccaacatcttccgcagcgagtggggcagcctgctggaggagctggtggcggaaggtaagatctcagagactacagcccggacctactcgcacctgaacatcgcgggcctagtgggctccatcgataacgacttctgcggcaccgacatgaccatcggcacggactcggccctccaccgcatcatggaggtcatcgatgccatcaccaccactgcccagagccaccagaggaccttcgtgctggaagtgatgggccggcactgcgggtacctggcgctggtatctgcactggcctcaggggccgactggctgttcatccccgaggctccacccgaggtcggctgggagaacttcatgtgtgagaggctgggtgagactcggagccgtgggtcccgactgaacatcatcatcatcgctgagggtgccattgaccgcaacgggaagcccatctcgtccagctacgtgaaggacctggtggttcagaggctgggcttcgacacccgtgtaactgtgctgggccacgtgcagcggggagggacgccctctgccttcgaccggatcctgagcagcaagatgggcatggaggcggtgatggcgctgctggaagccacgcctgacacgccggcctgcgtggtcaccctctcggggaaccagtcagtgcggctgcccctcatggagtgcgtgcagatgaccaaggaagtgcagaaagccatggatgacaagaggtttgacgaggccacccagctccgtggtgggagcttcgagaacaactggaacatttacaagctcctcgcccaccagaagccccccaaggagaagtctaacttctccctggccatcctgaatgtgggggccccggcggctggcatgaatgcggccgtgcgctcggcggtgcggaccggcatctcccatggacac

SEQ ID NO: 430801 - DNA, 888 bp, Homo Sapiens
gagcaagggacattttgggacggttccactcttcttttaacttctttcttgggcttcttttcatagactggattctctcgtatagcagcatgagctttcttatacatctcctccatcatgtctggagttacgctgttctttatgtattgagagaactgtttcttgtaagcatcttcatcttcttccattaagtagcgcatgtaatctgcaacattctggcccatgatgtgcttccgatgtacttctgcattaaattccttgctttcagaatcataaccagggaatcgtttggtactgtgagggatagacaagcctccatccacagctcccttcagggcaccaaaaactttattgccagtggtagttctggcaaggcctgcatccaaatagcaggtgaaggcacctggctgaccatcaatgctttccacattgtattcatcaccagtcacctccacttggccttcatagatcttgtccatgccaaacctattgagaagcctgcgggccagcagcaggccagtacaatatgctgcagcataatttgtcaggccaaccttcacaccatattttggcagttcgtgtgcatacgctgcgcagactatcatatccccctctatacgggcataagcaatctgacaaatgatatctctgtttgtcacacgaactatcatcctgtatttgggtgtgttgtatttatttttatcttgtatcaccaagcgtttccgagcataataatcagttttaccctctcgtcgtcttctaaatttcacttggtatctcttaaagtaggccttattcttaacaactttaacaaaccccatcctgcggaacagagaccggcgtccgctgctcgacagagacctgcaggcccagcggcgctagggccaa

SEQ ID NO: 430802 - DNA, 843 bp, Homo Sapiens
tgtacaagaaagttgggttctcttttctctttcttgtactgacttgcttccggagtttattgtgcaggatgaagcccgagtgggcaggggtgctttggcggggagccggggcaggggctcggggaaggaacagagcagagacatccagagcgtgggggtcacctggctggccgggatcccagcttcagccctggggagtcctattgttccgtcatgcacttatcggtttggggcaggaagacaatggtatcctctgtgaagccctgggccttgcagaaggcggtgaatttctcctttaactcagccctgggggtctgggttcggctgtagagggtggccatgcggaagtcctcgccagggcccttgctgccctggctgtacagcagcgcgtactggtcgtagtcggtctccaccactgacacggagtaggtgctgccccagtggggactccggtagctgtaggagccgagggaccccgcgggctgcagcagcatggttcgggtctcacactggtttttcctgaggaaggtggaggtcaggttgaggccaccatccgtggcaggggccaccacagacttgcacatggacaacgccgccttcttctcccggagccagctcgagttggaggcgaggcccgcgctgaaccagcgccccaggaacttgtcctgctggaagttgggctgcacggagacctgggcctccggtgctgcctgcaggtcgcccagcacccccagcagggccagtcccatccacagcgtgtgatgagtagccattctcctgcagcagagcgggtgtccggggcctggtgccagtggtgtgggagagcgagggaggcgtgcccaa

SEQ ID NO: 430803 - DNA, 492 bp, Homo Sapiens
gaaacaaatgttaagaggagaaacaaaacttccccatccacatacatcaatttaatagataaaagaacagttaaaataaatgaaaaacaaaaagtagaaattttaaactttgttatagctttaaaacattaacgtttgatacaattagaaatcacattcagatctcaaactcttaaaaaaaagtatggctccttattaaaaaaatactgtatcccacttgaaatgaaaacacaggttgcctgctgttgacatgggtggggctgtcccttcctctggtgtcgtgcgtgccccctcccggtgctggggtgcagccacacccccccgccgggcgcccaccttcactcctccagggtgagacacgcaaggtgacatgaccagaacttcacatccaatgctctagaactgacatttccacttcataggacactgctgctttttaaagcactgattatcaaacatgttgtgaaaaatactttagacaggcgccactgt

SEQ ID NO: 430804 - DNA, 850 bp, Homo Sapiens
ggagtttcttcaaaaaggcaatctcttcttgcaaagattccactttgcgttcaaggtcaagacgtgccagagacgcattgtcaacatcctgtctgaaagattgcagggtgttttcggcttcctctctctgaagcatctcctcctgcaatttctcccggaggcgcatgatgtcctcggccaggttgtcgcgctccacctcgacgcgggctttgtcgttggttagctggtccacctgccggcgcagctcccgcatctcctcctcgtagaggtcccccaggcgcgacttgccttggcccttgagctgctcgagctcggccagcaggatcttattctgctgctccaggaagcgcaccttgtcgatgtagttggcgaagcggtcattcagctcctgcagctccaccttctcgttggtgcgggtgttcttgaactcggtgttgatggcgtcggccagcgagaagtccaccgagtcctgcaggagccgcaccccgggcacgctgctccgcaggcgcacggcagaggagcgcgtggcatacacgccgcccggggacgaggcgtagaggctgcggctggtgctggggcgcagcgcgctgcccaggctgtaggtgcgggtggacgtagtcacgtagctccggctggagctcggccggctcgcggtgcccgggccgccgaacatcctgcggtaggaggacgaggacacggacctggtggacatggctgcggagggtggcgatggcctgggcggcggcggtggcgcggactggctcccggagaagaggcgaacgagggcgcggtgggtgtgggtggtgggagcgcggctgcgtctctggcgcggggacctcggagcgaccaa

SEQ ID NO: 430805 - DNA, 835 bp, Homo Sapiens
  misc_feature (126)..(162): n is a, c, g, or t
  misc_feature (382)..(412): n is a, c, g, or t
  misc_feature (508)..(592): n is a, c, g, or t
ctcctttgagattataatgaacatggtcacaccacaagtaaagtcagaagtaggacagagaacgctccgaaggctggtttggtcatccgagatcattaaaaatggctgaccctaacaatatgtacnnnnnnnnnnnnnnnnnnnnnnnnnnnnnnnnnnnnntcctttttaaagtactttaagaaaaaaagcagggccttggaagttttggttcttttttcctcccctgttgcaaattctcatggtttgggttgggtggtggagagcgcgtgtcatctgcgggtggcactgcccacggtgggcgggcgggcctctctactcgaaggtgaccacgtttagattctgagacgggaagtggagggtgaataggtcacggcggccnnnnnnnnnnnnnnnnnnnnnnnnnnnnnnngctgtctagtcatcctcgtcggtcttctgcttcttggtatcgacatcgtcatcctcatcatcttcagctgcccgcttgcccgtagctgactcagcnnnnnnnnnnnnnnnnnnnnnnnnnnnnnnnnnnnnnnnnnnnnnnnnnnnnnnnnnnnnnnnnnnnnnnnnnnnnnnnnnnnnntctacctcattgtcagcctcctgctccccattttcctcattcagcattcccgttagcaggggcgtctcttccattttctgcctcttccacaacttccttcttctcctttaagtccttggtggtgatttcggagctggtgtctacggctgcgtctgacatggtggggcacgccggtgatccgatgcaggggattaaaaagaaagcgagagttcagggactctggcgataaagctgccggagtcc

SEQ ID NO: 430806 - DNA, 488 bp, Homo Sapiens
gagaaagccagctgactttattgctctgggggcagggggctcaggagctcttggtggggcgggtccgcttcctcttcaccatcacaggcttctggctgcgcaggatggcgctggccctgcggatggctgccatgcgcaggtcggggcggtacttgttcttgcggatcatgtgtctgatgctgctgagcgtggcgcgagcattcttgttgatggtggtccgcacataggaggtggcaggcttccgctggccggatctccgcttaatgaccaccacgacacctttgccgtcggctgccggctccacgcccacagtcttgcggtgaatcagtccgttgtagcggaaggaattgcgggccttcaagttattgggctcagtgctgtaggtctgcttattcctcttgatcaggaaactggagcagttccgcacgaccatccattgcagatgcgcagacatggcggcggctccctccgcagcggcgacctgccaa

SEQ ID NO: 430807 - DNA, 1519 bp, Homo Sapiens
  misc_feature (1232)..(1288): n is a, c, g, or t
ggatgggactgaatcacactgagacaccaaggggagacacatataagagggttagctcaagacttagagggggtgcagactggaccatcccatgcaggcggtagttggggcctcggcagcgcctctcggggtgccgggggtccctgttgcccctcagtgccctgtgggccaagggctgcaggggccggctgttaccgctgaggctctggaagatctgagatggaggattctggctcaggagtctcagggagtgcatctgaagggaggtgatattgagggcccggtcaatgaggatccaggtgacagtctcggagcagggcggggtgctgagagagccctgataggtgatgaagccgaaggattcagggaacaggagctccaggctcaggtcttgaagaaagtaggcatcattcttgtaggagatgcgagtgatggtgtcgcggttaaggaggcgactgaggaatgggttagaggtactggcaacgttgacaaagaggctgagaatggccaggccattggggccgcgggaggcagcgctgaaattcccgtagagttcctggttgaagtgaatgagctgcacctcagcagagaagccctggtggttgatctgatgttccgagccggctccgtcgcgagctccaaacagcagccgcagttcactgagtcggtggctgtaaaggaggggacctccagacacattgaccacaggtcggggtgcaggcaggaaggagacatgtcggccggtgttgtacaaggttccccggagcttctctcctccagtgctgagccttaatgggggcagaaaggggtcataaagaaccctcttcagctccacatccacggggctctgccgcttccccacagcacacagactccacgctgcattcaccaggccccagaaaggaggccctggcacgaagtttccctggagattatccttgtagctccaccagtcctcggggtcaggtgctggtccgatgtgagctgctgcccccagtgcagcccagagtaccagcgctcgaggggcgctcagacgagctgcagcccccatccccaggaggcctccgagggacccctgcccaacgccctgcccccctctctcagctcatctgtcccctccttctgggaccctgtccctccaggacttccagctttcctctcctccccacagggagtcccagttccccaaatgccaaagcagccagggactgagatccgcccttcaaacccannnnnnnnnnnnnnnnnnnnnnnnnnnnnnnnnnnnnnnnnnnnnnnnnnnnnnnnngaaccctccagtctccctctagctcctgatcttcctactcctctcagccttctgctgcccccagggctacctcttggttcctaacccacacctcctctccgttctcttttcattaagctctcccaagccacctaactccaggtctccatcccgcatctcctcctccacctccctctctcccaacttttttgtacaaagtcggccctttattgggtaagcattgctcatcaa

SEQ ID NO: 430808 - DNA, 676 bp, Homo Sapiens
tttattatgaagggggagtccgtcgtggtgtgagacgttagaccggaaggtctgggcttgctaaataaaatccgcggtctggcacctctggagagggcagagcctcctcagaagagctggcctgaggaagaagccctttgccccctccccttctataagttagtgtcatttggctctgggaacgctggggcccgggtgggcaaaacccctggcatcggcggtgcccccccttagtggctggcacctggtcctgcaggacccggtgaactgccctgcaccgcggggctccagtctcaagccggcatgcacagtggggacaaagctgcaggtccacatgtcaggtgagcggcccgcggggacaggagtccagcctcatctctcagccaggctggccaggatgccaatgagattgtccagccccagcaaatagccgtcctcgcggttgccctcctcccagggccgccggtggtccaggatctggccatcggggaggggcgtggtcttgccgaagtcgatgagccacacgccggcgcgatggcagtgatcgtgcacaaagaggagcgagctgccgatcacctcgtgcctcctgaagaactcggatacctccagggtgtcccggatctgctgcaggcggttcagataccgcctcagcacttcccaacttttttgtacaaag

SEQ ID NO: 430809 - DNA, 928 bp, Homo Sapiens
ttgggtgcggggccggagcccgagcctgagtggcgccgggcccgacgtggggctcctgggccgcggcggcgggcgggcgatgctccagaggcctgaccagccatggaggccgaggcaggcggcctggaggagctgacggacgaggagatggcggcgctaggcaaggaagagctagtgcggcgcctgcggcgggaggaggcggcgcgcctggcggcactggtgcagcgcggccgcctcatgcaggaggtgaatcggcagctgcagggccacctgggcgagatccgcgagctcaagcagctcaaccggcgtctgcaggcagagaaccgtgagctgcgcgacctctgctgcttcctggactcggagcgccagcgcgggcggcgcgccgcacgccagtggcagctcttcgggacccaagcatcccgggccgtgcgcgaggacctgggcggctgttggcagaagctggccgagctggagggccgccaggaggagctgctgcgggagaacctagcgcttaaggagctctgcctggcgctgggcgaagaatggggcccccgcggcggccccagcggcgccgggggatcaggagccgggccagcacccgagcttgccttgcccccgtgcgggccccgcgacctaggcgatggaagctccagcactggcagcgtgggcagtccggatcagttgcccctggcctgttcccccgatgattgaaggcactgcttcctccacgccgacgcccgcccggattgctccccgagccccgggaccgctgtggacctcgggacctggacgccgtcctggctgcgcagaggggccgctggcatggactagaaatcctgacaccaagaatggcccctcgctcttgctggcaggcagcaaggggactgaatgctggagcggagggacttgctgggggttggattggggg

SEQ ID NO: 430810 - DNA, 1249 bp, Homo Sapiens
gctaggaccagaagagatgccacgcctggagtgcgagtagcgaccaccaacagcagcgtggcttccatgccgaagctccgcagttcatcaacttgcgcacgttggtggtggacatgatgcggcggctccgcaggaagtccgcgatctggccgccgatgggcacgatgatggtcatgaccaggtggggcagcgcggacaccaggcctaccttgctgatctcgaagccgaacacttcttcgaagtaggcgggctgggagatgagcagcaggtagaacgtccagctgcggcagaagttggccacgatgatggcatagactggcatagacgtgaagaagcgccgccagggagtgctaaacttcgtgagggggttcatgagtttcgcgctctctccgatggcgtcctcgatgtacttgcgctcctcctccgagatgctggggtgcagcgcgggggactcgtaggagacgagcagccagaacaggtaccagaagatcccgaagctgccgtagacgtagaaaacagagctccatcctgagtactgcacaaggaccccggcgaggggcatcgcgaccaccgccccagcataggaaccacaaaaggctgtcgtcgccaggcgactccgttctaagggtggggcccatttgctccagatcccatggcaggcggggtatgtgaccccctctaccaacccctgcaggatcctcacgaagatgacacagccatagtggacgcgggcagctgaggggatcagcatgtttagagtggatgttgccacaatagcaaagccgaaaactctgttggctgcaaatttttgacagataaatcctcctggaatctgagtgacaatgtagccccagaaaaaggagccgtgtatgaggccgacagtctctggatcccagctgaactgggctttctgcaccaccacgtggcccccgcggtgggtcgtgctgttattgaccatggagacgatggccacgcccaggttgcagcggatgccaaagctgatgcagaagcccagaccactcatgatggcgataatgtagcggcgagggaggccgaagcaggtgcagtccaccaccggcgggtcccgggtctgcgtggtcaccgggcgcccatccgcactcagctccagcgtctccgcgccttcctgccgcttctccagaaggcggtgcagcttcccgagagcacgacccgctagcttccgaaactcctcctggcggaactccatggtggcggctcctgccgccggtca

SEQ ID NO: 430811 - DNA, 826 bp, Homo Sapiens
cttattaagcgccagctttaatgctgcagaaaatttcaaatcaccgttgataacccactttcttttctcccacccaaattcttgatcaagagtttttcaagtaaagacatgctcttctctcttctgtataaaactttacgaaataaaggcaaaagattgtgtacatcttgctggaaaatgctgcccagggctctggagacggtggctgcccgggctcccttcactgtccaggtcctgaaagactcttgttcatgaactgtctcttcacaaagcaagtccaccacttgctgggtttatcattctgagggtcgaaaactttctcacaaagtctcagtccagtctcttgccttagctgttgtaaataggctctcatcacttcatcttcctgtttgtttgcaggtttggcataaattgcgttaagtggaaaaccaggctctccaggaatgggaaaattagtgattcccagcgtatacatttctttctcaccttggcttttggaattgcacttttgcagtttcttcagacattcagaaatgtagagagttatatatatcaaggtcctatcagcttcattcttaatttcatagtttttgaagaagacattggccttgaagtaatagatggcttcatccacaatatctgtatcttttgtctctctgggggcaggtcctttgaattgacttctgataggcaacagtgccatgtttccgatgagtttggtatcaggatccatgagagaagagtggtaagccggcatcttggcggcgcccgggtttcaacccagaggagcaggatccaggtacagcggagcgcttccggtctccaa

SEQ ID NO: 430812 - DNA, 849 bp, Homo Sapiens
aactttgtacaaaaaagttggcggagcgcggcggcaagatggcagtgcaaatatccaagaagaggaagtttgtcgctgatggcatcttcaaagctgaactgaatgagtttcttactcgggagctggctgaagatggctactctggagttgaggtgcgagttacaccaaccaggacagaaatcattatcttagccaccagaacacagaatgttcttggtgagaagggccggcggattcgggaactgactgctgtagttcagaagaggtttggctttccagagggcagtgtagagctttatgctgaaaaggtggccactagaggtctgtgtgccattgcccaggcagagtctctgcgttacaaactcctaggagggcttgctgtgcggagggcctgctatggtgtgctgcggttcatcatggagagtggggccaaaggctgcgaggttgtggtgtctgggaaactccgaggacagagggctaaatccatgaagtttgtggatggcctgatgatccacagcggagaccctgttaactactacgttgacactgctgtgcgccacgtgttgctcagacagggtgtgctgggcatcaaggtgaagatcatgctgccctgggacccaactggtaagattggccctaagaagcccctgcctgaccacgtgagcattgtggaacccaaagatgagatactgcccaccacccccatctcagaacagaagggtgggaagccagagccgcctgccatgccccagccagtccccacagcataacagggtctccttggcagctgtattctggagtctggatgttgctctctaaagacctttaataaaattttgtacttatgac

SEQ ID NO: 430813 - DNA, 956 bp, Homo Sapiens
cccgctgaggaacagcggaaagcgccttcccgccgtcgccaccgcagctgggatccgccgagcagcgggcggttcagggctcccggtactcctgcgtgttaatgagaacgttcattagcgctcttgacaggacggcgactgtgagacgcctggttacctattttagtaaatcgggaacactggatgcaaggcggttggttttcgtttttaagcaagcttaaatgttggttacgctacttttggggaaagggaaacgaaaggtgaatctcgagttctaagttgctttctaagaaacccccaggatttaagagcgaaaactctctgcgacaaaacactggatacgcgagtcttaaatacagctctccaaacagctggtctacaaaagtggacccacgtcccaacccagcgcaccctgcgttgtcctcgcccctacccaccgcaccccgacgccgaccacctgtccgccgagggtccgtccgtctgccacgtcccagaccgtctgcaccgcctaactggtctttttctgcctcttgagttccggcagcctcctttgataggacctggccggcgggaacaagggcgcccgtggcctctggcggaggagaaggaaaagaaccacccctccgcccccgccactgctcgagcgcagcccctagtactgggagccggcgtgctccgctccggggaggtagcgctcggggatggcctctcgctgcacccggggcgcgccaaccacggcaaggcgccctaagttctacatcggccccgcgaagcgcgcaactccagggacaaggagagagatgtgctgggtgagagcgagcactttctgcctaaagccgctggaaccgacccagaaccccaaactgccccgaggcgccatcgaacatccgctctggtcactttaacgtcccaggggtgggggcggggaagggggtgcccgacagtcccttccccaa

SEQ ID NO: 430814 - DNA, 887 bp, Homo Sapiens
caatttagtttaaatatgcattaaactaaaaggcattctctcaaatgagtttaaatgcattttatttttagacaacctacatgacatgtttttcttaaaaacaatgcctccactccaaataaatcacagtcaaaataaatgaagagctcaagatgacatcagtcccatttgtcttaagtcctggtgttgtgtggatgacaagcagaagccagttatgatgacaggtgatagatccaaaataattgccacatttgttaacatttttccatttctaaaccatccttaaagaaaatcatatatggggtcacaccatcctcacggtagtccaatagagcaaccatgccatctggattcatgttttcaccaataaagaactggtagtttttgaaattagcaaggatgtgcttgatttgttctgcagcccctgtcataaaaggttttactctttctggtctctgttcttcaagtttccctttgattgatttcatgtaatctttgatgtacttcttgtaggcttcttttgtgaaacttgtttcctgcaggtgatggttcatgacaatatcgacaccagtgattactgtgctttcggtaccttcgccctcggggccttcagcggaggcatttccaccaatgagcgagtcatcaatgttaccttctgtcctactgaccatcttcccctccacctccaggcacaacccgtccgcgatctcccggatcttgtagatgtcggagaacatctcatcgtggctgatgaggtcccggtagataatcatgatggcgactgaagggagacgacgacggcgctagcttagcacgagcctgaaactcggagcgagcgcggtgcagccggagcggcgctcggggcgctccaacttttttgtacaaag

SEQ ID NO: 430815 - DNA, 533 bp, Homo Sapiens
tttacaataactgacttttgctttatggtgtaatttacacaggacaaccccaaattccacacttcgtttttctcttctgccttcattattctttcaatatctacgtcaacagaaatcgtttctcccaataacatatgtggtttgatcctcagccaggacgcacaggccctacaagatcccagccctccaacacggacacctggaccctcccatttgactgcagccttgtctgtttgtaccggggctctgccctggtcctgtcacccctgagacgtccgtaaggtaggaatgccaaacaggatctgtgtgatgtgtcaactctgagtaaatacaagaggctgctaggagcccccagctgaggattgagaggcaggctgtgtctggttccatttcaaagaatgctgtgatgcattagcagcgtctgctatggcaacacccattagaagcacctggaaggggggttttgggaaacgggctcagaaaggagcaaggtgtgtccgttccattcttgccttaggtggctgttccgccaa

SEQ ID NO: 430816 - DNA, 922 bp, Homo Sapiens
ttttgggtctacaaccagccatatcctgcatggctgtgaaattcatggctgtggaattcacggctgactttggaaagttcctgactatcaatcacatcggaatgctcattgctctcatcattagctttccgcttatataatctggactgcttgtggctgtgggtttcagcactctggtcatccagctgactcgtttcataactgtccttcccacggctgtcccaatcagaaggcgcgttcaggtcctgggcaacggggatggccttgtatgcaccattcaactcctcgctttccatgtgtgaggtgatgtcctcgtctgtagcatcagggtactggatgtcaggtctgcgaaacttcttagattttgacctcagtccataaaccacactatcacctcggccatcatatgtgtctactgtggggacaactggagtgaaaacttcggttgctggcaggtccgtgggaaaatcagtgaccagttcatcagattcatcagaatggtgagactcatcagactggtgagaatcatcagtgtcatctacatcatcagagtcgttcgagtcaatggagtcctggctgtccacatggtcgtcatcatcttcatcatccatatcatccatgtggtcatggctttcgttggacttacttggaagggtctgtggggctaggagattctgcttctgagatgggtcagggtttagccatgtggccacagcatctgggtatttgttgtaaagctgcttttcctcagaacttccagaatcagcctgtttaactggtatggcacaggtgatgcctaggaggcaaaagcaaatcactgcaattctcatggtagtgagttttccttggtcggcgtttggctgagaaggctgcaactggcctgagacgagtctggtcccgacgatgctgtgctctgccccaa

SEQ ID NO: 430817 - DNA, 865 bp, Homo Sapiens
tggctctcatcattggctttccgcttatatatctggactgcttgtggctgtgggtttcagcactctggtcatccagctgactcgtttcataactgtcccttcccacggctgtcccaatcagaaggcgcgttcaggtcctgggcaacggggatggccttgtatgcaccattcaactcctcgctttccatgtgtgaggtgatgtcctcgtctgtagcatcagggtactggatgtcaggtctgcgaaacttcttagattttgacctcagtccataaaccacactatcacctcggccatcatatgtgtctactgtggggacaactggagtgaaaacttcggttgctggcaggtccgtgggaaaatcagtgaccagttcatcagattcatcagaatggtgagactcatcagactggtgagaatcatcagtgtcatctacatcatcagagtcgttcgagtcaatggagtcctggctgtccacatggtcatcatcatcttcatcatccatatcatccatgtggtcatggctttcgttggacttacttggaagggtctcttgtttaaagtcattggtttcttcagaggacacagcattctgtggggctaggagattctgcttctgagatgggtcagggtttagccatgtggccacagcatctgggtatttgttgtaaagctgcttttcctcagaacttccagaatcagcctgtttaactggtatggcacaggtgatgcctaggaggcaaaagcaaatcactgcaattctcatggtagtgagttttccttggtcggcgtttggctgagaaggctgcaactggcctgagacgagtctggtcccgacgatgctgtgctctgcctccccaacttttt

SEQ ID NO: 430818 - DNA, 731 bp, Homo Sapiens
  misc_feature (231)..(258): n is a, c, g, or t
ggctcatccttgagcgcagccaggcgtggcgggggggaggcccctgagagtcgcggcagcaggaagggcacaggttcaaacgaagaaggcttccttcgcgtctccccccgcgcccccgacgccgcccgcggagctgctcaggttcgcgtagacaggcatttcgggcgcggccgccgccggggccaactcgccggggggcgcggagcccgtggccgtgcccgagggcccccnnnnnnnnnnnnnnnnnnnnnnnnnnnncgcgcccgcgccgagctggttctgcttgtgtaaatcctccagggcctgaggaagccctcggcgaactcctgctcctcgctggccgccaccttggggtagaggaactgtgagctcgtcggcgtggtggtgaccagcccgttggaatggatgatgaggcgctcgagctcgggggaggccagcttcagcagccccaggtcgggagaggcgagcaggccgtcggggggtgccgcgcagggggcgccgtcggcgcgcaggggggtaggaggcggcgcggccgcaggcttgagcgctgccgccacctgctcactcaggctcagcgtcagcgcgtccttcttcatcatgctgccggccgcggccgtcgggggcgccccggggaacaagcggcccggggacgcgaagctgccgccgctgccactggcgccgccgcccaggccgctcagcgcctcatcgccgtagaagggtgtttccatcct

SEQ ID NO: 430819 - DNA, 590 bp, Homo Sapiens
  misc_feature (56)..(75): n is a, c, g, or t
ttggctcacctgtcttttcccttctcccttctagtgtcttcactgtattttctttnnnnnnnnnnnnnnnnnnnnggcaaaaataaaccactcaaaagaacaacaaaaaaacccagcacaaaaccgacgatggagtttgtttctttgatttctttgccaatggcaagaagatgagatgccctcagcactgaggattcttgcccccttgtggtgcccgctgcccccaaccttcaggctgccagatgctcccctgacaacaccaggctacaggagccagacgccagggcctgcccggcctcctgttcctgcccccacccaccacctgcctggagaggaacgggtcgggtccgtgtcggagaagtgacaggtcccagagccaaagccggccctcaagcatcatcagggagtggtgtagtcagttgaaggcagttcccaccgagttttccgagcctcagaatccaggagatacgcacagccccacccactctgagatgacagtggctgacttcccgtgctgggcttttccattgtccccctggcctccaggctcctcctctgcctctccatggagtgggtggggaggtggtggg

SEQ ID NO: 430820 - DNA, 792 bp, Homo Sapiens
tcaggtggttgctttgaactttatttgagaaaaacagaagataaatgtatcaaaagaacacacaggtggcgggggaggcacagccagtggcggcagcaggggtgggcatccgggctaaggctttacttggcggcagtctcatcggattttgcagcttctgggcccccaagctgggcccgcgactcgaaggtgactgggatggtgatctcgttggactgcgtggctagcttgggcatgggggcctccacggtcagtgtgccctcaggggacagggaggaggaaacttgggtggggtccacaccggggggcagcgtgtatttccgcgtgaagcaccgggagatgtagccatgctcgtcctgccgctcctcgtgcttgccggtgatctccaccacgccatccttggtcttgaccgtcagctcgtccggggcgaagtggttgacatccagggacacgcgccagcggtccgcagtgtgccggatctccgagaccccgctgctgagttgccggctgagcgcgcggctgtaggcgggcgcggccactgcggggctctcgatggcggcggggggcagggggcgcacgtagcctggccagctgctgccgcctaaccactgcgaccactcctccggcagccggggcagcccgaaggcctggtcgaagaggcggctatgcgggtaccagtcgcggaaggggtcccagctggggccccgcaggagcgagaaggggacgcggcgctcggtcatgctggctgactctgctctggacgtctgctcagaaaagtgcggggcgctccaa

SEQ ID NO: 430821 - DNA, 1194 bp, Homo Sapiens
aatcattaattatctcataagtcaatgcagagagtgaaattactatgaattaaacttctgttcacaatgtacagtattttgcatatgttgactttacttaattgtacatttttgtttccaaagttaatgtgcataggttgttgtcaagcaattactctcattgtcttgtcatacatgctaacattttgctaaatataaatctacaagtatcacagctgcatatatttctgaagtggttagaacagaggaggatgctggaaagttgagttctttaaaatcttcgttcaaaacaagagattttcatctatgtcctcttctttaattccaaagcagtggccccactccttcagggtgatgtgcttatccttgttggggtcacactcctcaaagaaacgggttatgcagtgttccatgggcaccagagatgctcgcagaggagcaagttcagaatgtgtcaagactctatccatagggtgttggtcaagttcactaaactgccagtgcacaggatacacatacatgtggtagtttttcttaaagtcccttaagagaaggtcaatgggatggtccccagccaaaagcctcttttcatccaggtaaattttcttgactttatttctctgcttctcatttagataaccagcgtgttcagagttggcttcataaagctgcatgaggatattcttgagccagtctctcatccgtagaggaaactgaatcacttcaaagtccgtacaagtaggaatagatttgcaggctccaaaataatccagctggagttgatgcccctttttggtcccctccagtctgcatttagtagcgaatagatgacaggaactagcataggtctgattgtcagtgccacaaacttgatcaaggggttttgttggaggacaagtcactggatcctggcagacacagtgaggttttccctgttggtctgccttacagatgtggcctcttttacactggaagctcatgcaagaatccacagcatgcaccctcatgttgccttcacttgacgtttcctcctcatttgatgagttctctgctttcttggcctcttggtgctctccaggctcagtggtacctatattttcattttcatgtactttttctctttgctcctcaattttgaggtgataggcaatggattgagctctctcggcctccagaaaggcctggcttggccaa

SEQ ID NO: 430822 - DNA, 1517 bp, Homo Sapiens
caacgaaaatgattaatttagaagcacacgacgtcatgatgaaaaacacaagcattttagtagcaaggacttgatcagttaagaattagttttcttgtaaaacattctaaagccaagtaaaatatccattcttataacatacctataatatgagactaaggaataggttacatataggtctacaacacattggtttgtctttaaaaaaacaaaagtagacatttataaataaaaaagagggacaattcacataggaaaaagaggtacacgagaaaatactgttgcacgcaataattttcacacagattaacatggattaacactttttattacagaaaccgtacggtgaaggaacacaacagaccagggctttcatagggttattgagattgagctgagatgacctgggagagaaagatctaggtgagatgaccctggggagggagccacgttccttggacctggtgacttagtgtcgccgggtctcctcttccctgttctcattttggggagtgagtctttctatccagtgtcctgaattcatgagcagttgaaaggtaaacatttctgcagatccattctctttctatcctaatggataccatttttggaaacgtgacagagtatcagaggctgcagctcagtacacgtggtcaaagcaaaacgggatggaaacttccagtcactctgatttgttgcccccgtcacccactgatgcgcttgaagctgggacccagtgagacagcagcagcaccctacagggcctgctggctctgccgtggtgaggtggatgacaagggcccggcgccacgcctcagccccatgtgtgcggagtggcctgggacacagcccatgcacgtccaagacaccagtcttgactccgacctctaaagagctccttctcctcatctgtaaagctatacttctcctatccaatttggtttgatatatatacacaaacatatatatcaacatctatctctatacagtgattctactaaattagaaattctgctgccccaaagtatgactttcttgtctatttcatttggttaaaaaaatgcacacacagaggatgaagagatgatttgggggctagagatgactgtgccctggaaagtccatggaagaagcttgaagtgagcaggaacacaaaagggaggagagcagaaacgggggaccgactgactcagggcagcgctgacgggaacatctgcttggggtggggcggggcgggggtgtgctctctgttccatttgttagttacaggaagctaccaaggatgcacatggtcaagtcactttctacttcccaagttcctccttataacctgagccaaacaatttcaacaatgacaatccattgccccttcagcccagcaggcgactctgacagggaggtgtgaccaccagtctcaaggctgagtggggccttcttgctggctctcgcgctttctgggagtcctgggtgccttggcccagggcagtggttacaaggaagcgggggagagcagccaa

SEQ ID NO: 430823 - DNA, 1620 bp, Homo Sapiens
tcagcggggctatgggcaaaatggcgctgcagctcagggagggcatcgcgtccaaaggctgtgcgctgggccacagcagcaggtggtggagtacggtccacaaatgcccgctgccagctgaccagcaggtcctcttcagagctggcagagctagctggggcactgagtgttaggggtgctgggctgggctggtggtggggtgaggcctgggctgaggcaggggtgctgggcactgggctggggcgggcccgctcactcccctcctctaccaggctcagggaaatggcctggcgggtagcgtaagtgcagttgggcagggggctgttgcgggggatccgaaccttatcctcagagaactctattaccctgcggccaggatacagtgggtgtggtggagacggggttgggtaggggttcagcttctcaaaggctggcaggggcagctcttcctccggggagcccctggcagtacccagagagtggcactccccattgggttgtggggtggggctgccaggggccgggggactggctggatcacctgggacaccctcactcatgtccacatgcacaaagacatcctcagccaaggggcgcccggcgctgcctgactgggctgaattgagcagtagagactccggcttctctaacactcgggcaatgactgaggtaggcaccacagcccctggggctaggctgggagcaggacctgggctggcggcctcttgaccactgtgcaaatgtttccgaaccatgtcctgtagctcacagggcagatcggcaaacttgtggtttcggaagtgggacttgttgcacttgaggagctgtacagccaggttgcagtccagccggtaccgctcattgagctcttccagcttgttgatggtgttcttggcatccagcagcttgttggtcagctccacaatctcccagtccagcgtcttcctatccatctcagccttcttgatcagtgtgtgcagcttgtcctccaactcctggttggtccgctgggaagccgtgtagctgttctgcagcctgcggaacttatccttaaatttgtccagctcctcgcggctctggcccagctccagctccaggcagtcctgcccaatttccagctcacgttccagggcctcagtgcgtctggtggcggaggccaggcgccggcgaagctcttcattctcctcctgtaagagcttcatcctttctgcatcagtcaggggttcctcctgctcaagccgggatccaggaatttccaaacgcagctcccgatgctctggtggtgccttacggtagggtttcttagcaggggcggcactagtcattctgggaggtgacggctcctccgcctgcgtctgtttgtcggcagctctctctgttccgctgtccgggagttagccctcggctctccgcatcccacggcccctccacttcctttagccacagctcccgctctggggttggactggggcaagtcgctatctcttcttctttccaagtaggcactgtaatttcttccagtccctggggcacctgaatcttcagctgaaattggggcagatgctgctaacagctgtggaaaggctgatctaagctttccgccgctgccagctgcgccaa

SEQ ID NO: 430824 - DNA, 679 bp, Homo Sapiens
cgtcatggagtagcgcgaggcccccgcccaggtcatggccgggttcccgcgaccggggcgggggcctcgcgctactcaatgacgaggcagcggggcaggtgctgcgagaaatacttgaagagctcgggggtggccccggggcagttggtcagctccagctcctccagctcctgcagctgcaccaggcccgacagcccggtggtggtgagcagcgggcagcctgccagacaggaggcgcaaactccccagggccaggaggtgcttcagcccgaagtcttgcacctggcagcaccatcgcaggtagaggctgcggagggacgacatggtggacagatagctgaggccagtgtccgtgatgcgtacacacctgtcgagcacgagctcctctaggcggtgcaggtcgcaggccacgtactccagcgccatgtcggtgatgcgtgggcaccacgagaggtcaaggctgcgcagcttgcgcaggttctcggccacgagctccacgccgtcgtcggtgaccttggagcagcccgagaggctgagcgcggtgaggttgggcaggctgtgcaccacgttgaccacgccgtggttggtgatctcccagcaggagagcaggcgcagcgtgtgcgtgctgtggccctggcgcgccgtgaagtaggccagcgccgggtccgtcacgtgccaa

SEQ ID NO: 430825 - DNA, 868 bp, Homo Sapiens
ccctctggtctgtctctactgcattcttcaactcctgggagcaggtttccctcacaaactccatcatcacgcgttccatcagctccacggccaggccctggctcagctcacttaacaccagctctctctcttgtttcaacctttcctcttcagcccgctgcctctcgtgctcccttcgctctctttccttagacacttcttcagctgcaatgtgcctcaaaatgcccgtggttgcagctgttaacaaatcctccatagcagcattagaaacacccagggcggcagctgcgtaggcagcacccgcagagccaacttcctcacagtccctctgcagggcctcctggatgagctcgtccaccacctgcgccaggtcctcgtcagagtacatgggcacgggctctggaggcggtggttcaggctgcacagacagctggaagaggctgggcgccacagacggggtcagtgccaggacaggaggcagaggcactggtgagggcgcaggggctggtagagactgtgggagactggacaggggtgcatccggctctacaccacactcctctcctctccctccgcccactgtgtcggagccgggtctctgggtgctgacgggcagctccgcggccaggctctccccgatgtacttgttctgggagttgaagctgcacacaggggtatgacgagggacggggggcaatggccctccgttcacaatttccccgactgacaccgtcagcttcctagtaataaacaccgacttcctggtcttggataatccctctggttccaggaatgcagaccggttcagctccacacagccgtcggaaacggtgaggccgtggcaggtgaggaagtcggtggcctccaa

SEQ ID NO: 430826 - DNA, 869 bp, Homo Sapiens
  misc_feature (106)..(153): n is a, c, g, or t
caaaatttgaagactgattgttgtaattcccaaaatcattgtagcttccaccacctccaaaattgcttccatcattaccaaatccattatagccatccccactgcnnnnnnnnnnnnnnnnnnnnnnnnnnnnnnnnnnnnnnnnnnnnnnnntgaagtttcctccacgaccgaagttgtcattcccaccgaaaccacctccacgaccaccaccaaagtttccagaaccacttcgacctctttggctggatgaagcactagccatctcttgctttgacagggcttttctaacttcacagttgtggccattcacagtatggtatttctgaatgacaatcttatccacggagtcatggtcgtcaaaggttacaaaggcaaagccccttttcttgccactgcctcggtcagtcatgatttcaatcacttcaatttttccatactgttcaaaataatctcttaggtgatgttcttcagtgtcttctttaatgccaccaacaaatatctttttcacagttaagtgggcacctggtctttgagaatcttctctggagacagctctctttggttccacaactcttccatccaccttgtgtggccttgcattcatagctgcatccacctcctccacagtggcatatgtgacaaacccaaagcccctggagcgcttggtgtttggatctctcattaccacacagtccgtgagcgttccccattgctcaaaatggctcctcaggctctcatcagttgtttcaaagctcaaccctccaatgaagagcttcctcagctgttcgggctctttaggagactctgacttagacatgacggcagggtgaagagagactttaacgatgcttcttcggcggcgccaa

SEQ ID NO: 430827 - DNA, 1034 bp, Homo Sapiens
gagaagcccaggcggtcagcgttggagacgtcgaagaccccgcccaccgcagccgtgtccacaccgcctgtgcctcgcttctgaagtcgcagccgcttaagcacctccgagaacttctcatgcttgcccaggttgggcagcttgatatgcacacctgcccgcagcccggtgcccaggttggatgggcaggtgaggatgtagcccaggtgagggttccacatgaactcatagtccttagacttgaagagagtttcaatctgggtgaggccggtgcagaagcgggtgaacacctccttcatgttgccccccttctgcatggagatgacccgcaggtggtcctcctcgttgacccacaccaggaaggtcttattgtcattgtgccagataccgcgggcgtcgggccagtcgcgggccatgcccgaggccagcagcaggggcgacacgggcttgtcgaagaggaagtggtcgtcgatgagctgctgctgctccgcctccgtcatgctcttgagcgcgtagtatcggcccgccaggtcgccgtccaggctggacagggcttccaccgcgagcttctcgatggcgcggcgctccccgcggctgcagtgcggggggaggcagaagccacggatgctgcggcccgtgcgcacccgcgagctcagcacgtagttggggtccaggtcgtcgccgccctgcaggttgtcggggttgaggtcggtcttgtgctcatcgctgggcttgtagccgccgtgccggtcctcgatgatggggtcgaagagatccttgaacacttcgtaggactcctcgtcgcccgccacgcagcccacggtcatgatgtacgggtggcccgggttgtccacgcctgtctggatgacgtcgtccagcgtgaagccgctcggcgtgctcttggcgcgcagctccgcgtacagctcgggggtcagcaccttggccatgtggttgttgtgggcgctcaggtcggggaactcgtcctcggccgggaagcgcagcttcagtgcgttgtggctgttggagaagggcat

SEQ ID NO: 430828 - DNA, 859 bp, Homo Sapiens
  misc_feature (687)..(735): n is a, c, g, or t
gagcaaagcgtacaaaggttccaagggacaggaccaagaacgaggggctgagacatttacaacagcaggcattttctcttcctcttcttcacgggaggcgggcagaggactgctcggatcgcttcgtcaaacactgtcttgaggcctcgctgtgtgagcgccgagcactccaggtattttacagcaccaatctccttagccatggctagaccctgcggataggtgatgggagtcagcttcttctccttcagtttctcgatcgtgtctttatcatccctaagatcaagtttagttcccactaggatgatgggagtgttgggacagtggtgccgcacctcaggataccactttgcacggacattttcaaatgatgcaggactcacaagggaaaagcaaattaagaacacatctgtttgcggataggatagggggcgtaatctgtcataatcttcttgtccagctgtatcccataagcccagattcaccggttttccatctaccataacattggcagaataattgtcaaagacagtagggatatattctccaggaaatgcattggttgtgtaactgatcagtaggcaagttttacctacagctccgtctcccaccaccacacacttgatggcctgcatcagggccgctcgctgggccgcggcggcggcggcagggcgctgagataggaannnnnnnnnnnnnnnnnnnnnnnnnnnnnnnnnnnnnnnnnnnnnnnnnggcgctgggtgccggggccgctgtccacgccgcctcgccctccgcggactggaagccgatgcccggcagcggccaccacccaaagctgaggaaaactgcagagaaacaggaaatggccgcccaa

SEQ ID NO: 430829 - DNA, 1401 bp, Homo Sapiens
caggttctaattttaatagagaaggaagaagttacagctcagtgcaccatgaagttgagacagagatggagacacctcagccccacctctctggaacaggaaagatgattggagagggagcacaggtcagcgtgggaagagggtcatggtggacatgggggtggggtgctctccccacctcctcacattatgcctacacgaacacagacacatgcaggtgcctttgcagaaacaaagtcagggttcttcaagtcacaaagggaagggcaggaacaactcttgcctctcagtcccacacaaggcagctgtctcacactttacaagctgtgagagacacatcagagccctgggcactgtcactgcttgcagcctgagtgtaactccctccttttctatctgagctcttcctcctccacatcacggcagcgaccacagctccagtgatcacagctccaaggagaaccaggccagcaatgatgcccacgatggggatggtgggctgggaagacagctcccatctcagggtgaggggcttgggcagaccctcatgctgcacatggcaggtgtatctctgctcctctccagaaggcaccaccacagccgcccacttctggaaggttccatcccctgcaggcctggtctccacgagctccgtgtcctgggtctggtcctccccatcccgctgccaggtcagtgtgatctccgcagggtagaagcccagggcccagcacctcagggtggcctcatggtcagagatggggtggtgagtcacgtgtgtctttgggggctccaggtgaagcagcgtctccttccccttctccaggtatttgtggagccactccacgcatgtgtcttccaggtaggctctctggtgctccgcctcagaggcatcatttgacttttgctcggagatctgagccgccgtgtccaccgcggtccaggagcgcaggtcctcattcagggtgagataatccttgccgtcgtaggcgaactgttcatacccgcggaggaagcgcctgtcgggccccagctcgcagccatgcatccactgcagggtgtgagacccggcctcgctctgattgtagtagccgcgcagcgtccgcaggttcactcggaaaatctgtgcggtgtccctggcgctccgtgtctcccggtcccaatactctgacccctcctgctccatccacggcgcccgcggcaccatcctcggactcgcggcgtcgttgtcgaagcgcacgaactgggtgtcgtccacgtagcccacagagatgaagcggggctccccgcggccgggccgggacacggaagtgtggaaatacttcaaggagtgggagcccgcccaggtctgggtaagggccagggcctccgagaggagtaaaaggagggttccatctaccccaa

SEQ ID NO: 430830 - DNA, 856 bp, Homo Sapiens
acaaatagcactttttatttgccactatttgaagtctgaactttaaacagattcttggactggtggttcatatccatcagctcgttcaactttagcacctgtctcgtccccagtggcttttccagaactactgccttcaccatgaagctccatgagctttcccaattcaaacttgggcttcttcagcatttttacttttctaacgaagacatcatggagaggataaatagattggcaagccttttctatgtcttttccaatgctgtctggaatcaatttattgaccacttctttcaagtcatttgtctgcacctctcgggtcatgatttccatcatcttcttccggatttggcggacctgttggtgctgagcataagaggtcttccgtatctgattgttgcgttttttagtaaaaccaacacagaacagacgaagcaagtaaccatcggtagtcttgacatcaacgtgagcttcaatcattgtctgccattttttgaccatggaacacattttgtcacgggtaagatccatgccatggaagttagtcaggcagtttttaccctgaacatcttcagtaatcagcttgaattttctaaatgcaacttcatcattctgcaaatcagcaagactcacttcaaacacacgacccttgagaccatcagatgcaattttggttccttgggtcctggtgacgagcgtctttccaatatttcttatattgaacatagcaggtgctttcacatcataccaatctttcttagaaaatggatcaaccactttcttcttggctccctttttgccgcctttcgtaaggcgcttgttcttgccaaccgccatggtgctggtcagagaccaa

SEQ ID NO: 430831 - DNA, 388 bp, Homo Sapiens
gctcccttatacacagccagtctgcaggtcgatacagtagaaattacagaaactttatcacgtttagtaagtatagaggctgaaaatccagatgaagccgaacgacttgtaagagaaaagtataagagttgtgaaattgttcttgatgcagatgattttcaggactatgacactagcgtatatgaataggtagatgtttttattttgtcacacaaaaaagaggctcgcacctcttttccttatttctttttatgatttaatacggcattgaggacaatagcgagtaggctggatacgacgattccgtttgagaagaacatttggaaggctgtcggtcgactaagttggcagcatcacccgaagaacatttggaaggctgtcggtcgac

SEQ ID NO: 430832 - DNA, 1210 bp, Homo Sapiens
  misc_feature (153)..(191): n is a, c, g, or t
  misc_feature (895)..(957): n is a, c, g, or t
ggccggatgtcagaggggtgccttgggtaacctctgggactcagaattgaaagggggctggacattcttttatatcgttagccttcctacccagcacagtcacatgcacacagggagatcagaaaccttttcgccacagccccaggagcccgnnnnnnnnnnnnnnnnnnnnnnnnnnnnnnnnnnnnnnncgtggaagactcctcctaccgagcctcccaggcgctaggcgtttgcataaacaagagagctggagaggctgccctcaacagtgcgctggggaaaggggagggaacgtgacaggcaggtgtgggatagggacttctcttccggtcagagcaagggtcgtccgaaaccaaaacaaccctcttcccttcatctcgccccggatccaaagtcttggggctaggctggggcgggagtggcacggagatgtagggcgccccttttagctgcgcacagaacgaaagaactcgttttttctttaagtgagtgtgcttgggtgacgcttagggcgccctccgcagtgcgcgcaggaaagcgcactgaggctgcggaggcagagctgcatgctgggtgcgggaagaggtgggcgagaagcaaaagaaggaagattgggagcgcatggtttagggtggggtggagtggaagggcaaatggggaccatactagactgcagaactaactaaaagggcacggactcagcgactccgcgacggagcctgcctgggtgagggagtctctgggacgcagggggctcctgtagctggcaggttgctgggcaggagggggtcacaaacacggcagggaagtcttgtcgctgcgaaggggacgcggcatccatctctcctcgggaactttgaaaatgctcagttctggcctagtctccgctggnnnnnnnnnnnnnnnnnnnnnnnnnnnnnnnnnnnnnnnnnnnnnnnnnnnnnnnnnnnnnnntccggccgcgctctccgctctttatcttcttccgcgccatgtggccccgaaaactcgcctggattttggcggcggccgcgttggcgccgggatcgtccagcgggatgtctagaatgtcgtcgtccggcttggagcaggcgttctcggtgcagcagtccatgctggtgtcggggggtcctctgcggggacgaaggctggcgcagggcgggggtggggtctgtgtggtgccgggtgggggctctggggcagccaa

SEQ ID NO: 430833 - DNA, 850 bp, Homo Sapiens
ttggtggcagagctgctgtttcggcgcgggtcggctggcggccgactgccccagagcccccacccggcaccacacagaccccacccccgccctgcgccagccttcgtccccgcagaggaccccccgacaccagcatggactgctgcaccgagaacgcctgctccaagccggacgacgacattctagacatcccgctggacgatcccggcgccaacgcggccgccgccaaaatccaggcgagttttcggggccacatggcgcggaagaagataaagagcggagagcgcggccggaagggcccgggccctggggggcctggcggagctggggtggcccggggaggcgcgggcggcggccccagcggagactaggccagaactgagcattttcaaagttcccgaggagagatggatgccgcgtccccttcgcagcgacgagacttccctgccgtgtttgtgaccccctcctgcccagcaacctgccagctacaggagccccctgcgtcccagagactccctcacccaggcaggctccgtcgcggagtcgctgagtccgtgcccttttagttagttctgcagtctagtatggtccccatttgcccttccactccaccccaccctaaaccatgcgctcccaatcttccttcttttgcttctcgcccacctcttcccgcacccagcatgcagctctgcctccgcagcctcagtgcgctttcctgcgcgcactgcggagggcgccctaagcgtcacccaagcacactcacttaaagaaaaaacgagttctttcgttctgtgcgcagctaaaaggggcgccctacatctccgtgccactcccgccccagcctagcccc

SEQ ID NO: 430834 - DNA, 790 bp, Homo Sapiens
ggtagctgcctgtttggctcgagtctgagtgatcaaagcctccaatttttcagccaagagaccttcagtgcccccagacctcaatctcatctgcatgagttcattgatggctgactggtccccaatattatatgcacaatagcggatgttgggtgaaatctcttccacacgttggttatacagcacagcctgctcctctgtgaaagcactggctagcttctcatagatagttttgcatttgttaaaagcctcaatggcagctttccattcttgatgttcaaaacgtagcattcctgagaggtaagctgtgtaagcctgagcctctaatttggtcttggcatccacgcgattgctctcacacaagcgttccaattcctctgcatgcttcacggctttgcgtaggcgagataacaagtgaaaccgttttcggggttcagtgttggcttcctgtttcagctgcatggcgtagctccaggctctttcagcatccatcagaaccagaagcaagtatctattatcggtcagaagctcttcagtcactttcttccctgtgaatttgtgtctgttacccatcttgaagttgagtgtttttcgaagacgtctttgtctacgggaacagtagcccctgtacctctgaaaatctccatgccgtaaaccatgctgctgctgggattccttaataatctgaagaatctccaaactcaggctatccccaaattctttgtttgccttcgatccggccgaagggcgttcgttttctttattttcttcccctccggcaccacgtcca

SEQ ID NO: 430835 - DNA, 581 bp, Homo Sapiens
atatgcttttcttagatgtttctttttttaaagtttaagttatttatttaagccatctcctgccacaagcaaagggatgggagaccagtataccagtcatcatttgatacaagtaaagaaggtgagcttaaggtcccatatactttttctggtccatgtgcagagtaacggtccaaaccagtgctgtggtccctggtgcccgggtagtggtccagattctctttattcatcttcgtagccagttggaagtggattcacatgagggttatggaatagagtatggttaccatctccccagggaaacggcttggtcctgatgcggagatgggggtaggcgatgaactcgggtctctcgtgctctccgtggtgcgacttcaggtacacattcagcatgctgactgccaccccggggagcgcgacgaagaaggtgagagtcttccacatgcgagctgagccctcttcgccatgggcgccactcgacataggccgccccagctgtgggcgggaccgacccagcagccgagaaaccgaggacacaccaactaccgccatttttgatttggactgccgcagcgccccaa

SEQ ID NO: 430836 - DNA, 484 bp, Homo Sapiens
ttgtcccagatttattgaaaataatacagcactacagaaaaaattcaaacaggtccccgaggcgttttgaaattcatcccaactgtaggctgagtgacctgaaggttggacagactgccgaagtccaaaagcttcagcatttccttagtgtcaggatctacttcaataatctcctgatccaaggctgagacctcaggaacataattgtctctcctttctctctcctcctcctgcagcttgatggagatacctcttactgggcctctctgaattcgcttcatcagatgcgtgacgtaacctgctatcttgttgcggagctttttgctggggataatggcgatctcctcgcacacgcgcttgttcgtgtggaagtcgttgcccaggcgcgtgtagtacttttctatgatgacccgggccgccttcttcacggttttggtgcgaacgcggcccataaaggcgggtccttgccaacttttttgtacaa

SEQ ID NO: 430837 - DNA, 950 bp, Homo Sapiens
caggtctttgcggatgtcccacgtcacacttcatgatggagttgaaaggtggtttcgtggatgccgcaagattccatacccaggaaggaaggctggaacagcgcctccggacaccggaaccgctcattgccaatggtgatgacctggccatcgggcagctcgtagctcttctccagagaagaggaggatgcggcggtggccatctcctgctcgaagtccagggcgacgtagcacagcttctccttgatgtcgcgcacgatttcccgctcggccgtggtggtgaagctgtagcctcgctcagtgaggatcttcatgaggtagtcggtcaggtcccggccagccaggtccagacgcaggatggcgtgggggagggcgtagccctcgtagatgggcaccgtgtgggtgaccccgtctccagagtccatgacaatgccagtggtgcgcccagaggcgtagagggacagcacggcctggatggccacgtacatggccggggtgttgaaggtctcaaacataatctgagtcatcttctctctgttggccttggggttcaggggggcctcggtcagcagcactgggtgctcctccggggccacgcgcagctcgttgtagaaggtgtggtgccagatcttctccatgtcgtcccagttggtgacgatgccatgctcaatggggtacttcagggtcaggatgccacgcttgctctgggcctcgtcgcccacgtaggagtccttctggcccatgcccaccatgacgccctggtgtctggggcgcccgacgatggaaggaaacacggctcggggagcgtcgtccccagcaaaaccagctttgcacatgccggagccattgtcaatgaccagcgcggcgatctcttcttccattgcgaccggcagagaaacgcgacggcggagcggcggaagaacagagtgcgagagctggccaacggccaa

SEQ ID NO: 430838 - DNA, 1809 bp, Homo Sapiens
  misc_feature (40)..(48): n is a, c, g, or t
cctctccagttgctccttctcccactctctattattggannnnnnnnnaacggcagcacttttattttccttacacaatgacgtgttgctggggcctaatgttctcacatgacagtagaaaaccaaaatttgttgtcatctcttcaaagaattgagaattgcgtacaaaaaaaaccttacataaattaagaatgaatacatttacaggcgtaaatgcaaaccgcttccaactcaaagcaagtaacagcccacggtgttctggccaaagacatcagctaagaaaggaaactgggtcctacggcttggactttccaaccctgacagacccgcaagacaaaacaactggttcttgccagcctctagagaaatcccagaacactcagccctgacacgttaataccaaggggaacagttaacttcaatacaaggtcaaaatcagcaacaagttctacaatccagtgctgatatcagatacaagcttcaaggacaatttcttttcgaaggcttattccagtttcgtgaggctagcatgaggtgtgtgcatttgccaggggcaaatttctattctcaattaacccatgcagcaaatgctacgcatctgctgagtccgtttagaagcatttgcggtggacgatggaggggccggactcgtcatactcctgcttgctgatccacatctgctggaaggtggacagcgaggccaggatggagccgccgatccacacggagtacttgcgctcaggaggagcaatgatcttgatcttcattgtgctgggtgccagggcagtgatctcttctgcatcctgtcggcaatgccagggtacatggtggtgccgccagacagcactgtgttggcgtacaggtctttgcggatgtccacgtcacacttcatgatggagttgaaggtagtttcgtggatgccacaggactccatgcccaggaaggaaggctggaagagtgcctcagggcagcggaaccgctcattgccaatggtgatgacctggccgtcaggcagctcgtagctcttctccagggaggagctggaagcagccgtggccatctcttgctcgaagtccagggcgacgtagcacagcttctccttaatgtcacgcacgatttcccgctcggccgtggtggtgaagctgtagccgcgctcggtgaggatcttcatgaggtagtcagtcaggtcccggccagccaggtccagacgcaggatggcatgggggagggcatacccctcgtagatgggcacagtgtgggtgaccccgtcaccggagtccatcacgatgccagtggtacggccagaggcgtacagggatagcacagcctggatagcaacgtacatggctggggtgttgaaggtctcaaacatgatctgggtcatcttctcgcggttggccttggggttcaggggggcctcggtcagcagcacggggtgctcctcgggagccacacgcagctcattgtagaaggtgtggtgccagattttctccatgtcgtcccagttggtgacgatgccgtgctcgatggggtacttcagggtgaggatgcctctcttgctctgggcctcgtcgcccacataggaatccttctgacccatgcccaccatcacgccctggtgcctggggcgccccacgatggaggggaagacggcccggggggcatcgtcgcccgcgaagccggccttgcacatgccggagccgttgtcgacgacgagcgcggcgatatcatcatccatggtgagctggcggcgggtgtggacgggcggcggatcggcaaaggcgaggctctgtgctcgcggggcgccaa

SEQ ID NO: 430839 - DNA, 412 bp, Homo Sapiens
  misc_feature (177)..(222): n is a, c, g, or t
gcttttaggatggcaagggaattcctgtaacaacgcatttcatattgggaaggactattaaaaaaacaacaatgtgcattcaaagtcttggcccacattgtgaattttgggggatgcttgctccaaccgattgctgtcaccttcaccgttccagtttttaaatcctgagtcaagccnnnnnnnnnnnnnnnnnnnnnnnnnnnnnnnnnnnnnnnnnnnnnntaaagccatgccaatctcatcttgttttctgcgcaagttaggttttgtcaagaaagggtgtaacgcaactaagtcatagtccgcctagaagcatttgcggtggacgatggaggggccggactcgtcatactcctgcttgctgatccacatctgctggaaggtggacagcgccaacttttttgtacaaagt

SEQ ID NO: 430840 - DNA, 1197 bp, Homo Sapiens
gaggaggggagattcagtgtggtgggggactgagtgtggcagggactccccagcagtgagggtctctctcttcctcttgtgctcttgctggggctggtggtccaggggtcttactccttggaggccatgtgggccatgaggtccaccaccctgttgctgtagccaaattcgttgtcataccaggaaatgagcttgacaaagtggtcgttgagggcaatgccagccccagcgtcaaaggtggaggagtgggtgtcgctgttgaagtcagaggagaccacctggtgctcagtgtagcccaggatgcccttgagggggccctccgacgcctgcttcaccaccttcttgatgtcatcatatttggcaggtttttctagacggcaggtcaggtccaccactgacacgttggcagtggggacacggaaggccatgccagtgagcttcccgttcagctcagggatgaccttgcccacagccttggcagcgccagtagaggcagggatgatgttctggagagccccgcggccatcacgccacagtttcccggaggggccatccacagtcttctgggtggcagtgatggcatggactgtggtcatgagtccttccacgataccaaagttgtcatggatgaccttggccaggggtgctaagcagttggtggtgcaggaggcattgctgatgatcttgaggctgttgtcatacttctcatggttcacacccatgacgaacatgggggcatcagcagagggggcagagatgatgacccttttggctcccccctgcaaatgagccccagccttctccatggtggtgaagacgccagtggactccacgacgtactcagcgccagcatcgccccacttgattttggagggatctcgctcctggaagatggtgatgggatttccattgatgacaagcttcccgttctcagccttgacggtgccatggaatttgccatgggtggaatcatattggaacatgtaaaccatgtagttgaggtcaatgaaggggtcattgatggcaacaatatccactttaccagagttaaaagcagccctggtgaccaggcgcccaatacgaccaaatccgttgactccgaccttcaccttccccatggtgtctgagcgatgtggctcggctggcgacgcaaaagaagatgcggctgactgtcgaacagccaacttttttgtacaa

SEQ ID NO: 430841 - DNA, 711 bp, Homo Sapiens
gctttttaaattgctttattagctttaaatttttccatgcaaatgggtgaaactactgctgacagaaacttacactgagtgcaaaggcaatcttcaaatagaagctggcaacacaagacccacttgacacatggaaataacatagggttcacagcaaacggatcagtaaaggcatattaggaaaatgcaaggaaaaagaaaacagcgggaatcacagtattaatctcatgataaatggcaggagtcaaggcataaggcaaaattcatcatgatggtcatggtgattagagagctcccccataaggatacgcagacaattcctcaactgcagctccctaagttttcttctgatttctctcatctcctccatgaatatttccatatcatctccatctccacccatcccatcattgatctgcctattgggtatggcccatcgaaaattaggggcaagtcggcgagcctgtccccgtcgatttcctgcaggctggtggccttcacctcctcccaaagggcggtcttcctctccattctgcataggctgctccatctcttcgttttcctgggcctatccttgcagtctccttctcctccggattctcgccgcgaggtgcgccgcggagacacttagcctcgcagacctgctccgcttttccccgggccgaatgccagcccgccgagctcagggcagcggggagctggtagccccaa

SEQ ID NO: 430842 - DNA, 337 bp, Homo Sapiens
ccttgaagccaataaatacaaagcttcctctgccttgtaacaaaggcaggttggcatagggccctggagcctgactgcccaggcccactttgggatggggagcagctatcactcctctgctggcttcacttgcgtggcggcctctagctggcaaagtagctcatcccactgcacgaattgcttggagagaagcattgtagtcttgttgtattcctccaggagagccttggactcctcagtgatttccacacactggtcctgctgctgaatgtggatctgggccaagcgctgcaggcgggcagcatgctcaggaacggctgtaaaacacaacacccaa

SEQ ID NO: 430843 - DNA, 916 bp, Homo Sapiens
tcacaccacaatggcccagtggacagctgtgcactctgcttgtgcttaagtgcctgggtgtggctgaggggaaggcgtgtctgcagaacagaagaacagctgtgtttcacaagtactgaagcattttagactgcatgggggggtatatattttcatgttgaagggaagaggggaaatcagcaaagtccctcccacagagcattaggctgccttgcagagagccacggcagagaagcggacttctccttgctcacgctcggtgaattctctgcagaccttggcagcgtccttcagcagggtgtcctctgaactggcgccatggttcaccggaaaaggcattcgtccatcaagttcatagaggtggccatccacgttgttaaacagaataaaatggaaattcaccttgtcatctacccgacattggccttcctgtgccacggcatcatgggctgcctgtatggcctcattcttttcaaagcattttgctctgtcttcaggggacattttctctgtttcagaaagaaactgtttcagaactgatccatcctcaaatcccagtttgtcttgattattggccactgcgtgaataagtccgattgtgccacaggaattcccaatggtctgcttcatgaagtacactttaggactaacttcttgtcccttcagctcttcaatctgctttttcctgaagttctcatgctgggccgtgaggggaaacagcagcagcagcgcgcaggcaggcgctggcaccgagcccagagactcctcttccagccccagcacgtccacgaagcgccactggccggcgacccccagccgggacagcactttgttcagcatctcggggttgatctccatcggcttgagctgcatcttcgcggagcgcccggcagaaatccaacttttttgtacaaag

SEQ ID NO: 430844 - DNA, 792 bp, Homo Sapiens
  misc_feature (192)..(219): n is a, c, g, or t
  misc_feature (330)..(360): n is a, c, g, or t
ggctaccagaggaaaagccactcccaacccttgccgacaaccatcccgtttctgggttcctggagaagtctggaaagctgctctgtttagaggctgaaaggagggctggtgagagccccccagctgaaaccagccctgccccttacccttcctcacccctctaccttcactctcctcctaacactccagggnnnnnnnnnnnnnnnnnnnnnnnnnnnnctcaccccagggctcctgcctctccagcctggagacagatttgctttgggattgttacaaaaataataataacccaaatgcagagaagccacggaaagggctgagggcaannnnnnnnnnnnnnnnnnnnnnnnnnnnnnnattccaaaccgagtacaaaaccgcacccaaagcagacattctgtacaggggggtgggtgggctggggagcaagcgggaggggcggccctgcggttgctctgtacaagtccgggttggtgacggccccagcagtccccacagggcccctggggggcgcaggaagtgggcaggcgcctctagatgaaatattccttcttgtcgtcccctcctgactgcccgccttctgcattgatgatggccgtgtccgcgtctggagcatcgtcggagccttttgcctcatgtgtcaggtaggttcctttgtgccggatcaagtagtggccgaggaagatgagcatgatgagcagcaggaagacaatgaaagccacgatcccaccgatgatggcgtggtaggtgctggaggaggagggcaccggactggggtcattaacccaa

SEQ ID NO: 430845 - DNA, 717 bp, Homo Sapiens
cagggggggatccccattgggggacccataggaggtttcataccaggaggtgggcccatcatgcctggagggggtgctcctcggccccataggtgggggaggacccccacggccaggtgggtactgggttggagccccggcaatactggctgtggcagcagctgcagcggctgcaacagtacctcttccttgtggggtcatcacctgttgggatggcccgccaaccccacggactggcccagcaagtcctgcaggagcctggggcatgggaaccccagctgggattcctctgccagcagccctgccgatccctgggcccccggcagctccagcaagtggaactgggagcaataccagtatctttgggaggaggtccctctactgtcattgagaccagattctcccctcgcagcagcaccagaccgaggactcgcttctcttccctttctgcttgtttggagttctttggcttgatctttctgaactcatcacagtcacagaggatcaaattcatgtgcttgtcaaaagccttgaaggtgccaatgaagatccggccgtcctgcaggatgcacctcatcctgtaatcaatatgctgcagcatcttgctgctcttgcccaccgtcatggtggcggttctgatggctctgatacccgccggattcgcctcctcagaggcctagcctctctcccactagcctgtatttcccgccgccccaa

SEQ ID NO: 430846 - DNA, 894 bp, Homo Sapiens
ggggaacaagatagaacactggtgaagatacggcttgttgaggtctaaagccactgagaagctggcccaaggaatgaagagaaccaatggtatgtactggtggcagataacaagctttgcactgggctgaccaactgtgttttattaaatggctttgaataaaaaaaagtgaagtgcttcattgtgttttctcagaaactaatcaaaagattacagagtcctacacaatttggagacacaaagtggatgctgagcgactagaggtcactccaggtgtggaattttagaaagtgagtccttggagtaaatggcaccgtggctctggcagcagatagaaaggaatgatgctctggagaggaggtagggacactctgcggtcggccagtggatacatgaggggcccggctggaagtgggatctttaattcttcggtttatcttccactgctcatgcctctgtcttcataaatggtaatttcaataactcgcagtcctcgctcaatagggtctgtcaggaggaggccttgtggagcatagatcttctcattctgctcttgaatgtatttggagactttcttcagaaccttctcataatgagtttccatgcataggaagatggtatatgctgttaaacaagccaaacaaccttcgagatatgactggccgccgagcttctctgcttctgcataaaggttatttagagttcgaactgtttcttcaaactgctgcctatcaatccggttctccagctccgcagggaacttggtctggaactggcagcgtgtgccactgctgtagtctcgctgaatgaacacctttccggacaccggcgcctgctgcggcctcatggcgaggacaggacaccccgcgccgcctcctctgccctccagcccaa

SEQ ID NO: 430847 - DNA, 894 bp, Homo Sapiens
ttggccatcaggtaacccaagatgggtgcatacaagtacatccaggagctatggagaaagaagcagtctgatgtcatgcgctttcttctgagggtccgctgctggcagtaccgccagctctctgctctccacagggctccccgccccacccggcctgataaagcgcgccgactgggctacaaggccaagcaaggttacgttatatataggattcgtgttcgccgtggtggccgaaaacgcccagttcctaagggtgcaacttacggcaagcctgtccatcatggtgttaaccagctaaagtttgctcgaagccttcagtccgttgcagaggagcgagctggacgccactgtggggctctgagagtcctgaattcttactgggttggtgaagattccacatacaaattttttgaggttatcctcattgatccattccataaagctatcagaagaaatcctgacacccagtggatcaccaaaccagtccacaagcacagggagatgcgtgggctgacatctgcaggccgaaagagccgtggccttggaaagggccacaagttccaccacactattggtggctctcgccgggcagcttggagaaggcgcaatactctccagctccaccgttaccgctaatataagtaaagtttgtaaaattcatacttaataaacaatttaggacagtcatgtctgcttacaggtgttatttgtctgttaaaactagtctgcagatgtttcttgaatgctttgtcaaattaagaaagttaaagtgcaataatgtttgaagacaataagtggtggtgtatcttgtttctaataagataaacttttttgtctttgctttatcttattagggagttgtatgtcagtgtataaaacatactgtgtggtata

SEQ ID NO: 430848 - DNA, 889 bp, Homo Sapiens
ggagtgagcgtttatttgcacgattacaacatgcggacaaacccaggcgagatgagcgagtctacggttcctacccacccggctgacaaggggtggccccaggggccggatgcccagccccgaggcggccctactcctcctcctctcccgaagactctctctcgaacgtgtaggccatgaagcaagcgtcgggtctcttggggacaaggggatgccccggtctcacaatctcaaagcccaaaaagctgaaggttcggagcaaggcggctctgtcctcgcggttcttgtggaagcaaatgaagacatggtcggctcgcagctgctcctcagcgaactccaggagaactgcaaagctgtccttgctcccctcgggcagcgcgccgcccgggatctcgatgtagaggctgccgccactcagcactgttcgccagttaatgcgtttggcgtctgtgagcctggactggacgttgagaatcctcgtcttgtcgttggacgttagttcctctgttacattcagccgatcatcggagtagaataagttagctgaaagattgtgatccctctgactattccctcgcccacctgggatcttcaggggtgggtgaggggcatcaggagcaccaccgaggccccggacccgggttactacagcagtggagggagaccctggaactctcactgctgctgccgccgcggctgtgcaggcttaggagcggcatggtgcggctggcgtggatggtggcgctgggtttatccccttccttctctctggcgaagcagtggctattgaggatccgctgcagggaggatttcaccatccggccgctggggtccgaaaccaggaaaacctccgctgcgtctctccgcgccgccgccgctgctcgcccaa

SEQ ID NO: 430849 - DNA, 1037 bp, Homo Sapiens
  misc_feature (196)..(220): n is a, c, g, or t
ttggagccgagcggggcgggcgctctggagcggcgggtgctcgggctgccgtccgctccgccagaagcaccgagcagccgagccggggcccgccgccctcctcctccatgaggcccgagtgaggcgcggcggctatagccgacccgcggcgccttccccccgcgtcctatcgcgagcgcagcggcagcggcccctnnnnnnnnnnnnnnnnnnnnnnnnncatgtcggacggtttcgatcgggccccaggtgctggtcggggccggagccggggcctgggccgcggagggggcgggcctgagggcggcggtttcccgaacggagcggggcctgctgagcgggcgcggcaccagccgccgcaacccaaagccccgggcttcctgcagccaccgccgctgcgccagcccaggacgaccccgccgccaggggcccagtgcgaggtccccgccagcccccagcggccttcccggcccggggcgctcccagagcaaacgaggcccctgagagctccacctagttcacaggataaaatcccacagcagaactcggagtcagcaatggctaagccccaggtggttgtagctcctgtattaatgtctaagctgtctgtgaatgcccctgaattttacccttcaggttattcttccagttacacagaatcctatgaggatggttgtgaggattatcctactctatcagaatatgttcaggattttttgaatcatcttacagagcagcctggcagttttgaaactgaaattgaacagtttgcagagaccctgaatggttgtgttacaacagatgatgctttgcaagaacttgtggaactcatctatcaacaggccacatctatcccaaatttctcttatatgggagctcgcctgtgtaattacctgtcccatcatctgacaattagcccacagagtggcaacttccgccaattgctacttcaaagatgtcggactgaatatgaagttaaagatcaagctgcaaaaggggatgaagttactcgaaaacgagttcatgcatttgtactc

SEQ ID NO: 430850 - DNA, 616 bp, Homo Sapiens
gcgttcctgagtttatttggggcacacccggacgagggccctgcacctagaagaaggtgttgggcctcttggtggtgaagcgtggcttgtgctgacggcgcaggacccggtggggcagcgggaacttgatcttggagtcgtggaactgcttgacagccggccggcggcacttgctggccgcgatctcctccaccttcatgatctgaatggagtgggctcgggcgcggtgccgggcacccatgtctcggtagcactgggtgacagcgcctgcggtggtcaggtcccggtattcccggtacatgttgtgggtgccgctccgggagtcatagcgcagccagatcccgaagttcttcacccgcaggggggacttctcaaacacctgcccacagtagacaatctcccctgaagacttcttcatcttctttaactgagatacaaagtaccagaagcgggacttggcgacgacatgattaggcgcaaagattcgcatgcggtagaggggcggcgtgtggcatttgggggtgggcaggcagcgacccactaccttgtactctcgtagcgtgcccgaggccttcatggcgtgctctccgcgttcgccccaacttttttgtacaaa

SEQ ID NO: 430851 - DNA, 476 bp, Homo Sapiens
agaaggtgttgggcctctaggtggtgaagcgtggcttgtgctgacggcgcaggacctggtggggcagcgggaacttgatcttggagtcgtggaggtggggggacagccggccggcggcacttgctggccgcgatctcctccacattcatgatctgaatggagtgggctcgggcgcggtgccgggcacccatgtttcggtagcactgggtgacagcgcctgcggtggtcaggtcccggtattcccggtacatgttgtgggtgccgctccgggagtcatagcgcagccagatcccgaagttcttcacccgcaggggggacttctcaaacacctgcccacagtagacaatctcccctgaagacttcttcatcttctttaactgagatacaaagtaccagaagcgggacttggcgacgacatgattaggcgcaaagattcgcatgcggaaaggaggggcggcgccaacttttttgtacaa

SEQ ID NO: 430852 - DNA, 1615 bp, Homo Sapiens
  misc_feature (48)..(56): n is a, c, g, or t
aatgctgttcacaaacccatgaaggactcaaagtgacatggtggtttnnnnnnnnncctaaatgatcaacagatgttgctttctatatttttcctttgttctgtttgaactgggctaagtaagcacagttagaccctgctgttcacttgaccacgtcctaaacccgggacaagtgagcactcattcatgcacagcagacccggaggcatgggctggggcagcacaactgggttcccgcagcgccctgcctgcaggctcatgctggaggccacggaaccaggcggcacagggcagattctgtttgtcaagcgccccacaagccttgcccagattgtcaagctcagcagcgagaatggttttgacgaggaggatggaaacagcatctgctctggaagccgctctggcgtggggagagtggggagagggtgcgcttgctgcagctgctgccttaggaggctcctctgtggccaggcttctgcctccctgcaccctgagggaccattcgggtgcctcagggatgcccttccctcccaggggcactggcagcactggctgaaaggtctgaagagccagaggaggagccctgctggctggcccaggatggggcaaggagggagggaaagccaggggatggggagggacatgagatggagtttaaggcacacagcgagcgatggaggagggaggtgctggcctctcccctctgaattaactcccccaggagctcagctctggcctcagtttggtgaggttcagaagactcccagcaataaaaagtatttcttggatgatcaagtcctcccttactccagcctcctcttctcagctccccaggtggtgtgggaggggcccagtggctggggtggggggtaaggggcgacgggatgacagagactgctgctgctctcaggcgggcaagggaggcttgatggcgccagtaccgcggggcagagcaccagctgcggggctgctaaggcgtcacctgcgtacctttccgggcctgctgaaaagctcacaccatcctccatgcatcagaaggggaagcggaaagtgaaaggatcctcccccgagtctactctgcattctgcccacccagctgcttgcccccattccagggcccctgcaggacaggccaccccaggaggcctccactcatttgagatttcagaagattcagggaccctggagcttagggagggggagcacccaccacttccttggtctgctgatgaggtctctgctgctctctccctggaggggagtgggtggaaggtcaagaggggagagatggaagtaaaagcagaaaacaaaaccaaaccagaaaaccaccggtttgtaaattggcaacaagacctgcctgctggctgccctgaggcccacgggtctgctcccacagaggaaggaggcaggaagcggctggcaggctccagctcccgcccggccccgctgagggctggccagcctcatggctccgaggccgggactcctgccatgcgcctaacaggtccaaggtcctctccggtctgggagctgccctctgcgcccctcgagcattctcctggatcccggcgtctgctctctaggtcgttctcttcccgccaacttttttgtacaa

SEQ ID NO: 430853 - DNA, 1843 bp, Homo Sapiens
gggggatggaatttcagaacagaggaggcaggggtggacaagtaccaggtggctctcctttccctctgtgttatcttcaaaacagttgcaagcttggagaaagcaatgagctccactactcagcagaacccacggctcgtcccccgtggacgtgactgagcagtgactttgctgccccgttcgtcagccgcccatcccactgcttgactgaggggacctgcttgtgctcctggggggcaggactgggggtcctagctccttgcttctttggttccactcagagaacagttgtgcttgacggactcatccccactccccaaactccaagctcctgctggtgggctgaaggcactgacagagtccctgggacacccccaggtagccaccttctcttgtgctctggtgggtccctccctgggcacatcgtcccatcctcagctcaagccccaggtctaggaatagggacagtgaagaaagtgtaccctccaagaaaaagcttctgaggacttttctaattgtgcagatacttctgaagcccatgccgccccgcccccacagccccatccccttgcccagggcctcacatgcccggctcccccaaccggtccttccccttgggctgccggtgcagctgtgggcccaggctttggcaggcccagcttcaagacagtgggacacagaaaacactttgcagcatcgcctctccctccgccacacccaggtcagcagagatgggccccccaccgagagatcacagctctggtacagggaggtgggcagggttggagaggaatggagagacatgtcacctctatagaaacgcgtccaaagtacaagctaagcagggggaaggaggagggccagagagcagccggaaagaagaaaagaggaacacggcagggggttctgggggaggagggcctcacaccaccccgcagatgagcgtctccaccacgaaggtgttctcgaagtggcggatggcattgcagttcttggccccacgcttgttgatccgcctccgcgttgcccggcgccggagccggtaggtgtctttcccgttgcacaggtggtagatgaaggaccccagggcctccttgtcactgacatgctccgtgaccaccatctcctcctggatgatgtacgtctgcggcaggtaggtccccctcttcacgttcatgaggagctcccagaagttgcgagggggcagcacaatggtggtgttgagttcgatgacatagcacttgtccagggagatatcatggtacgcagtcagaccccgctggaagtcatggatgatgtctgcagggtcaccgccgccaaactggggcacaggcacgttgatgcgctcgtagttctcgtcgaggtagattttcacatcctcttccagctccatctgagtccggacctgggaggacagggagtcctcatacagcacaccacagcggaagaagttatctcgggccagctgcgcaaggaagaagtatctgtagatgtagacagaggcgaacacgaggcccatgagcagcacgaccatgcccatcgacaggtagcacacgccgcccactgagccccccctcttggatcgatgttgtgggggctgctcctccctagccggcgtcagcaggatctcggtggccgaggccggcgcaggggccgacgccgacgccttgtcagccttgtcgcccttgatgccagccacggcgggctggaagctaatcttcaccatggctgcgccggcccgcgcgtccgccccgcagcctctgccggtgcagcctcggtctctgcctccgccgctccgagctatggggcgggtcggagttcctttagccgctcgctcgcacag

SEQ ID NO: 430854 - DNA, 721 bp, Homo Sapiens
  misc_feature (83)..(101): n is a, c, g, or t
  misc_feature (290)..(324): n is a, c, g, or t
caggtagtcactgtattttattggaaaacattgatatatatttttcttcacagcttgaactgaacacaatattgcccggtttnnnnnnnnnnnnnnnnnnncattccgaaaatgtccacagcctcacgcctacctgcccttaccctcagctcttggctgggtctcccaccatgccccatccctccttccctcagaggctgggtgccagagggtggatgagaagagattctcaaagctgggcaggtcccaggaaaagccacttgatcgacctgggcagtgaggggaagcannnnnnnnnnnnnnnnnnnnnnnnnnnnnnnnnnnagccagatgaaatgaacagaaaaggggaaaaaacccagacgactgaactgcccacattgacttacttgtcccagaggcgaaagtcagaagcaagggcacggatcatgctctccgctgggggagtatgggggcaggcaggtgggcgagggaagaggcagggaagagggcacggagcacagatgtgaggaagcggcgccaagtcaccacggagaagcgggaggtgctggcggaccaggacgcagaggctgctgtagctgccgtcccctgggcagctggccgacaagactgttttattgcaggtgcgttctcttgagagcgtggtggggcccatcttccctctccccaccctttagctagcccagcatggttccttttacaagagaatgaaagtctccaa

SEQ ID NO: 430855 - DNA, 1418 bp, Homo Sapiens
actaggcaggggaagggctgcccccaggcctgttaaggagaaactgaggccagccctggcggagacctagcccagcggggtaaggagggtgggggaaaactgggtctgaaggaatgagggccccctccctctgggctttcctcctagagggcctcagtccctcctgctggctgggctgcacgacccccaatccttgctcccctaacccggaggagggggccagaccagggagggcagtggacagggagcctgggggagttggggagcgcagggcagggtccatggtgtgcagagggggtggcagccacctaggtggtcagttcctggcagcgatgaccacagagagtgccacaccccccaaggcaacagcagtcgccccaaacagccacttccatgggatggaccaggcacccttgccagggcacttagcaggcagccggctggggttgcccagcattttccggtacaaggcggtctccgtgctccgctgcgccgcatgcttcttcaccagctttgagagctctgcgtggatcgtcttgttggaaggttccagcttcagggctgccctcaggatggggatggcctcactgtactccccctgctgggccagcaccttgcccttgcggaagagagccttgatgttgtctggctggtgctccagcacaaggctgcaggagcgcagggctgcgcggtagtggtcgagcttcagctgcgaggccgccaggttgttcagacacttcaccttcaactgcaggagctgtgcctcctcctcgaacgtcatgtccactttggcgctggaggtgatagccttgatggcgaggtcgtaggagttggcggccaggacgaagtccgcccgctggtagtgggcgttgccgcactcccgcttccggttggccagggccacgcgctcctgccccgtgagcatatccaggtcaggcccgtccacagccgtcttcagggtcacctccaggcacagggccgcgtgcggggggatgtatgggctcctgttgccttgggggccgtagcagtacttggagtcagcagtgaccatggccgtctcccccacgtccatgagtgggacactgagatccagggcctggatgacgtcacagtcacccagagtgaacaccagctccggttcctcttgcacccgtgtgccattctccagcgacgtctgcagatgtacggtgaccacctggcccttgaccgggcggctcgaacctggcggccctgggaccagcgtcttcttcttcaacagcccgttccccagaatgtccagccactcttctggggccggggctggggcgggctcgggttccatggcagcaaggaactctcgggccagggccccaggctgctcagcttcctccgccgggggttgtcccatgtcctccagcggtggcagctcactcaggtca

SEQ ID NO: 430856 - DNA, 1602 bp, Homo Sapiens
catgatggtggccacgtgccaggggaccacaccctatgtacaaagcaggagaatgatgctcccagctgagctgcaggatgggcgctgggctgactggaggggtagacggggtggggtctgaccccattagcctttccccatccaacctgggcccccataagccattctctggccctctgcacaagacagactcagcaaatctgcgaggtatggggattctgccaactccccacctcgcctcaccttccctaggtctgccgggtgacccaatccactgggtgcagccccacccccgctcaaccccacatctggacagacacatggcaaatatggaactgaagcccggctgggctggagcacatctggttgttgttgggttggagtcgtcttgcaggtgtcccaaggtggtcaggcctcacccacggtggccaggttgagaccgtgttttttagatgattcaggttactccagggcaaagcatgatcctgatgacacccggcggaaaagcaggctggagcctcggaagagctggccctgcacactcaggtacttccagcagtgaatccaggatttgaacactggggagtaaggggggagcccagcttgcagcccgcagttgttcacagccatgaggtcgccaactagcaggaaggggtaggtcagcatgctcactgcaatccccatcacgaacttggtatagctccggatggccagggcctggctgaactgggaacctggattctggtcgtttcccagcccccctggggtgtcactcacgctgtcatccaccaggtaggcattgatgaagtgggccagcaggttacagccccacaagaaaaccacatcgcccaggaggtgagggattaatccaacgaagaatcccagcagcccttcctctttgaaaatcttcccaatggagctcagcacaccactgtacttggcctcccgtcccacaaactggaccatgcagcgcattgagatgacatgcagggggtgggccaacatgcgggacacacactgcatcatcatctcgtaggaggtctccttcacaactttcttcagggaagtcttcatatcatccttgttggaaacctgctcaatctcatctggagggaaaaccttcttcatgctaccccgagtcacagtagagagggcgttggacatcagccggggactcaggcctcggaacagccctatcttaccatccacttgcacgatgtacttggcgtaggtgaagaagctcggcagatagaggaccttcctccccagcacattggtcccaagggtggggggcatcggctcatgacccacctggatgagcagcttcacgtagagcaggggatggctgagcgccgtcacgcccgcgcccagtgccacgaaaagagcctcagtggtcggggcgttgtccccagaccccaggccccctgacccgccatccatcctgcgggccgagggctgagccgcaggccgagggtggcgaggatgtgcgcggtgcgcgggcggtggatcgcgagctcgagcctcgacccccgccgccgctccgccgcgagctccggctccagctccggctcccgccatccccgcggcaccgccgcgagccaa

SEQ ID NO: 430857 - DNA, 674 bp, Homo Sapiens
ttgatgagcaacgttttttttgcaatggcaactttgtacaaaaaagttggggcgttcttggcgtcgggaccctacctgacccatcagcaaaaggtgttgcggctttataagcgggcgctacgccacctcgagtcgtggtgcgtccagagagacaaataccgatactttgcttgtttgatgagagcccggtttgaagaacataagaatgaaaaggatatggcgaaggccacccagctgctgaaggaggccgaggaagaattctggtaccgtcagcatccacagccatacatcttccctgactctcctgggggcacctcctatgagagatacgattgctacaaggtcccagaatggtgcttagatgactggcatccttctgagaaggcaatgtatcctgattactttgccaagagagaacagtggaagaaactgcggagggaaagctgggaacgagaggttaagcagctgcaggaggaaacgccacctggtggtcctttaactgaagctttgccccctgcccgaaaggaaggtgatttgcccccactgtggtggtatattgtgaccagaccccgggagcggcccatgtagaaagagagagacctcatctttcatgcttgcaagtgaaatatgttacagaacatgcacttgccctaataaaaaatcagtgaaatggt

SEQ ID NO: 430858 - DNA, 892 bp, Homo Sapiens
  misc_feature (617)..(631): n is a, c, g, or t
ggcttggttttatgtgcagttttctttgtcctcaacgagatgccataagctgtggtggcactatacacagtcacagaacaggaagaaccaccgggtgggggctgggggttgggaaaagccatttcctgagaagtgtccggctcctgggtctcactccatggcttgcctcaggccccgcagaagtccctgagaaggcaggcctgcggggcagggggctgtctgaggggctcaggcaccagccagcaggggctggcactgatgggcgaggggaggaagtgcctcccttagaaacttgggccaaaccctgtgcagctctgggactccaccccacctgacttggaggctgtgggtcagagctctggaagctcttgggagcttgggacagcctgagagggtcttgtcctcctttgtagccctctccactgtgggtggaggcagggaggggcagcagggccatgcttttagcttccttaggcagggagggatgatgaaccctcatcctttacctccttctccaaccctccactagcgctgctttcctggtcaaacctgcatcttcactgggtcatgccccaaggcctctgagggacttccacagtggtaaggagggctgcccnnnnnnnnnnnnnnnggttgtggctgagaatgctggagatgctcagttctctccctcacaaggtaggccacaaattcttggtggtgccctcacatctggggtcttcaggcaccagccatgcctgccgaggagtgctgtcaggacagaccatgtccgtgctaggcccaggcacagcccaaccactcctcatccaagtctctcccaggtttctggtcccgatgggcaaggatgacccctccagtggctggtaccccaccatcccactacccctcccaa

SEQ ID NO: 430859 - DNA, 837 bp, Homo Sapiens
ttgcctggtcatggacgtcgttcttacaatcgatctccgctgcttcttcggcttccccacgtcaaagtcgtcctcgtccaagtcctgcccctgcacggagtagtcactagcctcttgctcggaggagaagctctcatactcctcctcggagtagttatccgtggacttggccttggggccggcctgcatggtgctgtcttcgtggtcaatgggctggctggacagggaggcgatccagatctcggccgccttgacgggggcctccttgatgctgctgcagaggctcagcacctggccaccttcagacgggtgttgcatcacctcagccatgctgatggagcccgcggccagcgtcttgtagcccaggatggttctgttcttgtagcgctttctgcgctgcagcatgatctgaagcttgttgccttccctcttcaagaagtgaggatactgcaaggagaaggtcagggccaggtctgtctccacttgtccactggggggaaacaaaatctcatgggaccgcaggattcgtttggagccctgcatcttgacagcgatcaccacggagatcagctccttctccagctccttgaagaccaccagcttcttcagagtcaggctgcacaacctgggcacgcagctggggctggagccgtccacctcccaggtggcgaacaggttcatgggcacgggcgtgttgagcgcgccgggcgcgccggggaggccgaggcggcctcgctcggccatggcgccggccccgccgctccctcggcggcctggggctgcggccgggccgcgcacctttctgcagccggcgggccccaacttttttgtacaaag

SEQ ID NO: 430860 - DNA, 877 bp, Homo Sapiens
actcagggatctgaatcactgggggttcccactctccgtccatctcttcatcccagtcctcgggcttcttagcatcagggtcagggatatgctcgggcttgtcccagtcctcaggcttggagtctgtgggatcatcgatcttggcccgctcatcccagtcttccggttttgaagcatcaggatcctttatcttcttgggtggcaggaagtcccaatcgtcttccaaggagccggactccacctggctgttgtcaatcttcacctcataggtgttgtctggccgcacaatcagtgtgtacaggtgtgtaaactcatcatccttgcaacggatgtccttgttgatcagcacgttcttgcccttgtagttgaagatgacatgaaccttcttggtgccagggccacagatgtcgggaccaaacatgatgttgtattctgagtctccgtgcatgtctgtctggtccaaactattaggaaacagcttcacatagccgcccccacagtcgatgttctgctcatgtttcaccgtgaactgcaccaccagcgtctggcctttgttgctgaaaggctcgaaactggccgacagagcataaaagcgtgcatcctggcttgtctgcaaacctttatctttctcctcgtcaccgtagaacttgccggaactgagaacgaatttgccaaaatctgacttgtgtttggattcgatccagcgggaagtccacccgtctccgtccagaaactgctccttgaagtagacggcaggctcggcgacggccaggccgaggaggccgagcagcagcggcacggatagcagcatggcgggccgagggggcggcaacgcgcgggccctttaaaacgaccctccggcagcggctctgcccaa

SEQ ID NO: 430861 - DNA, 1341 bp, Homo Sapiens
ttggggccgtggccgtgggaggcgggcccggcggagcccagccgcggggggaccggcccgggctcccgctccccgagcgcgtcgcggccgcgtggcccagccgagccttgagaccaccccgcccctgccggtcgcagtcgcgatgtcggtggccgggctgaagaagcagttccacaaagccagccagctatttagtgaaaaaataagtggtgctgaaggaactaaactagacgatgaatttcttgacatggaaaggaaaatagatgttaccaataaagttgctgcagaaattctttcaaaaaccactgaatcttcagcctaatccagcatacagagctaagctaggaatgctgaacactgtgtcgaagatccgagggcaggtgaagaccacaggatacccgcagacggaaggcttgctgggggactgtatgctgaaatacgggaaggagctcggggaagactccacctttggcaatgcattgatagaagttggtgaatccatgaagctaatggctgaggtgaaagactctcttgatattaatgtaaagcaaacttttattgatccacttcagttactacaagataaagatttaaaagagatcgggcatcacctgaaaaagctggaaggccgccgcctggattacgattataaaaagaaacgagtaggtaagataccagacgaagaagtcagacaagcggtagaaaaatttgaagagtcaaaggagttggctgaaagaagcatgtttaactttttagaaaatgatgtagaacaagtcagccagttggctgtgttcatagaggcagcattagactatcacagacagtccacagagattctgcaggagctgcagagcaagctacagatgcgaatatcagctgcatccagtgtccccagacgagaatacaagccaaggcctgtgaaaaggagttctagtgagctcaatggagtttccaccacctctgtagtgaagacgacaggttctaacattcccatggaccagccctgctgtcgtggtctctatgactttgagccagaaaaccaaggagaattaggatttaaagaaggggacatcattacattaaccaatcaaatagatgaaaactggtatgaaggaatgatacacggagaatcgggattcttccccattaattacgtggaagtgatcgtgcctttacctcagtaaatgtgtaacacaaactctggacatactttcgtaactgaaatgaattcacaccagtgtgctctcagtgcggtgttctgtgacatcctttgctctctgaccaacttaatgacttttgtatgtgtgctctctttataatgtattttatatcactttaatt

SEQ ID NO: 430862 - DNA, 203 bp, Homo Sapiens
cagacgtgggtgacacgtggccccgctctctggaccctcagtgggaaaaagtctgaggctggcgtctctcaccaaaccccacctcccctggtgggtcaatactgatctggctgagtgacagcatctcgtgacccaggctggccctgggaaggcgccacaggcgaggcctgcgagtccagggagcaggcagacgctacagccaa

SEQ ID NO: 430863 - DNA, 697 bp, Homo Sapiens
ttccccggggggttcggtggccgccgccgccgccccagcctgggtgggccccttgcgctcctccttggctgcgcggtagccgtccccccaggccgccggcgtctccgtgccgtgcttgcggctcagcgggtaggccccgatggccgccaggatgctgcggtggcgctcggggtccatctccgtgtagtacatctccagggtcagcggcgtgcagatcttgtgccgcagcaggaagccgtcggggcaggtgaactggtcgtaccagatggccttgtacatgatcagcacgcagcccagtagcgccatggcgaaggcgatcatccgtgcggtgggcagcctgcgcccttcctctgggtggctgcagttcagcctctggccctccaggtcagggaaattctgctggtctggggaggacagctggtattctgtctgtgtcttgatgaccacctggtcagggagtggcggctggagctggctgatgtccaaggggctgatcagaggcacactgtccatggcagccccatcctggtccccagggtctttacctggcttcccagagaagctgcagcccagcttcaccatggtggatggcagtccttgtcaggcggctccactggcagctgctgcaggacgcggtcggggaggacgacgatgcggatgtggatgcggaggatgcggccaacttttttgtacaaag

SEQ ID NO: 430864 - DNA, 449 bp, Homo Sapiens
gaggggcaggaaagcgccccccaggagcagccgggccgggcgggcttggactcccccgcccctctgggcctcgtcgcgctggccagcgccgggcgtggggccgagctgccttcttctccatgcagcgagcctgcagcgtccggccgggcctggtccccggcagcccccagcgcgggctccggcgctcctagccttccctgggggtggggttagttacaaaggttcccgtgggtctctggagtggggagctcggcggccgcttctcatctgagagcagtcccagggcccggcccgcctccggccccgcacagggggcatgtccagaggtgctgtgtgtcaccaactggtcttctaatttggaaggagttggaaaggcctttttgttgatgaaaagttggaaacagtggcacatatcgtgaagatgttggagcgccgcttggactgcccaa

SEQ ID NO: 430865 - DNA, 867 bp, Homo Sapiens
gagtcgcacacactggtggaaggtgcagtcatcaatggcaattgattgcttcccgctcttgcttgtttcatcagctgtgcctttgccctgcttttcaataacaatcttgtcattcatcccaaacttgcattcaggcatgccactcaggtagctcttcatcaccacccggcccgacacatgggcactcagcacctgcccttgtggggacatgagcaggttcacactctccagcacatccaggaagagctcattccgacgatacttgataccctctcgccgccagccaatctgcccagttacctggctggtgatctgtgactgctcttcttttgtctgatgctgactcttgatgccctgctgcgtgatgaaggttttcagcgcgcctgtctcggaattctgtgggtagccaaagtctagaatctcatccagcagctcatatatgagcacaaaattgttcttgatgttttcctcgctgatcttgccaaagtaggcagccatcacgtcacacatcttatagaggaattcgaagaccatggcagcgttgacattctgcttggtgactgctgccagccaaatgttggaccgcttaacgtggaagaagctggtgcgagcaatgttggtgacggggctgcgcacctgctgccgggcatggataacattgacccgaaaggcatccactgcgttcctcccgatgtcatctcggtagactcgggagatgagcacctcccccttgtgattatagatgaataagcctccaatcatggcggcagatcagtctccgcggcccatcgctctgagaacagacctggtgtcctcggccccctgctctgccggcccggccactctccggatcccaagatgtcccaa

SEQ ID NO: 430866 - DNA, 928 bp, Homo Sapiens
aagttttatgatttattaacttgtggaacaaaaataaaccagattaaccacaaccatgccttactttatcaaatgtataagaagtaaatatgaatcttatatgacaaaatgtttcattcattataacaaatttccaataatcctgtcaattatatttctaaattttcccccaaattctaagcagagtatgtaaattggaagttaacttatgcacgcttaactatcttaacaagctttgagtgcaagagattgaagagttcaaatctgaccaagatgttgatgttggataagagaattctctgctccccacctctaagttgccagccctcctagagctacctgtggagcaacctgctcagatacatcaaacatggagacagcactcaaagtagaattataaagaagatcatgtccatgttaacattattataaccctacattttgtgcataaagtgtaagtgtataagcatatcaatattaaaaagcaagcaagcagaatttggaattcatccaatccaaatgcggcatcttcaaacctccatgatgctgcttacatgtctcgatcccacttaactatcttgggctgtgacaaagtcacatggttcacacggcaggcatactcatctttttcagtgggggtgaattcagtgtagtacaagagatagaaagaccagtccttgctgaaagacaagtctgaatgctccactttttcaattctctctccattcttcagtaagtcaacttcaatgtcggatggatgaaacccagacacatagcaattcaggaaatttgactttccattctctgctggatgacgtgagtaaacctgaatctttggagtacgctggatagcctccaggccagaaagagagagtagcgcgagcacagctaaggccacggagcgagacatctcggcccgaatgcccaa

SEQ ID NO: 430867 - DNA, 900 bp, Homo Sapiens
gggcgagcaagggcacctctccctcgtccacggcctcggcctcggcctccaaagccccctcttccccgacctatcataccccgacctctaccaccgattccgccacgacccatagctccacgccctaggccccctctcccaggacctccacgacctcgaacaccacctcttcttaagcccattcggggagctacggctcgtccacctcggagcaggttttgacctcggagtgacatcccgcccctaagtagggttctggtggcacgtcccccacgtagtcctcctctgggcaagcctctctggattatgggtaggcctcgtcctccgattgctcccctggccagggcccctatgggtcggcctaaccgtgcctggatgttactcttacccaggcgctgctttaagctctgcttaagttttaatgctgcctggacagagggtctattctccatctgctgggccagtcttctgtttctggcactggctagctgctgttgttgctgcatcgaagcccgaatattcactggcgtcggctgtttgttcttcagcatattagtaaagcgctcatttagagacatcttggtggtgctttttagcacaactttcggcgctgactgtgcagccatcttcgaatcccgagaatcgaaggaaacagacgccagtgctcctcccggggctgccaccacggctccggcaggcgggccggggaccggccgaacctgagttgacggtggaggggctcgggttagctagatgggcggttggttagatgcgtaagcggtagtatgcgagctcagttcgttgttgctggttggctgtctagtcggccgatccgtctgctcacccggcctgccctttcctgcctttcgtctgcagcggccgccagctcccaattttttt

SEQ ID NO: 430868 - DNA, 1108 bp, Homo Sapiens
ctcgccgccgcccttctcggcgggcagcgcgcgaggaccaggccgaggaggaagtggcggcggcggcggcgggactgcgcgccccagctccgatccccgttccgcgtccccgccgccgggaggaggtgcccactcgctcgcggcgcgcgccggccgccagactcggcctgtgggcgatttcctccggacccaggctccccgcccgaggaggaagatgcagacctttctgaaagggaagagagttggctactggctgagcgagaagaaaatcaagaagctgaatttccaggccttcgccgagctgtgcaggaagcgagggatggaggttgtgcagctgaaccttagccggccgatcgaggagcagggccccctggacgtcatcatccacaagctgactgacgtcatccttgaagccgaccagaatgatagccagtccctggagctggtgcacaggttccaggagtacatcgatgcccaccctgagaccatcgtcctggacccgctccctgccatcagaaccctgcttgaccgctccaagtcctatgagctcatccggaagattgaggcccacatggaagacgacaggatctgctcgccacccttcatggagctcacgagcctgtgcggggatgacaccatgcggctgctggagaagaacggcttgactttcccattcatttgcaaaaccagagtggctcatggcaccaactctcacgagatggctatcgtgttcaaccaggagggcctgaacgccatccagccaccctgcgtggtccagaatttcatcaaccacaacgccgtcctgtacaaggtgttcgtggttggcgagtcctacaccgtggtccagaggccctcactcaagaacttctccgcaggcacatcagaccgtgagtccatcttcttcaacagccacaacgtgtcaaagccggagtcgtcatcggtcctgacggagctggacaagatcgagggcgtgttcgagcggccgagcgacgaggtcatccgggagctctcccgggccctgcggcagcactgggcgtgtcactcttcggcatcgacatcatcatcaacaaccagacaggcagcacgccgtcattgacatcaatgcctt

SEQ ID NO: 430869 - DNA, 1078 bp, Homo Sapiens
ccccttgcagtgaccggggcgtgggtgagcagggtgaggtggggagaggggaagtgggggttgggaggtcaggcccgggccgatgcccccagcagctcagggtccaggatataaatctcatcctgtgcgatctcagtcacatagttgaggtgctcctgggctcggtcgatcctgtagaagcggctggcagtggtggcgtccaggaagcaccacttgggggacagtttctggcatgtcggggacttggctccagcaccatcgggctcctgctggagtctctcaatgtgggcacggcagagctctaggtcactgtctcctgggaccaccacagtgcccagcggcacagaggcctccttgagctgctccttgtcgtagtgcagggcctcatagtcgtgcatgctgacgcgactcacctggatgcgcaactgctctggcaccggctgctggtcgctgtgcaggggggcggcgctccgccgcttggccttctgcaccatggtggcctggttgcgcagggcgatgcggatgcgtgaggctgcaagcttgcagggctcgccatccacctgcaccgggatggccttggatgtggtgagcaccacctcgcgacactgcgtcagccgctcgccgtgtccgcccacctgcagcgcggccaacgacgtcatggtgaagccaatgacctcgaggtagccgtcgtcatgccgctggggctcaaagtcgtggtgctccccagggtggccccagggcatggtgcccgcacagtacctggggatgttcaggaaaacaacacactggggtttcaggtcctggatcttgggagtcaagtccattccatcacacaccactcggatgtgcttggccaggtccttggagctgcccatcaggaagtcagagaaagctgtcccggcgtagaacatcttattccgaaagcggctgttgaatttctctgggttggcctctcgagactcgtggaactccagggtgacgtgggcgtcaaagcccaggctgaagtagttgttgaagacatccaggggcaaccggtcggtggcgccttcatctcggtcctcaggccctgcctcgccaa

SEQ ID NO: 430870 - DNA, 1082 bp, Homo Sapiens
  misc_feature (68)..(96): n is a, c, g, or t
cccccgctctccgcaccgtacccggccgcctcgcgccatggcggcccccggcagcgcccggcgacccnnnnnnnnnnnnnnnnnnnnnnnnnnnnncggcctcatgcattgtgcgtcagcagcaatgtttatggtgaaaaatggcaacgggaccgcgtgcataatggccaacttctctgctgccttctcagtgaactacgacaccaagagtggccctaagaacatgacctttgacctgccatcagatgccacagtggtgctcaaccgcagctcctgtggaaaagagaacacttctgaccccagtctcgtgattgcttttggaagaggacatacactcactctcaatttcacgagaaatgcaacacgttacagcgtccagctcatgagttttgtttataacttgtcagacacacaccttttccccaatgcgagctccaaagaaatcaagactgtggaatctataactgacatcagggcagatatagataaaaaatacagatgtgttagtggcacccaggtccacatgaacaacgtgaccgtaacgctccatgatgccaccatccaggcgtacctttccaacagcagcttcagcaggggagagacacgctgtgaacaagacaggccttccccaaccacagcgccccctgcgccacccagcccctcgccctcacccgtgcccaagagcccctctgtggacaagtacaacgtgagcggcaccaacgggacctgcctgctggccagcatggggctgcagctgaacctcacctatgagaggaaggacaacacgacggtgacaaggcttctcaacatcaaccccaacaagacctcggccagcgggagctgcggcgcccacctggtgactctggagctgcacagcgagggcaccaccgtcctgctcttccagttcgggatggtgaggctggggcggcacctctctgggggcgcccactgtgtctccaccacatctttttgtgccctgggtctgctcatgggaggcagcgttaggaaggaggcggcctcactttttttctgccttccctttatcctgggctttttagttccttggttcccctccccccttt

SEQ ID NO: 430871 - DNA, 1163 bp, Homo Sapiens
ggaggcattgttcttgatcagcttgccgtccttgataaggtagccctggccaatcttataaatcttcttgttgatctcagtgcggtgatggtagcctttctgcccagcgcgtgccacagagaaggctacacgagcaggatgccatgccccaatacaggccaccttgcgcaggcctcggtgggtcttgcggggcagcttcttggtgtgccaacgactggtgacccctttgtagcctttgcccttggtcaccccgatgacgtcgatcatctcatcctgcccaaacacttggttcacaggtacctgctgctcaagcctctcgcgggcccagtccagcttctcggccacagtgcctccgttcacctggatctccatcaggtgggccttcttctggcgcagaggaagcaggcgcatctgggtgtgggcaatgacacggatgacttggcagtacttcttcatgctgctgaagtccttctccagctgcttcttgccatcctcatcctgccatttcttgcagtacttggtaaaggccttcttcttagatttatgccaattcttatagaaacgcctcttgcattcatcactgatgtgctcagcaaagacagtcttgaaggtccggaggcctcgaggggtttccacgtagcccacaatgcccacaaccaccatgggtggtgtctctacaatggtcacagcctccaccacctccttcttgttcaccttggatcccggcctgtcgacttcccgcacgatgtgagtcatgccagccttgtatcccaggaaggctgtgaggtggaccggcttggatgggtcatccttagggaagctcttcaccttcccacgatgcctgctgctgcgcttccgaggcaggaagccgagggacccatgtctgggagcggagaactttctgtgagacgagcgccatttccacgcacgctcttccgctcctagctttcgttcagaagttgacgtcagcttcggagacagaaattacacactctacggcgaggggtcgggttcaaacttagtgaaaagccgcggagaggtgggctaagggtgggtgagccacaaatctacggcgtccggcagcagccaaatttgataataacgaagaaaaatggctgcgtcgcttctcctcctgtgatatgcagctatctctggaattccaa

SEQ ID NO: 430872 - DNA, 867 bp, Homo Sapiens
ttgggtagggacctgtgagaggcccaatggcccaatgtacttcccccagatcccactcagaacagcaggtacgcccaggctcctgctgccctagaggtctgcaacatgagtgaagaggttaattagagggacacacttatctctgaagtttttctccaggctgaacatttctattatcagtggcccctaatctggaaaaacccatcattctaatctagcttgtatccccacatcatgagaaagagggaagaagaagaagggatgatgtgtggtagagaagatgagggttaactttagcctttcccaaacactggcaacaaccacttcctcaacaatttttctatttgcttcagcctactcagattttttcaggtttttctagctcctccataacctcactccctcccgaggtctctggttcaaagaccaccctaccagcccctatttgcttcaggttatcctgttgagggtgggtgggaagagtgagaagatataaatgaaaaactggccacatgttgataattgttgaaactagatgatggtacgtggacattcattataccattctccccacttctgtatttgtttgcaatttttcataataaaaaagttttaaaagtcctccagtttccaacacactcaagagagagccccaaccccaaacacagagtttcatggaaaccccacaccaaggcaagaggcagagatgatgattccatttcatatatacactcattttctaactttttttaaaggcccactgctttattttcaatagattaaacctgatttctgagaggtcctgaagttgggcttatttccctggctgggttatgggggagggcagggtaaagggatccttaaaaa

SEQ ID NO: 430873 - DNA, 1041 bp, Homo Sapiens
acttcattgcacgtttaatgcttcatgcagtattcagagcagagataaggggggggatggctcacaggtccacagggacgtcacaggcacaggcgggacacggcgacgtggccggggctgggcggggagggggaccccacgcatcgtaaccgccagcaggggaggggctgcaacgagcagcctcggaccaaggacagcctccccgggacgcacgggacaggagcaacatcgggtgaactgcaatgacctcgcttgtctttcgggggaacccaggaatcccctgggaagcttctctgcactggcctcaccctttcgggcctggctggctcacgtcatcactgcgggatccaagacacatttaagggacaagtcggttgagcgggtcggggcgtgtggggcccgcggctggcttgacttctgctttcccccaacatcaacttgccctgggtggactttctaagaaaggtgaggacggcctgctggagtcccgccagcccctcccaaaggaacttcgagcccggccccccctactggggtctacctgcggccgcggccctggctcccaaggcaggagccccgtgtgtcttggcgcccggcttcctctccaattaggggcaagatcaatctcacagctcagagactctcccactccggcatccgcagcagggcccccgggggaggtgggggtgcggcggggtgcagtggcgcgggcaggggtacacatttgcgggaggggccttgacttcttcggcctcaactccctgctctcagcctcatctcccctggggggcagccccttttgacacacttgcccacactcagacgtcaatctgggggacctgacctcacagggtcaccaggccccaggggcaacgtcctggcctggttctggggaggaccgatcctcaagcatctccaggagactggcaggggtggggtgggccccccaggagaagcccacagaggcagccggggaggcgtgtggggaggaagctggcctgtcccttccttgatctttttttagcggtttgtccgctccaa

SEQ ID NO: 430874 - DNA, 982 bp, Homo Sapiens
ttggtgtggatgtgcatggtgggggcatggacaaagcttgacacatcaagttatcaaggccttggaggaggctctgtatgtcctcaggggactgacaacatcctccagattccagccataaaccaataactaggctggacccttcccactacataatagggctcagcccaggcagccagctttgggctgagctaacaggaccaatggattaaactggcatttcagtccaaggaagctcgaagcaggtttaggaccaggtccccttgagaggtcagaggggcctctgtgggtgctgggtactccagaggtgccactggtggaagggtcagcggagccccagcaggaagggtgggccagccaggccattcttagtccctgggttggggaggcagggagctagggcagggaccaaatgaacagaaagtctcagcccaggatggggcttcttcaacagggcccctgccctcctgaagcctcagtccttcaccttgccaggtgccgtttctcttccgtgaaggccactgcccaggtccccagtgcgccccctagtggccatagcctggttaaagttccccagtgcctccttgtgcatagaccttcttctcccacccccttctgcccctgggtccccggccatccagcggggctgccagagaaccccagacctgcccttacagtagtgtagcgccccctccctctttcggctggtgtagaatagccagtagtgtagtgcggtgtgcttttacgtgatggcgggtgggcagcgggcggcgggctccgcgcagccgtctgtccttgatctgcccgcggcggcccgtgttgtgttttgtgctgtgtccacgcgctaaggcgaccccctcccccgtactgacttctcctataagcgcttctcttcgcatagtcacgtagctcccaccccaccctcttcctgtgtctcacgcaagttttatactctaatatttatatggctttttttcttcga

SEQ ID NO: 430875 - DNA, 336 bp, Homo Sapiens
gaaaaaggaatagagcaaacggtcaaggtcagggttgtacataaaaaatccaggtttgtggaagtcgcgttctttacatctgggagcggggctgtcccggcatcaggcgcagcagctgcacttgtccgacgcccctttgcagatgcagccctgggcacacttggcacagcccacagggcagcaggagcagcagcttttcttgcaggaggtgcatttgcactctttgcatttgcaggagccggcgcaggtgcaggagtcaccggcggcgcaggagcagttgggatccatggcgagctgaagaggcggctagagtcgggacaggttgcacgcggccaa

SEQ ID NO: 430876 - DNA, 850 bp, Homo Sapiens
tttgggagaagatggcgaccgtgtgggatgaggccgagcaagatggaattggggaggaggtgctcaagatgtccacggaggagatcatccagcgcacacggctgctggacagtgagatcaagatcatgaagagtgaagtgttgagagtcacccatgagctccaagccatgaaggacaagataaaagagaacagtgagaaaatcaaagtgaacaagaccctgccgtaccttgtctccaacgtcatcgagctcctggatgttgatcctaatgaccaagaggaggatggtgccaatattgacctggactcccagaggaagggcaagtgtgctgtgatcaaaacctctacacgacagacgtacttccttcctgtgattgggttggtggatgctgaaaagctaaagccaggagacctggtgggtgtgaacaaagactcctatctgatcctggagacgctgcccacagagtatgactcgcgggtgaaggccatggaggtagacgagaggcccacggagcaatacagtgacattgggggtttggacaagcagatccaggagctggtggaggccattgtcttgccaatgaaccacaaggagaagtttgagaacttggggatccaacctccaaaaggggtgctgatgtatgggcccccagggacggggaagaccctcctggcccgggcctgtgccgcacagactaagccaccttcctaaagctggctggcccccagctggtgcagatgttcattggagatggtgccaagctagtccgggatgcctttgccctggccaagagaaagcgccctctatcatcttcattgatgagttgatgccatcggcaccaagcgctttga

SEQ ID NO: 430877 - DNA, 917 bp, Homo Sapiens
aaatgacggagtcaggatgttgtgattacagttgaaggcgacgtgttagaaaggacaggtgcatgaaggcagagagtgcccacagactcggctctcgaaccggggcaggagggaacaaggtgagctgtgcagcccacaggacgggcgggctgggtggacacagccccccaagttggccaagctgagtctctgggcgagtggctcccaggagaggcctggctgagcaggcagagcaccctgggaccccagggcagaaggacccctgccctccagtccccaagacccaggcccgtctccactcatacacgccacctacatgtgacgtcagccctgaaaaggtaacaggaaagttcagaacaaaaacaaaaccccaaaagtaaaaaggctacgtgtagcagagtaataccggaaacgttatatacacaggcggtgatggccccctcggaagtgtccgggtcacttagggggcactgcagaggtccctgtggccagagctgcggggcctcagtacacggagctgttccggatgccacagcacagcaccatgctcaggatcatctcgaagatcatgatcacagcgaccacgatggcagcaatgccgatgaggtacagcttcccggagaagaggtcatcgatcttctggtggcagtcctccttgaagaggttgctgatgatgttgctgcccgagggacacaaattgttcttgagcactgaggtggtcaaagcagtcagtgtgctggagccacagcagtcaagcgtctcgtggaaggtcttcaccacagccttggcgttgttggcgtcatcatccaccacggcctgctgtagggcctggtcatagaactgcttcacatccttggcgatctggtccttgttgacaaagccccagatgccggcggccacctcacaggcaaacccaa

SEQ ID NO: 430878 - DNA, 818 bp, Homo Sapiens
agctggcggccagcctcagcttccagccctagcatagatggccaccccggcatggcctgggaaactgacccgccccctgcaaggagcagctccaacccttagaaaggcatcgactccaggaagggaaaagcaatggaagcagcaggtatctctcctcccttccctgaggtgctgcagaacagcccctgctctcaaaaccagactggacgggagtgaagggagaagaggccagaaacaggagagagtggccgagtgaccaggccccagaccctctcttctggccagtctagcacacgggaactcagaaaactggctacactttggtcacttctcccaacttgggccctgaagccttatgctctgagccccctcaagcccatctcgccaccccaccccagtaaacagcctctcatcaaacgggacgaacagagggaggggatggggaggggccactgctggggtggggaaggcaggcacaggaactgtggcctgggtggctcttcggcttggcccctcctagcccgacgtgacaggatggatgggcagcaggctcccgaacttgaagtgctggatcacagggaacttctccaggcactcggccttatacatgcggatgagaccctggttcactttggaccaggaagggacggcgctgatgttccacagctggttggagtgctctgcaaatgggccagtcttcatccgcagtcacccctctttctcccacagccaaaaaaagggggcctgattcctatcgcccaccaaatccagcagcctcaggaagataagatctccacctgagcttctggtgtcgccaa

SEQ ID NO: 430879 - DNA, 859 bp, Homo Sapiens
ctcttttcacaaatatgttttcacagagccaatacagtactagccattaacccagtacaccaagtgtactgaagtagaaaagatgcaacaagaaaaatagctacattagaaagaccaacactttagaaaaagagtaaaacactttcagtttctcccctttagcccctaaaacaacatcttacagtctggatctggatctacctatacagtcctacattagcttctaaaatatttgtcaggagggaaaaaataaaatgacactggccagtacagtctttggatatttaggaaggggatggggagaaagtcagttctcagaacaaattagtcagcttcagtctcgtcagcagggtctttggattctttgttcttccgcacttcttcaatgtgcttatccttctctcgcaaacgttccagtttggcagccatttgtgcctctcggttctctttattagcttccattttgtgggtcagtttctcttctgccattttactgaagttgttgttctcttctattgccttctgaagcacttctttctcgtgctctcgtttctcagccagctgcttcaagacctcagcttcatgggacttgcgtctttcttctgcagcttctaatttcttctgaatttcctccagggaaagatccttcttctttggaggggaaagggggaattctggaacagattcttttgaccgagggctgagaatcagctcaaaagcctggcctgaggcacgcttctccagttctttcacctggatatcagaagaagccatggtgaatagaagacaagcgacaggcagtgtattctgcacaatcaactgggataaggaaagtcctgctcagtccgagccgccccaa

SEQ ID NO: 430880 - DNA, 780 bp, Homo Sapiens
ttaaaaaacttatagcaagtgctcaaaactttctaaatattgtaatcactatgttttaaagacagagtggactgttacaaatgattttgcaaaatacaaaaatagatatacttccactgaatgctttaatcatttttccgggcactctcatcttttggttcttcctcatctgagtacacagtgggctcctccccctccttcagcagtttgcccacgtgatgatacttgaaagtgaactgagactcccagtcactcagagtctcctgctgggcagcagtgaggtcagaaaggtcatcgtactcatccttcagtgcttccttatccaggcaaaatgtggcaaggcccctggatgcatctcttccagcaaagaccccatacggcccctcgggcccgtagaatttgcggcctttggtcacatcgaacaccttgccgttgatggccatgagtatgcgcgggtcctggacgccgtcgaagcgccgcagctcggcgggggtgaagtcgcgccgcttgaggcggggcagagggggcggctcgtcgtcgtcgctgtcgccgctggccgccggctggtccccgcgcacgatcttgtagagcaggaagatgcagaggccaagcagcagcaggttgagcggcgacgtgaaaatctcatgcagcagcccgccgctctccagatcgcttgggtcggcgccagtcgccaccacatcctcggcagccatgatctctggagtaaaggttgggccgcgctaggcagggatccggaactcgccactttctcctccccaa

SEQ ID NO: 430881 - DNA, 764 bp, Homo Sapiens
aactaggcgcttccgtggctgcgggggtctccttggaagagggggcagcctccgagctgccgggttttgagtctgaagctggggccccgtcacttttggtctcctgggcggcaggagctgcgggcgcctcagtctttttgggttccccttcctccttgctgggctcctccccggcggcaggggccgcgctctcggccggggccgcggcggcctcagcagctttgggggcctcgccgcccgcagcggggccgggggccgcctgctcctgctcgggcgccttcgggggctcagccttggcctctgccgcgccctccgtcttctcgggctccgccttcggggcctcctccttggcagccgccgcgtccttctcgccctccttctcctcggccttgccctcggcgtcctggtcgggcttctccttgccctccttggcctcggcgggctctgcggccgcctggggctcactctccttcggggtcccctcctcttccgtcgccgcgccctcggccttcttgtctttctccttggctttctcgtcgttcacattgtagcccttcttcttcttgctgagcttgcctcccatcttggagttcggctctgggtgcctatgcagcccctgagttagcgcggtgccgccgagaggccggggtcgctggcgtcgtctggctggtgcctggccgctggcggaggctctctcccggctcgacggcggagcccggagcgaggagccagttggagcgctgccgccgccgtcgtcgccccaa
